(19) United States
(12) Patent Application Publication
(10) Pub. No.: US 2025/0302930 A1
(43) Pub. Date: Oct. 2, 2025

(54) IMMUNOTHERAPY TARGETING TUMOR TRANSPOSABLE ELEMENT DERIVED NEOANTIGENIC PEPTIDES IN GLIOBLASTOMA

(71) Applicants: INSTITUT CURIE, Paris (FR); INSERM (INSTITUT NATIONAL DE LA SANTE ET DE LA REC, Paris (FR); UNIVERSITE PARIS CITE, Paris (FR)

(72) Inventors: Sebastian AMIGORENA, Paris (FR); Christel GOUDOT, Le Blanc Mesnil (FR); Pierre Emmanuel BONTE, Lieusaint (FR); Antonela MERLOTTI IPPOLITO, Paris (FR); Yago ARRIBAS DE SANDOVAL, Paris (FR)

(21) Appl. No.: 18/849,761

(22) PCT Filed: Mar. 24, 2023
(86) PCT No.: PCT/EP2023/057700

§ 371 Date: Sep. 23, 2024

(30) Foreign Application Priority Data
Mar. 24, 2022 (EP) 22305355.4

(51) Int. Cl. A61K 39/00; A61K 39/395; A61P 35/00; C07K 14/47; C07K 14/725; C07K 16/28; C07K 16/30

(52) U.S. Cl. CPC A61K 39/0011; A61K 39/39558; A61P 35/00; C07K 14/4748; C07K 14/7051; C07K 16/2809; C07K 16/283; C07K 16/2878; C07K 16/30; C07K 2317/31

(57) ABSTRACT

The present disclosure provides shared neoantigenic peptides derived from the expression of tumor-specific transposable element, as well as nucleic acids, vaccines, antibodies and immune cells that can be used in cancer therapy.

### FIELD OF THE DISCLOSURE

[0001] The present disclosure provides shared neoantigenic peptides derived from the expression of tumor-specific transposable element, as well as nucleic acids, vaccines, antibodies and immune cells that can be used in cancer therapy.

### BACKGROUND

[0002] Harnessing the immune system to generate effective responses against tumors is a central goal of cancer immunotherapy.

[0003] Part of the effective immune response involves T lymphocytes specific for tumor antigens. T cell activation requires their interaction with antigen-presenting cells (APCs), commonly dendritic cells (DCs), expressing TCR-cognate peptides presented in the context of a major histocompatibility molecule (MHC) and co-stimulation signals. Neoplasms often contain infiltrating T lymphocytes reactive with tumor cells. Subsequently, activated T cells can recognize peptide-MHC complexes presented by all cell types, even malignant cells.

[0004] It is commonly accepted that T cells can control, and sometimes reject, solid tumors, especially after immune checkpoint blockade (ICB). Indeed, the development of checkpoint blockade therapy has provided means to bypass some of these mechanisms, leading to more efficient killing of cancer cells. The promising results yielded by this approach have opened up new avenues for the development of T cell-based immunotherapy.

[0005] The nature of the tumor antigens targeted by these T cells, however, remains partially unclear. After the identification of differentiation and tumor-testis antigens a few decades ago (Boon et al., J Exp Med, 1996, 183, 725-729, doi:10.1084/jem.183.3.725; Almeida et al., Nucleic Acids Res, 2009, 37, D816-819, doi:10.1093/nar/gkn673; Simpson et al., Nat Rev Cancer, 2005, 5, 615-625, doi:10.1038/nrc1669), a new family of antigens derived from passenger tumor mutations was discovered. Defined sets of mutations in single cells, before or after oncogenic transformation, are amplified by clonal expansion of tumor cells. This set of mutations that are now expressed in multiple tumor cells becomes “visible” to the immune system, and trigger T cell immune responses. Unlike differentiation and tumor testis antigens, mutational neo-antigens are by definition tumor-specific, and therefore recognized by the immune system as “non-self”. Clear evidence is available, including the high rate of clinical responses to ICB in patients with microsatellite instability (who bear very high numbers of point mutations in their tumors) or the correlation existing between the median number of mutations in cancer types and the rate of response ICB.

[0006] Several lines of evidence, however, also suggest that point mutations are not the only antigens seen by T cells on tumors. First, there are exceptions to the correlation between the frequency of mutations and the rates of response to ICB. RCC, for example has a mutational burden around 2 mutations per MB, and a response rate to ICB around 25%, as compared to squamous non-small cell lung cancer (LUSC), around 9 mutations/MB and a response rate to ICB of 17% (Yarchoan et al., N Engl J Med, 2017, 377, 2500-2501, doi:10.1056/NEJMc1713444; Yarchoan et al., JCI Insight, 2019, 4, doi:10.1172/jci.insight.126908). Second, at the level of individual patients, the number of mutations is not predictive of clinical responses to ICB. Third, tumor types with extremely low mutation burdens (and limited genomic instability), such as rhabdomyosarcoma show relatively high rates of clinical responses to ICB (McGrail et al., Ann Oncol, 2021, 32, 661-672, doi:10.1016/j.annonc.2021.02.006; Gromeier et al., Nat Commun, 2021, 12, 352, doi:10.1038/s41467-020-20469-6). Finally, there are multiple examples in the literature of T cell responses in patients to non-mutational antigens, including differentiation and tumor-testis antigens.

[0007] Non-coding genome-peptide antigens can also represent tumor-specific antigens. Different teams recently used proteogenomics, i.e.: experimental approaches based on a combination of transcriptomic and immunopeptidomics analyses, to search randomly for tumor-specific ORFs that encode peptides presented by MHC-I molecules on tumor cells (Laumont et al., Nat Commun, 2016, 7, 10238, doi:10.1038/ncomms10238; Chong et al., Nat Commun, 2020, 11, 1293, doi:10.1038/s41467-020-14968-9). Most of the identified peptides are issued from non-coding genomic regions. Some of these potential tumor antigens are present in several patients and can induce immune responses in vitro or in mouse models. There is however no evidence so far, for T cells, specific for shared tumor specific neoantigens originating from the non-coding genome in cancer patients. Indeed, identification of such tumor neoantigens would be of interest and might improve the development of cancer therapy in particular in the case of vaccination and adoptive cell therapy.

[0008] A large fraction of the non-coding genome is composed of transposable elements (TEs). TEs include 3 main classes of retrotransposons (short interspersed nuclear elements -SINE, long interspersed nuclear elements -LINE and long terminal repeats -LTRs), and DNA transposons (Grundy et al., FEBS J, 2021, doi:10.1111/febs.15722; Burns, K. H., Nat Rev Cancer, 2017, 17, 415-424; Bourque et al., Genome Biol, 2018, 19, 199, doi:10.1186/s13059-018-1577-z). Retro-transposition requires the transcription of the TEs, their reverse transcription into DNA and their integration at a different genomic position. Retro-transposition can compromise the stability of the genome, and mammalian cells protect themselves through epigenetic repression of TE transcription in adult tissues. As a result, TE transcription is relatively low (but detectable) in most adult cells, and more active during embryonic development, in stem cells and in tumors. TE de-repression in tumors occurs through multiple epigenetic changes to TE loci, including in DNA and histone de-methylation. Both epigenetic changes are related to oncogenic processes, which involve different levels of epigenetic de-regulation.

[0009] However, whether de-repressed TEs in tumors can be a source of truly tumor-specific antigens has never been questioned.

[0010] Glioblastoma (GBM) is still one of the most challenging cases in clinical oncology. The gold standard management of GBM, tumor resection followed by radiotherapy and chemotherapy (typically temozolomide), is limited in efficacy due to high rates of recurrence, overall resistance to therapy, and devastating side effects.

[0011] Thus, identification of shared tumor specific neoantigens would be of interest and might improve the development of cancer therapy in particular in the case of vaccination and adoptive cell therapy and would therefore represent a tremendous hope for treatment of glioblastoma in patients.

### SUMMARY

[0012] The present disclosure relates to a method for identifying or screening a tumor cell TE signature comprising the steps of:
[0013] i. obtaining the single cell transcriptomic TE pattern of at least one tumor cell and the single cell TE transcriptomic pattern of at least one normal cell, and
[0014] ii. performing differential expression analysis of the TE transcriptomic pattern from said at least one tumor cell with respect to said at least one normal cell, and
[0015] iii. selecting the TE transcript sequences which are differentially expressed in said at least one tumor cell as compared to said at least one normal cell thereby obtaining a tumor cell TE signature.

[0016] Typically, at step i) the single cell transcriptomic TE pattern is obtained by mapping the single-cell transcriptome to individual genomic TE occurrence.

[0017] The present disclosure also relates to a method for identifying TE-derived tumor neoantigenic peptides, the method comprising the steps of:
[0018] a) obtaining a tumor cell TE signature according to the method for identifying a tumor cell TE signature of the present disclosure, and
[0019] b) in silico translating the TE transcript sequences from the tumor cell TE signature obtained at step a) to obtain TE-derived tumor peptides.

[0020] Typically, the method for identifying TE-derived tumor neoantigenic peptides further comprises a step c) of identifying the TE derived peptides that bind at least one MHC molecule; in some embodiments, a library comprising the TE-derived peptide sequences identified at step b) is searched in the MHC ligandome from tumor cells and wherein matched peptides from the said MHC ligandome are selected, thus identifying MHC bound TE-derived peptides; in some embodiments, the TE-derived MHC bound peptides are further filtered against canonical proteins.

[0021] Typically, the method for identifying TE-derived tumor neoantigenic peptides further comprises a step d) of selecting non-redundant TE-derived peptides; in some embodiments, this step is achieved by mapping the TE-derived peptides of step c) to the individual TE genomic location and selecting uniquely mapped TE.

[0022] In some embodiments of the method for identifying TE-derived tumor neoantigenic peptides, the TE-encoded peptides which binds at least one MHC class I or II molecule of a subject with a K_{D} binding affinity of less than 10⁻⁵ M are selected.

[0023] The present disclosure further encompasses an isolated tumor neoantigenic peptide sequence having at least 8 amino acids, wherein said neoantigenic peptide comprises a TE encoded sequence and binds at least one MHC class I or II molecule of a subject with a K_{D} binding affinity of less than 10⁻⁵ M.

[0024] Said neoantigenic peptide has typically one or more of the following properties:
[0025] the TE expression is derepressed in a tumor cell as compared to non-tumor cells;
[0026] the peptide is encoded by a TE transcript sequence or a fragment thereof obtained according to the method for identifying a tumor cell TE signature as above defined;
[0027] the peptide is obtained in a method according to the method for identifying TE-derived tumor neoantigenic peptides; and/or
[0028] the peptide is encoded by a TE transcript or a fragment thereof of any one of SEQ ID NO:381 to 5020; preferably the peptide is encoded by a TE transcript or a fragment thereof of any one of SEQ ID NO: 381 to 430 and 432 to 5020; more preferably the peptide is encoded by a TE transcript or a fragment thereof of any one of SEQ ID NO: 381 to 393; 395 to 430 and 432 to 5020;
   optionally the peptide comprises at least 8 amino acids, in particular 8 or 9 to 15 amino acids, notably 12 to 15 amino acids and binds at least one MHC class I molecule of a subject or comprises from 13 to 25 amino acids and binds at least one MHC class II of a subject.

[0029] In some embodiments, the neoantigenic peptide comprises or consist of any one of SEQ ID NO: 1 to 380 or a fragment thereof, optionally the peptide is encoded by a single genomic TE. In some preferred embodiments, the neoantigenic peptide comprises or consist of any one of SEQ ID NO: 1 to 26 and 28 to 380 or a fragment thereof; preferably the neoantigenic peptide comprises or consist of any one of SEQ ID NO: 1 to 10; 12 to 26; 28 to 57; 59 to 242; 244 to 255; 257 to 319 and 321 to 380 or a fragment thereof; more preferably the neoantigenic peptide is encoded by a single genomic TE.

[0030] In some embodiments of the present disclosure, the tumor is glioblastoma tumor.

[0031] Typically, the TE is characterized by one or more of the following properties:
[0032] the TE is selected from TE over 50.10⁶ years; optionally wherein the TE is selected from the LINE-1, SVA and ERVK TE subfamilies; optionally wherein the TE is selected from L1PA/B/x TEs;
[0033] the TE is selected from TEs over 50.10⁶ years;
[0034] the TE is selected from TEs bearing an intact or nearly intact ORF;
[0035] the TE is selected from intronic or intergenic TEs
[0036] the TE is encoded by chromosome 7.

[0037] The present disclosure also encompasses a population of autologous dendritic cells or antigen presenting cells that have been pulsed with one or more of the TE-derived tumor neoantigenic peptides as above defined or transfected with a polynucleotide encoding one or more of the said peptides.

[0038] The present disclosure also encompasses a vaccine or immunogenic composition capable of rising a specific T-cell response comprising:
[0039] one or more neoantigenic peptides as above defined;
[0040] one or more polynucleotides encoding a neoantigenic peptide as above defined, optionally a neoantigenic peptide linked to a heterologous regulatory control nucleotide sequence; and/or
[0041] a population of antigen presenting cells, as above defined.

[0042] The present disclosure also encompasses an antibody, or an antigen-binding fragment thereof, a T cell receptor (TCR), or a chimeric antigen receptor (CAR) that specifically binds a neoantigenic peptide as above, optionally in association with an MHC molecule, with a K_{d}affinity of about 10⁻⁶ M or less;
[0043] optionally the antibody is a multispecific antibody that further targets at least an immune cell antigen, optionally the immune cell is a T cell, a NK cell or a dendritic cell, optionally wherein the targeted antigen is CD3, CD16, CD30 or a TCR; and/or
[0044] optionally the antibody is a multispecific antibody that further targets at least an immune cell antigen, optionally wherein the immune cell is a T cell, a NK cell or a dendritic cell, optionally wherein the targeted antigen is CD3, CD16, CD30 or a TCR.

[0045] In some embodiments, the T cell receptor as previously defined is made soluble and fused to an antibody fragment directed to a T cell antigen, optionally the targeted antigen is CD3 or CD16.

[0046] The present disclosure also encompasses a polynucleotide encoding the neoantigenic peptide as herein defined, or the antibody, the CAR or the TCR as herein defined. The present disclosure also encompasses a vector comprising said polynucleotide.

[0047] The present disclosure also encompasses an immune cell that specifically binds to one or more neoantigenic peptides as defined herein; optionally the immune cell is an allogenic or autologous cell selected from T cell, NK cell, CD4+/CD8+, TILs/tumor derived CD8 T cells, central memory CD8+ T cells, Treg, MAIT, and Yδ T cell.

[0048] The present disclosure also encompasses a T cell as defined above, which comprises:
[0049] a T cell receptor that specifically binds one or more neoantigenic peptides as defined herein, and/or
[0050] a TCR or a CAR of the present disclosure.

[0051] The present disclosure also encompasses the neoantigenic peptide, the population of dendritic cells, the vaccine or immunogenic composition, the antibody, the antigen-binding fragment thereof, the CAR, the TCR, the polynucleotide the vector, or the immune cell as defined herein for use in the treatment of cancer; optionally for inhibiting cancer cell proliferation, or for use in cancer vaccination therapy of a subject; optionally the cancer is glioblastoma.

### FIGURES

[0052] FIG. 1. Single cell TE expression distinguishes all cell populations in tumors (A) Workflow showing the strategy of alignment and TE quantification using uniquely or multiple mapped reads. (B) t-Distributed Stochastic Neighbor Embedding (tSNE) visualizing all single cells after filtering (n=3,167). Cells clusters are indicated as distinct sorted cell populations and identified based on gene expression (left), TE subfamilies expression (middle) and individual TE copies expression (right). (C) Violin plots representing the TE specific signatures for neoplastic cells (top) and immune cells (bottom). (D) Plot showing TE subfamily enrichment analysis using all expressed TE (left), neoplastic (middle) and immune (right) signatures. On x-axis is represented the ‘Adjusted p-value’ as −log 10 (adjusted p-value) using the Benjamini-Hochberg procedure. Ratio proportions (proportion in subset versus genomic proportion from RepeatMasker) are represented by proportional circles. dashes represent adjusted P-value <0.05 on x-axis. The length of the colored lines indicates the adjusted p-value. The subfamilies are colored by classes. The longer the colored line is, the smaller is the adjusted p-value. (E) Radar plots displaying the rate of genes (top) and TE (bottom) along all chromosomes. Genomic ratio based on RepeatMasker (in black) and ratio from neoplastic signature (in darkgray) are shown. (F) Barplots showing the rate of genes (first line) or TEs (second line) located in chromosome 10 (left) or 7 (right) on different subsets of features: All annotated features in the genome (Genomic), all expressed features in the datasets after filtering (Expressed), all differentially expressed features from neoplastic, immune and OPC cell populations.

[0053] FIG. 2. TE expression in neoplastic cells is enriched in elements independent of their closest gene (A) Barplot showing the distribution of different types of genomic regions for individual TE copies using RepeatMasker (4496056), all expressed TEs (130028), TEs from the neoplastic (3428) and immune signatures (2920). (B) Barplot showing the number of TEs in proximal or distal regions of closest protein-coding genes in neoplastic and immune signatures. (C) Plot showing the distance to closest protein-coding gene per class of TEs for proximal (first line) and distal (second line) TEs comparing neoplastic and immune signatures. (D) Plots summarizing the association between TEs and genes described in FIG. 1B in neoplastic (top) and immune signatures (bottom). The TE⁺gene⁺ category represents a positive correlation when the TE and gene are differentially expressed for the same cell population. The TE*gene category represents a negative correlation when the TE is differentially expressed and not the gene. The categories are also separated according to proximal and distal status.

[0054] FIG. 3. Single cell neoplastic TE signature is highly enriched in GBM cohort from TCGA compared to GTEx normal tissues. (A-B) PCA and Uniform Manifold Projections (UMAP) projection of GBM TCGA cohort, GTEx normal brain and other GTEx tissues based on single cell neoplastic TE signature, color-coded by dataset types. (C) Gene Set Enrichment Analysis (GSEA) was performed to determine the specific enrichment in neoplastic signature in GBM tumor samples and GTEx normal brain samples. Normalized Enrichment Score (NES) and FDR are indicated in the figure. (D) Violin plots showing the mean expression of single cell neoplastic signature in GBM TCGA cohort, GTEx normal brain and other GTEx datasets. (E) Violin plots showing specific expression of individual TEs in tumor samples (bulk RNA-seq analysis, top) and neoplastic cells (single cell analysis, bottom).

[0055] FIG. 4. Neoplastic-enriched TE-derived peptides are presented on HLA-I molecules and immunogenic. (A) Workflow for the identification of TE-derived peptides using mass spectrometry-based immunopeptidomics. (B) Boxplot showing the peptide-spectrum identification score (SEQUEST score) from annotated and TE-derived peptides. (C) Binding to HLA-A02*01 and HLA-B*07:01 measured as percentage of peptide-HLA-I-complex formation compared to positive control. (D) Total frequency of multimer positive populations for HLA-A*02:01 predicted or MS-derived peptides and HLA-B*07:02 MS-derived peptides in each evaluated donor. Total Frequencies are calculated considering total number of multimer positive cells in all replicates among all CD8+ T cells evaluated per donor. Lines below indicates mix of peptides used for each donor. P #: predicted TE-derived peptides; pMS #: MHC-I peptidome-derived peptides; Melan-A mutated sequenced and N #: normal proteome-derived peptides.

[0056] FIG. 5. TE derived peptides are in long ORFs starting with canonical and non-canonical start codon. Barplots showing for different subsets the quantification of LINE and LTR TEs with an intact ORF documented in gEVE database.

[0057] FIG. 6. TE-derived peptides redundancy depends on TE age. Plot showing TE family enrichment analysis using TEs coding for peptides with all assignments (left) or single assignment (right). On x-axis is represented the ‘log 2 proportion ratio’ (proportion in subset versus proportion in RepeatMasker). The significance of hypergeometric test is represented by proportion circles. The bigger circle is, the smaller is the adjusted pvalue (−log 10 adjusted pvalue).

[0058] FIG. 7. TE-derived peptides are overexpressed in GBM tumor samples. The log 2 ratio between GBM and GTEX TE-derived peptides total RNA related expression has been determined. Age information, redundancy and TE classes are considered. The tissues from GTEx are classified into 5 normal tissues categories defined in Bradley et al (Nat Commun, 2020, 11, 5332). TEs are ordered using hierarchical clustering and two groups, group 1 and group 2. Plot showing median age of TEs coding for peptides for each group.

### DETAILED DISCLOSURE

[0059] The inventors used single cell transcriptomics (scRNAseq) of tumor sample to identify pattern of individual TEs selectively expressed in tumor cells, in particular in total glioblastoma (GBM) tumor cells. They further demonstrated that peptides encoded by these selectively expressed TE are not only presented by HLA-I molecules in cancer cells and immunogenic but are also shared among patients. They also demonstrated that single-TE (non-redundant TE) encoded peptides are more tumor-specific.

[0060] Their results also show that the TEs differentially expressed in GBM tumors present a bias for TEs encoded on chromosome 7, which is fully consistent with the known recurrent amplification of this chromosome in GBM cancers. TE-derived peptides presented by MHC-I are enriched for peptides derived from specific subfamilies, including young LINE-1 and SVA elements.

[0061] Thus, the results included therein demonstrate that scRNAseq-guided, TE-centered, proteogenomics represents a powerful tool to identify tumor-specific antigens, and that TE-derived peptides recurrently presented on HLA-I molecules on GBM tumor cells are mainly encoded by young LINE-1 elements that are selectively de-repressed in such GBM tumor cells.

[0062] Because the peptides identified according to the method as herein disclosed are immunogenic in healthy patients and presented to HLA-I, they represent a source of share tumor specific neoantigens that can be used for the production of various cancer therapies including antigen presenting cells and immunogenic compositions notably for personalized vaccination strategies, but also to build CAR or TCR and produce modified immune cells comprising thereof, or to generate antibodies usable in the treatment of cancer. Identification of true specific epitopes express in many cancer patients would allow to follow these therapeutic approaches more efficiently and to strongly lower the costs. In the case of TCR adoptive therapies, identifying TCRs specific for the shared neo-epitopes would allow the development of better autologous or even allogeneic cellular therapies. It would also be possible to develop antibodies specific to the presented shared HLA-peptide complexes for ADC or CAR-T cell approaches.

### Definitions

[0063] According to the present disclosure, the term “normal” refers to the healthy state or the conditions in a healthy subject, tissue, or cell, i.e., non-pathological conditions, wherein “healthy” preferably means non-cancerous. Typically, in some embodiments, healthy cell means “non tumor cell” or “non-malignant cell”.

[0064] Cancer (medical term: malignant neoplasm) is a class of diseases in which a group of cells display uncontrolled growth (division beyond the normal limits), invasion (intrusion on and destruction of adjacent tissues), and sometimes metastasis (spread to other locations in the body via lymph or blood). These three malignant properties of cancers differentiate them from benign tumors, which are self-limited, and do not invade or metastasize. Most cancers form a tumor but some, like leukemia, do not.

[0065] Malignant tumor is essentially synonymous with cancer. Malignancy, malignant neoplasm, and malignant tumor are essentially synonymous with cancer.

[0066] As used herein, the term “tumor” or “tumor disease” refers to an abnormal growth of cells (called herein neoplastic cells or tumor cells) preferably forming a swelling or lesion. By “tumor cell” is meant an abnormal cell that grows by a rapid, uncontrolled cellular proliferation and continues to grow after the stimuli that initiated the new growth cease. Tumors show partial or complete lack of structural organization and functional coordination with the normal tissue, and usually form a distinct mass of tissue, which may be either benign, pre-malignant or malignant.

[0067] A benign tumor is a tumor that lacks all three of the malignant properties of a cancer. Thus, by definition, a benign tumor does not grow in an unlimited, aggressive manner, does not invade surrounding tissues, and does not spread to non-adjacent tissues (metastasize).

[0068] Neoplasm is an abnormal mass of tissue as a result of neoplasia. Neoplasia (new growth in Greek) is the abnormal proliferation of cells. The growth of the cells exceeds and is uncoordinated with that of the normal tissues around it. The growth persists in the same excessive manner even after cessation of the stimuli. It usually causes a lump or tumor. Neoplasms may be benign, pre-malignant or malignant.

[0069] Cancer or tumor may affect any one of the following tissues or organs: breast; liver; kidney; heart, mediastinum, pleura; floor of mouth; lip; salivary glands; tongue; gums; oral cavity; palate; tonsil; larynx; trachea; bronchus, lung; pharynx, hypopharynx, oropharynx, nasopharynx; esophagus; digestive organs such as stomach, intrahepatic bile ducts, biliary tract, pancreas, small intestine, colon; rectum; urinary organs such as bladder, gallbladder, ureter; rectosigmoid junction; anus, anal canal; skin; bone; joints, articular cartilage of limbs; eye and adnexa; brain; peripheral nerves, autonomic nervous system; spinal cord, cranial nerves, meninges; and various parts of the central nervous system; connective, subcutaneous and other soft tissues; retroperitoneum, peritoneum; adrenal gland; thyroid gland; endocrine glands and related structures; female genital organs such as ovary, uterus, cervix uteri; corpus uteri, vagina, vulva; male genital organs such as penis, testis and prostate gland; hematopoietic and reticuloendothelial systems; blood; lymph nodes; thymus. The tumors or cancers types as per the present disclosure also include leukemias, seminomas, melanomas, teratomas, lymphomas, neuroblastomas, gliomas, rectal cancer, endometrial cancer, kidney cancer, adrenal cancer, thyroid cancer, blood cancer, skin cancer, cancer of the brain, cervical cancer, intestinal cancer, liver cancer, colon cancer, stomach cancer, intestine cancer, head and neck cancer, gastrointestinal cancer, lymph node cancer, oesophagus cancer, colorectal cancer, pancreas cancer, ear, nose and throat (ENT) cancer, breast cancer, prostate cancer, cancer of the uterus, ovarian cancer and lung cancer and the metastases thereof. In some embodiments, the cancer or tumor is associated with de-repressed TEs (see notably for reference Kong, Y., Rose, C. M., Cass, A. A. et al. Transposable element expression in tumors is associated with immune infiltration and increased antigenicity. Nat Commun 10, 5228 (2019)). In some embodiments, the tumor or cancer is selected from stomach, bladder, liver, and head and neck tumors. In particular embodiments, the tumor is glioblastoma

[0070] “Growth of a tumor” or “tumor growth” according to the present disclosure relates to the tendency of a tumor to increase its size and/or to the tendency of tumor cells to proliferate.

[0071] For purposes of the present disclosure, the terms “cancer” and “cancer disease” are used interchangeably with the term “tumor” or “tumor disease”.

[0072] Cancers are classified by the type of cell that resembles the tumor and, therefore, the tissue presumed to be the origin of the tumor. These are the histology and the location, respectively.

[0073] By “metastasis” is meant the spread of cancer cells from its original site to another part of the body. The formation of metastasis is a very complex process and depends on detachment of malignant cells from the primary tumor, invasion of the extracellular matrix, penetration of the endothelial basement membranes to enter the body cavity and vessels, and then, after being transported by the blood, infiltration of target organs. Finally, the growth of a new tumor, i.e., a secondary tumor or metastatic tumor, at the target site depends on angiogenesis. Tumor metastasis often occurs even after the removal of the primary tumor because tumor cells or components may remain and develop metastatic potential. In one embodiment, the term “metastasis” according to the present disclosure relates to “distant metastasis” which relates to a metastasis which is remote from the primary tumor and the regional lymph node system.

[0074] A relapse or recurrence occurs when a person is affected again by a condition that affected them in the past. For example, if a patient has suffered from a tumor disease, has received a successful treatment of said disease and again develops said disease said newly developed disease may be considered as relapse or recurrence. However, according to the present disclosure, a relapse or recurrence of a tumor disease may but does not necessarily occur at the site of the original tumor disease. Thus, for example, if a patient has suffered from ovarian tumor and has received a successful treatment a relapse or recurrence may be the occurrence of an ovarian tumor or the occurrence of a tumor at a site different to ovary. A relapse or recurrence of a tumor also includes situations wherein a tumor occurs at a site different to the site of the original tumor as well as at the site of the original tumor. Preferably, the original tumor for which the patient has received a treatment is a primary tumor and the tumor at a site different to the site of the original tumor is a secondary or metastatic tumor.

[0075] By “treat” is meant to administer a compound or composition as described herein to a subject in order to prevent or eliminate a disease, including reducing the size of a tumor or the number of tumors in a subject; arrest or slow a disease in a subject; inhibit or slow the development of a new disease in a subject; decrease the frequency or severity of symptoms and/or recurrences in a subject who currently has or who previously has had a disease; and/or prolong, i.e. increase the lifespan of the subject. In particular, the term “treatment of a disease” includes curing, shortening the duration, ameliorating, preventing, slowing down or inhibiting progression or worsening, or preventing or delaying the onset of a disease or the symptoms thereof.

[0076] By “being at risk” is meant a subject, i.e. a patient, that is identified as having a higher than normal chance of developing a disease, in particular cancer, compared to the general population. In addition, a subject who has had, or who currently has, a disease, in particular cancer, is a subject who has an increased risk for developing a disease, as such a subject may continue to develop a disease. Subjects who currently have, or who have had, a cancer also have an increased risk for cancer metastases.

[0077] The therapeutically active agents or product, vaccines and compositions described herein may be administered via any conventional route, including by injection or infusion.

[0078] The agents described herein are administered in effective amounts. An “effective amount” refers to the amount which achieves a desired reaction or a desired effect alone, together with further doses, or together with further therapeutic agents. In the case of treatment of a particular disease or of a particular condition, the desired reaction preferably relates to inhibition of the course of the disease. This comprises slowing down the progress of the disease and, in particular, interrupting or reversing the progress of the disease. The desired reaction in a treatment of a disease or of a condition may also be delay of the onset or a prevention of the onset of said disease or said condition. An effective amount of an agent described herein will depend on the condition to be treated, the severity of the disease, the individual parameters of the patient, including age, physiological condition, size and weight, the duration of treatment, the type of an accompanying therapy (if present), the specific route of administration and similar factors. Accordingly, the doses administered of the agents described herein may depend on several of such parameters. In the case that a reaction in a patient is insufficient with an initial dose, higher doses (or effectively higher doses achieved by a different, more localized route of administration) may be used.

[0079] The pharmaceutical compositions as herein described are preferably sterile and contain an effective amount of the therapeutically active substance to generate the desired reaction or the desired effect.

[0080] The pharmaceutical compositions as herein described are generally administered in pharmaceutically compatible amounts and in pharmaceutically compatible preparation. The term “pharmaceutically compatible” refers to a nontoxic material which does not interact with the action of the active component of the pharmaceutical composition. Preparations of this kind may usually contain salts, buffer substances, preservatives, carriers, supplementing immunity-enhancing substances such as adjuvants, e.g., CpG oligonucleotides, cytokines, chemokines, saponin, GM-CSF and/or RNA and, where appropriate, other therapeutically active compounds. When used in medicine, the salts should be pharmaceutically compatible.

[0081] A “transposable element (TE, transposon, or jumping gene)” as used herein is a repeated DNA sequence that is able to move from one location to another in the genome either through an RNA copy generated by a reverse transcriptase (Class I TEs, retrotransposons), or by excising themselves from their original location (Class II TEs, or DNA transposons).

[0082] Retrotransposons are by far more abundant and their characteristics are similar to retroviruses, such as HIV. Retrotransposons function via reverse transcription of an RNA intermediate replicative mechanism. They are commonly grouped into three main orders: retrotransposons with long terminal repeats (LTRs) flanking the retroelement main body, which encode reverse transcriptase, similar to retroviruses; retroposons with long interspersed nuclear elements (LINEs, LINE-1s, or L1s), which encode reverse transcriptase but lack LTRs, and are transcribed by RNA polymerase II; and retrotransposons with short interspersed nuclear elements (SINEs) that do not encode reverse transcriptase and are transcribed by RNA polymerase III. DNA transposons have a transposition mechanism that do not involve an RNA intermediate. The transpositions are catalyzed by several transposase enzymes. LTRs include endogenous retroviruses (ERVs), while non-LTR TEs subdivide into long-interspersed (LINEs) and short interspersed elements (SINEs), nonautonomous transposons mobilized by the LINE integration machinery. These lineages are composed of phylogenetically related families, further branching out into multiple subfamilies, each originating from one precursor copy. With time, the accumulation of mutations introduced divergence in the consensus sequence within members of each subfamily. For review on TE retrotransposon, see Richardson, Sandra R et al. “The Influence of LINE-1 and SINE Retrotransposons on Mammalian Genomes.” Microbiology spectrum vol. 3, 2 (2015): MDNA3-0061-2014.

[0083] A typical L1 element is approximately 6,000 base pairs (bp) long and consists of two non-overlapping open reading frames (ORF) which are flanked by untranslated regions (UTR) and target site duplications. LINE-1 retrotransposons have been amplifying in mammalian genomes for greater than 160 million years. In humans, the vast majority of LINE-1 sequences have amplified since the divergence of the ancestral mouse and human lineages approximately 65-75 million years ago. Sequence comparisons between individual genomic LINE-1 sequences and a consensus sequence derived from modern, active LINE-1s can be used to estimate the age of genomic LINE-1s (Khan H, Smit A, Boissinot S; Genome Res. 2006 January; 16(1):78-87). L1 subfamilies typically categorize into old (LIM, AluJ), intermediate (LIP, L1PB, AluS), young (L1HS, L1PA, AluY) and related (HAL, FAM) subfamilies. In humans, the only autonomously active family is the long-interspersed element-1 (LINE-1 or L1), however a few L1 copies are still retrotransposition competent, all of them belonging to the youngest human-specific L1HS subfamily.

[0084] SVA elements comprise an evolutionarily young, non-autonomous retrotransposon family that arose in primate lineages approximately 25 million years ago (Hancks D C, Kazazian H H Jr, Semin Cancer Biol. 2010 August; 20(4):234-45). A typical SVA element is approximately 2,000 bp and has a composite structure that consists of: 1) a hexameric CCCTCT repeat; 2) an inverted Alu-like element repeat; 3) a set of GC-rich variable nucleotide tandem repeats (VNTRs); 4) a SINE-R sequence that shares homology with HERVK-10, an inactive LTR retrotransposon; and 5) a canonical cleavage polyadenylation specificity factor (CPSF) binding site that is followed by a poly (A) tract. The youngest SVA subfamilies include SVA-D, SVA-E, SVA-F, and SVA-F1 subfamilies.

[0085] Transposition can also be classified as either “autonomous” or “non-autonomous” in both Class I and Class II TEs. Autonomous TEs can move by themselves, whereas non-autonomous TEs require the presence of another TE to move. the TE evolutionary age can be estimated from the degeneration of their characteristic motifs as illustrated in Choudhary, Mayank Nk et al. Genome biology vol. 21, 1 16. 24 Jan. 2020. More particularly, the TE's evolutionary age can be estimated by dividing the percent divergence of extant copies from the consensus sequence by the species neutral substitution rate (i.e.: in humans: 2.2×10⁻⁹). Jukes-Cantor and Kimura distances can be calculated by aligning each TE to its consensus sequence and counting all possible mutations. Single nucleotide substitution counts were normalized by the length of the genomic TE minus the number of insertions (gaps in the consensus). These mutation rates were then used to calculate the Jukes-Cantor and Kimura distances for each genomic TE. For most of the TE subfamilies, the consensus sequences can be retrieved from the RepBase library. Full-length LINE consensus can be reconstructed as detailed in Choudhary et al. 2020.

[0086] Intact open reading frame (ORF) locations can be retrieved from gEVE database. Intact ORFs and individual TEs coordinates are typically matched to assign an intact ORF to individual TEs in case of coordinates overlap. 30517 individual TEs overlapped an intact ORF with most of them being L1 (mostly L1PA/B/x) and ERV (mostly ERV1, ERVK, ERVL) elements. To identify amino acid sequence similarity between canonical TE proteins from gEVE database and peptides from immunopeptidomics results, a blastp can typically be performed between gEVE protein sequences and the immunopeptidomics sequences. No threshold on Evalue is typically set and similarity is typically estimated and classified in 3 categories: (1) 100% match: no mismatch, no gap and query coverage per HSP to 100%; (2) At most 1 mismatch: 1 mismatch, no gap and query coverage per HSP above 85%; (3) At most 2 mismatches: 2 mismatches, no gap and query coverage per HSP above 85%.

[0087] A “representative genome” (also known as reference genome or assembly) is a digital nucleic acid sequence database, assembled by scientists as a representative example of species set of genes. As they are often assembled from the sequencing of DNA from a number of donors, reference genomes do not accurately represent the set of genes of any single individual (animal or person). Instead a reference provides a haploid mosaic of different DNA sequences from each donor.

[0088] An exon is any part of a gene that will encode a part of the final mature RNA produced by that gene after introns have been removed by RNA splicing. The term exon refers to both the DNA sequence within a gene and to the corresponding sequence in RNA transcripts.

[0089] A “messenger RNA (mRNA)” is a single-stranded RNA molecule that corresponds to the genetic sequence of a gene and is read by the ribosome in the process of producing a protein. mRNA is created during the process of transcription, where the enzyme RNA polymerase converts genes into primary transcript mRNA (also known as pre-mRNA). This pre-mRNA usually still contains introns, regions that will not go on to code for the final amino acid sequence. These are removed in the process of RNA splicing, leaving only exons, regions that will encode the protein. This exon sequence constitutes mature mRNA. Mature mRNA is then read by the ribosome, and, utilizing amino acids carried by transfer RNA (tRNA), the ribosome creates the peptide sequence a process called translation.

[0090] A “transcript” as herein intended is a messenger RNA (or mRNA) or a part of a mRNA which is expressed by an organism, notably in a particular tissue or even in a particular tissue. Expression of a transcript varies depending on many factors. In particular, expression of a transcript may be modified in a cancer cell as compared to a normal healthy cell. In the present disclosure a transcript can be provided in the form of its corresponding genomic sequence.

[0091] A “transcriptome” as herein intended is the full range of messenger RNA, or mRNA, molecules expressed by an organism. In some embodiments, the term “transcriptome” or “transcriptomic pattern” can also be used to describe the array of mRNA transcripts produced in a particular cell or tissue type. In contrast with the genome, which is characterized by its stability, the transcriptome actively changes. In fact, an organism's transcriptome varies depending on many factors, including stage of development and environmental conditions. Typically, also, the transcriptome is modified in a cancer cell as compared to a corresponding (i.e.: the same type of cell typically from the same species) normal healthy cell. Typically, the transcriptome as herein intended is the human transcriptome. The terms “transcriptomic pattern” and “transcriptome” are used herein as synonyms when referred to a single cell.

[0092] A reading frame (RF) is a way of dividing the sequence of nucleotides in a nucleic acid (DNA or RNA) molecule into a set of consecutive, non-overlapping triplets.

[0093] An open reading frame (ORF) is the part of a reading frame that can be translated into a peptide. An ORF is a continuous stretch of codons that contain a start codon (for example AUG) after the transcription starting site (TSS) and a stop codon (for example UAA, UAG or UGA). An ATG codon within the ORF (not necessarily the first) may indicate where translation starts. The transcription termination site is located after the ORF, beyond the translation stop codon. In eukaryotic genes with multiple exons, ORFs span intron/exon regions, which may be spliced together after transcription of the ORF to yield the final mRNA for protein translation.

[0094] A “canonical ORF” as herein intended is a protein coding sequence with specified reading frame within a mRNA sequence, which is described or annotated in databases such as for example Ensembl genome/transcriptome/proteome database collection (typically hg19). Typically, a canonical ORF is the annotated (in reference databases) ORF of a given exon in normal healthy cells.

[0095] A “non annotated or non-canonical transcript or mRNA” as herein intended is a protein coding sequence with specified reading frame within a mRNA sequence which is not described (i.e.: unannotated) in genome databases such as for example in Ensembl genome/transcriptome/proteome database. The term “canonical protein” as herein intended refers a protein which is encoded by a canonical or annotated reading frame. In some embodiments, some non-annotated mRNA sequences may represent minor mRNA that are expressed in normal healthy cells to a level below 5%, notably below 2%, below 1%, below 0.5%, below 0.2%, or below 0.1% of the total cell mRNA.

[0096] RNA-Seq (named as an abbreviation of RNA sequencing) is a sequencing technique which uses next-generation sequencing (NGS) to reveal the presence and quantity of RNA (typically messenger RNA, mRNA) in a biological sample and generates an enormous numbers of raw sequencing reads (typically at least in the tens of millions). Single-cell RNA sequencing (scRNA-Seq) provides the expression profiles of an individual cell. A read refers to an RNA sequence from one RNA fragment from a biological sample or a single cell. The RNA sample that was sequenced is called the RNA library. RNA sequencing data are thus typically called RNA reads. There are two main ways of measuring the expression of a transcript, notably in the present case of a TE transcript, in RNA-seq data:

[0097] Counts are simply the number of reads overlapping a given genomic location.

[0098] “TPM” (“transcripts per million”) and FPKM (fragments per kilobase of exon model per million reads mapped) are also common units reported to estimate gene expression based on RNA-seq data. Both units are calculated from the number of reads that mapped to each particular gene sequence and both units are calculated taking into account two important factors in RNA-seq:
[0099] The number of reads from a gene depends on its length. One expects more reads to be produced from longer genes.
[0100] The number of reads from a gene depends on the sequencing depth that is the total number of reads you sequenced. One expects more reads to be produced from the sample that has been sequenced to a greater depth.

[0101] FPKM (introduced by Trapnell, C., Williams, B., Pertea, G. et al. Nat Biotechnol 28, 511-515 (2010).) are calculated with the following formula:

$${FPKM}_{i} = \frac{{q}_{i}}{\frac{{l}_{i}}{{10}^{3}} * \frac{{\sum }_{j} {q}_{j}}{{10}^{6}}} = \frac{{q}_{i}}{{l}_{i} * {\sum }_{j} {q}_{j}} * {10}^{9}$$

where qᵢ are raw counts (number of reads that mapped for each gene), li is gene length and total number mapped reads is the total number of mapped reads. The interpretation of FPKM is that if you sequence your RNA sample again, you expect to see for gene i, FPKMi reads divided by gene i length over a thousand and divided by the total number of reads mapped over a million.

[0102] L1 and Dewey, 2011 (Li, B., Dewey, C. N. RSEM: accurate transcript quantification from RNA-Seq data with or without a reference genome. BMC Bioinformatics 12, 323 (2011)) introduced the unit TPM and Pachter, 2011 (arXiv:1104.3889 [q-bio.GN]“Models for transcript quantification from RNA-Seq”) established the relationship between both units. It is possible to compute TPM from FPKM as follows:

$${TPM}_{t} = ( \frac{{FPFM}_{i}}{{\sum }_{j} {FPFM}_{j}} ) * 1 {0}^{6}$$

[0103] For TPM definition, the following definition can also be consulted: Wagner et al., Theory Biosci. 2012 December; 131(4):281-5.

[0104] For example, in the EMBL expression atlas database (which contains thousands of selected microarray and RNA-sequencing data that are manually curated and annotated with ontology terms Baseline expression results), baseline expression levels are set as follow and represented in different colors (see https://www.ebi.ac.uk/gxa/FAO.html):
[0105] Grey box: expression level is below cutoff (0.5 FPKM or 0.5 TPM)
[0106] Light blue box: expression level is low (between 0.5 to 10 FPKM or 0.5 to 10 TPM)
[0107] Medium blue box: expression level is medium (between 11 to 1000 FPKM or 11 to 1000 TPM)
[0108] Dark blue box: expression level is high (more than 1000 FPKM or more than 1000 TPM)

[0109] If not otherwise specified, the above-mentioned reference expression levels can be used as reference, or thresholds, in the methods and definitions of the present disclosure. In some embodiments however, other threshold values can be used. For example, depending on the mean expression of the transcript in a sample, or a cell, from the disease of interest, typically a cancer cell, the expression threshold or cut-off can be set at 7.5 TPM or 10 TPM.

[0110] The “Fold change” is a measure describing how much a quantity changes between an original and a subsequent measurement. It is defined as the ratio between the two quantities and is typically used for measuring change in the expression level of a gene or in the present case of a TE in a tumor cell as compared to a non-tumor cell. Log-ratios are often used for analysis and visualization of fold changes. The logarithm to base 2 is most commonly used.

[0111] The term “peptide or polypeptide,” is used interchangeably with “neoantigenic peptide or polypeptide” in the present specification to designate a series of residues, typically L-amino acids, connected one to the other, typically by peptide bonds between the α-amino and carboxyl groups of adjacent amino acids. The polypeptides or peptides can be a variety of lengths, either in their neutral (uncharged) forms or in forms which are salts, and either free of modifications such as glycosylation, side chain oxidation, or phosphorylation or containing these modifications, subject to the condition that the modification not destroy the biological activity of the polypeptides as herein described.

[0112] “Tumor neoantigenic peptides” as per the present application are peptides that once presented by specific MHC alleles can be recognized by T cells and may induce T cell reactivity. Typically, neoantigenic peptides-specific T cells possess functional avidity that may reach the avidity strength of anti-viral T cells (see: Lennerz V et al., Cancer immunotherapy based on mutation-specific CD4⁺ T cells in human melanoma. Nat Med 2015; 21:81-5).

[0113] In some embodiments, the neoantigenic peptides are entirely absent (e.g., not detectably expressed) from the normal peptidome (in particular from the human peptidome such as for example represented in the UNIPROT database and/or from a healthy cell). Typically, tumor specific neoantigenic peptides are not detectably expressed in a normal healthy cell, or sample, and are named herein “tumor specific”.

[0114] The expression “specifically expressed” in a tumor cell type with reference a neoantigenic peptide or a TE transcript means according to the present disclosure that said peptide or TE transcript is statistically differentially (Wilcoxon test adjusted p value equal or lower to 0.05, notably equal or lower to 0.01) expressed, more particularly up-regulated, in a tumor cell as compared to a non-tumor cell. In some embodiment a log 2-fold change threshold of 0.25 in TE transcript expression in a tumor cell as compared to a non-tumor cell can also be used. Thus, in some embodiments, the peptide is encoded by a TE transcripts or a fragment thereof that is expressed in a tumor cell with a log 2-fold change of at least 0.25, notably at least 0.5, at least 0.75, at least 1, at least 1.25, at least 1.5, at least 1.75 or at least 2 as compared to a non-tumor cell. In some embodiments, the TE transcript is only expressed in one or more tumor cell(s) while being not significantly detected in normal non tumor cell(s) or sample(s) (such as in normal samples from the Genotype-Tissue Expression (GTEx) database).

[0115] Typically, a subject of the present application is a mammal and notably a human. Thus typically, the representative, or reference genome or transcriptome is the human genome or transcriptome.

[0116] In the present application, “MHC molecule” or “HLA molecule” refers to at least one MHC/HLA class I molecule or at least one MHC/HLA Class II molecule. MHC class I proteins form a functional receptor on most nucleated cells of the body. There are 3 major MHC class I genes in HLA: HLA-A, HLA-B, HLA-C and three minor genes HLA-E, HLA-F and HLA-G. 32-microglobulin binds with major and minor gene subunits to produce a heterodimer. MHC molecules of class I consist of a heavy chain and a light chain and can bind a peptide of about 8 to 11 amino acids, but usually 8 or 9 amino acids, if this peptide has suitable binding motifs, and presenting it to cytotoxic T-lymphocytes. The binding of the peptide is stabilized at its two ends by contacts between atoms in the main chain of the peptide and invariant sites in the peptide-binding groove of all MHC class I molecules. There are invariant sites at both ends of the groove which bind the amino and carboxy termini of the peptide. Variations in peptide length are accommodated by a kinking in the peptide backbone, often at proline or glycine residues that allow the required flexibility. The peptide bound by the MHC molecules of class I usually originates from an endogenous protein antigen. As an example, the heavy chain of the MHC molecules of class I is typically an HLA-A, HLA-B or HLA-C monomer, and the light chain is β-2-microglobulin, in humans. There are 3 major and 2 minor MHC class II proteins encoded by the HLA. The genes of the class II combine to form heterodimeric (αβ) protein receptors that are typically expressed on the surface of antigen-presenting cells. The peptide bound by the MHC molecules of class II usually originates from an extracellular or exogenous protein antigen. As an example, the α-chain and the β-chain are in particular HLA-DR, HLA-DQ and HLA-DP monomers, in humans. MHC class II molecules are capable of binding a peptide of about 8 to 20 amino acids, notably from 10 to 25 amino acids or from 13 to 25 amino acids if this peptide has suitable binding motifs, and of presenting it to T-helper cells. The peptide lies in an extended conformation along the MHC II peptide-binding groove which (unlike the MHC class I peptide-binding groove) is open at both ends. It is held in place mainly by main-chain atom contacts with conserved residues that line the peptide-binding groove.

[0117] The term “peptidome” refers to the complete set of peptides expressed by a particular genome, or present within a particular organism or cell type (such as a cancer cell). Proteomic analysis (proteomics) thus refers to the separation, identification, and quantification of the entire set of peptides or proteins expressed by a genome, a cell, or a tissue at a specific point in time.

[0118] Proteomics analyses are typically based on two major techniques, namely two-dimensional gel electrophoresis (2-DGE) (Harper S et al., In: Coligan J E, Dunn B M, Speicher D W, Wing-field PT, editors. Current Protocols in Protein Science. John Wiley & Sons; Hoboken, N.J.: 1998. pp. 10.4.1-10.4.36.) and Mass Spectrometry (MS) (Aebersold & Mann, 2003), which are both powerful methods for the analysis of complex mixtures of proteins. HPLC is an alternative separation technique for proteomic studies, especially in separation and identification of low-molecular-weight proteins and peptides (Garbis et al., 2005). MS allows the determination of the molecular mass of proteins or peptides based on the mass to charge ratio (m/z) of ions in the gas phase. The terms “gel-based” or “gel-free” proteomics are used in relation to the applied separation techniques, 2-DGE or HPLC; proteomics approaches can also be “bottom-up” or “top-down,” which basically identify proteins from their protease (e.g., trypsin) digests or, as a whole, via a mass spectrometer, respectively.

[0119] Bottom-up proteomics is a common method to identify proteins from a biological sample (tissue(s) or cells) and characterize their amino acid sequences and post-translational modifications by proteolytic digestion of proteins prior to analysis by mass spectrometry. The crude protein extract is enzymatically digested, followed by one or more dimensions of separation of the peptides typically by liquid chromatography coupled to mass spectrometry, a technique known as shotgun proteomics. By comparing the masses of the proteolytic peptides or their tandem mass spectra with those predicted from a sequence database or annotated peptide spectral in a peptide spectral library, peptides can be identified, and multiple peptide identifications assembled into a protein identification.

[0120] In top-down proteomics, intact proteins are purified prior to digestion and/or fragmentation either within the mass spectrometer or by 2D electrophoresis. Top-down proteomics either uses an ion trapping mass spectrometer to store an isolated protein ion for mass measurement and tandem mass spectrometry (MS/MS) analysis or other protein purification methods such as two-dimensional gel electrophoresis in conjunction with MS/MS.

[0121] From the data generated by the MS, the protein is either sequenced de novo by manual mass analyses of the spectra or processed automatically via sequence search engines such as SEQUEST, Mascot, Phenyx, X!Tandem, and OMSSA. These algorithms are developed based on the correlation between experimental and theoretical MS/MS data; the latter being generated from in silico digestion of protein databases such as UniProt/Swiss-Prot (Deutsch, Lam, & Aebersold, 2008).

[0122] The term “immunopeptidome”, also commonly named “immunopeptidomic pattern”, “pMHC repertoire”, or “MHC-ligandome” or “HLA ligandome”, refers to the complete set of peptides within a particular cell type, which are bound to at least one MHC/HLA molecule at the cell surface. Correspondingly, “immunopeptidomics” has emerged as a term to describe analysis of the MHC/HLA-ligandome. The most common immunopeptidomics methods rely on mass spectrometry (MS). Immunopeptidomics samples are generally prepared by isolating MHCs, for example by using an allele-specific antibody, pan-specific antibody, or engineered affinity tag system, from lysed cells or tissues. Isolated complexes are acid eluted, and peptides are purified from the MHC molecules using molecular weight cut-off filtration (MWCO), solid phase extraction or other techniques, and are subsequently analyzed by MS (see for example for review L. E. Stopfer et al., Immuno-Oncology and Technology, Volume 11, 2021, 100042).

[0123] Unless specifically stated or obvious from context, as used herein, the term “about” is to be understood as within a range of normal tolerance in the art, for example within 2 standard deviations of the mean. About can be understood as within 20%, 15%, 10%, 9%, 8%, 7%, 6%, 5%, 4%, 3%, 2%, 1%, 0.5%, 0.1%, 0.05%, or 0.01% of the stated value. Unless otherwise clear from context, all numerical values provided herein are modified by the term about.

### Method for Identifying a Tumor Cell TE-Signature

[0124] The method for identifying a tumor cell TE-signature of the present disclosure encompasses the following steps:
[0125] i. obtaining the single cell transcriptomic TE pattern of at least one tumor cell and the single cell TE transcriptomic pattern of at least one non-tumor cell, and
[0126] ii. performing differential expression analysis of the TE transcriptomic pattern from said at least one tumor cell with respect to said at least one normal cell, and
[0127] iii. selecting the TE transcript sequences which are differentially expressed in said at least one tumor cell as compared to said at least one normal cell thereby obtaining a tumor cell TE signature.

[0128] Typically, the one or more tumor cells (also named herein neoplastic cells) are from the same patient, and/or are obtained from the same tumor location and/or the same type of tumor, and/or from the sample tumor sample.

[0129] By the same type of cancer or tumor it is herein intended tumors or cancers affecting the same organs (skin, breast, lung, brain, urinary bladder, kidney, stomach, intestine, spleen, pancreas, prostate, uterine, thyroid, ovaries, endocrine glands, uterus, testes, tongue, esophagus, liver, gall, rectum, skin, etc), or the same tissue (such as carcinomas, sarcomas, myeloma, leukemias, lymphomas, etc.).

[0130] Similarly, the one or more non-tumor (e.g. “normal” or “healthy”) cells are typically obtained from the said same patient, and/or from juxta-tumor sample(s) from the same or different patient(s). The non-tumor cell can be typically tumor-infiltrating cells or cells from the juxta tumor environment. According to the present disclosure, the non-tumor cells can be from one or more types including tumor infiltrating immune cells (such as macrophages) and non-immune cells from the juxta tumor environment. For example, when the tumor is a glioblastoma, non-tumor cells from the tumor microenvironment (i.e., from juxta tumor samples) include immune cells (typically macrophages), oligodendrocytes and their precursors (OPCs), neurons, astrocytes and vascular type cells.

[0131] The transcriptomic pattern of these cells can be obtained by performing high-depth single-cell RNA sequencing (RNA-seq) (see notably Darmanis, Spyros et al. Cell reports vol. 21, 5 (2017): 1399-1410 for an example detailed proceeding). Briefly, single-cell suspensions can be analyzed (reverse transcription followed by PCR amplification) using the Smart-seq2 protocol (also detailed in Picelli S, Faridani O R, Björklund A K, Winberg G, Sagasser S, Sandberg R., Nat Protoc. 2014 January; 9(1):171-81).

[0132] In some embodiments, short reads which size is typically less than 400 base pairs (bp), notably less than 200 bp or even less than 100 bp, while being preferably at least 50 bp, notably at least 75 bp, or at least 100 bp can be used. In some other embodiments, long reads or more than 10-15 kbp can also be used. Typically, cells can be sequenced using for example 75-bp-long paired-end reads on a NextSeq instrument (Illumina) and High-Output v2 kits (Illumina).

[0133] Alternatively, public single cell (sc) RNAseq data (e.g., from the Sequence Read Archive (SRA) bioinformatic database, which is the largest publicly available repository of high throughput sequencing data) can also be used, notably when data from tumor cells and non-tumor cells from the said tumor microenvironment, and/or from cells infiltrating the said tumor are available.
[0134] Step ii) typically includes the alignment of the reads to the reference genome and the assembly of the alignments into full-length transcripts, the quantification of the expression levels of each gene and transcript, the normalization of the mapped data and the calculation of the differences in expression for all TE in tumor cells vs. non tumor cells).

[0135] Raw RNA reads can be aligned (i.e.: mapped) to the human genome (such as the human genome assembly hg19, or hg38) as detailed in the results enclosed (but see also Darmanis S et al., PNAS 2015 Jun. 9; 112(23):7285-90) using typically a software aligner such as the Spliced Transcripts Alignment to a Reference (STAR) software (Dobin, Alexander et al. Bioinformatics (Oxford, England) vol. 29, 1 (2013): 15-21).

[0136] scRNAseq reads can be mapped to transposable elements (TE) subfamilies (as done for example in Kong et al., Nat Commun 2019, 10, 5228) and/or to individual genomic TE locus or occurrence. Typically, according to the present disclosure, scRNAseq reads are mapped to individual genomic TE occurrences. Furthermore, to obtain accurate estimate expression of both the older TE subfamilies and the youngest TE subfamilies (which mapping to individual genomic location can be more especially affected by the high conservation of their repeat motifs) both multi-mapping TE reads (i.e., TE sequencing reads that map at more than one position in the genome) and uniquely mapping TE reads (that map/align at only one position in the genome) are typically considered (see notably Lanciano, S., and Cristofari, G. (2020). Measuring and interpreting transposable element expression. Nat Rev Genet 21, 721-736.).

[0137] For TE mapping, a file of annotated TE positions can be added. Thus, Transposable Elements annotations can be typically retrieved from various databases and merged if needed (as done for example in example enclosed) to obtain typically information on TE such as the Class, Family, Subfamily, Divergence, and/or coordinates. A detailed example proceeding is also described in the Example section of the present disclosure. Typically, Raw RNA reads (75 bp paired-end unstranded reads) can be mapped to the human genome sequences (hg19) using the 2—pass mode of STAR (such as the version 2.7.1.a) using the following parameters: —quantMode GeneCounts, —twopassMode Basic, —alignSJDBoverhangMin 1, —bamRemoveDuplicatesType UniqueIdentical, —winAnchorMultimapNmax 1000, —outFilterMultimapNmax 1000, —outFilterScoreMinOverLread 0.33, —outFilterMatchNminOverLread 0.33, —outFilterMismatchNoverLmax 0.04, —outMultimapperOrder Random, —sjdbOverhang 76).

[0138] In particular embodiments, TEs that are entirely included within exons are deleted from the single cell transcriptomic TE pattern. This means that the single cell transcriptomic TE pattern obtained in (step (i)) does not comprise TEs that are entirely included within exons.

[0139] Gene and TE expression can be quantified according to classical means in the field, as also exemplified in the Materials and Methods included herein. For example, to perform quantification of TE and gene expression, featureCounts from Subread (v1.6.4) can be computed on each genome-mapped reads files (well-suited methods are notably described in Teissandier, A., Servant, N., Barillot, E., and Bourc'his, D. (2019). Tools and best practices for retrotransposon analysis using high-throughput sequencing data. Mob DNA 10, 52). As a matter of example the following parameters can be used in featureCounts depending on the analysis: (1) for gene expression: —p—ignoreDup—g gene_id using gencode gtf annotation file; (2) for TEs expression on individual copies (a) with only uniquely mapping reads: —p—ignoreDup—g transcript_id using TEtranscript hg19 gtf annotation file; (b) with uniquely and multi-mapping reads: —p—ignoreDup—g transcript_id —M—primary (3) for TEs expression on subfamilies with uniquely and multi-mapping reads: —p—ignoreDup—g gene_id—M—primary. Cell count files can then be merged into a matrix using a routine python script (Python 3.6).

[0140] Exploratory analysis, visualization, and statistical modeling are also typical steps after assembling and quantifying transcripts. The R programming language and the Bioconductor software suite can typically be used according to the present disclosure and provides a set of tools ranging from plotting raw data, to normalization, to downstream statistical modeling. Indeed, the scater package is an open-source R/Bioconductor software package that implements a convenient data structure for representing scRNA-seq data and contains functions for pre-processing, quality control, normalization and visualization. It offers a workflow to convert raw read sequences into a dataset ready for higher-level analysis within the R programming environment. Scaling normalization is typically required in RNA-seq data analysis to remove biases caused by differences in sequencing depth, capture efficiency or composition effects between samples. Frequently used methods for scaling normalization include the trimmed mean of M-values (Robinson M. D. et al., Genome Biol., 2010, 11, R25.), relative log-expression (Anders S. et al., Genome Biol., 2010, 11, R106) and upper-quartile methods (Bullard J. H. et al., BMC Bioinformatics, 2010, 247, 1-62.). The scran package of scater, which implements a method utilizing cell pooling and deconvolution to compute size factors is also well suited to scRNA-seq data according to the present disclosure (Lun A. T. L. et al., Genome Biol., 2016b 17, 75). For more details, see also Davis J McCarthy, Kieran R Campbell, Aaron T L Lun, Quin F Wills, Scater: pre-processing, quality control, normalization and visualization of single-cell RNA-seq data in R, Bioinformatics, Volume 33, Issue 8, 15 Apr. 2017, Pages 1179-1186.

[0141] Optionally, considering the uniquely mapped reads TE matrix, individual TEs with less than 1 count/cell in average can be removed, while for multi-mapped reads, individual TEs with less than 5 counts in at least 20 cells can be removed to take into account expression in small populations. Low quality cells are also typically removed from the analysis. For example, low quality cells may be considered as such if they have library sizes below 100,000 reads; and/or express fewer than 5,000 genes; and/or have spike-in proportions above 10%; and/or have mitochondrial proportions above 10%.

[0142] Typically, to visualize the transcriptomic landscape across the various sequenced single cells, dimensional reduction can be used to generate a two-dimensional (2D) map. Briefly, genes with the highest over-dispersion are selected and used to construct a cell-to-cell dissimilarity matrix. Then a t-distributed stochastic neighbour embedding (tSNE) can be performed on the resulting distance matrix to create a 2D map of the cells. k-means clustering on the 2D tSNE map can further be used.

[0143] An example workflow showing the strategy of alignment based on individual TE occurrence as opposed to family level and TE quantification using uniquely or multiple mapped reads is notably illustrated in the FIG. 1A.
[0144] At step iii), the TE transcript sequences which are differentially expressed (i.e.: which expression is upregulated) in at least one tumor cell as compared to said at least one non-tumor cell are selected and a tumor cell TE signature is obtained. According to the present disclosure, TE transcripts which are statistically differentially expressed, typically with an adjusted p value equal or lower to 0.05, notably equal or lower to 0.01, in a tumor cell as compared to a non-tumor cell are selected. Alternatively, or in addition, in some embodiments, TE transcripts that are expressed with an average log 2-fold of 0.25 change in a tumor cell as compared to a non-tumor cell can be selected. In some embodiments, the peptide is encoded by a TE transcripts or a fragment thereof that is expressed in a tumor cell with a log 2-fold change of at least 0.25, notably at least 0.5, at least 0.75, at least 1, at least 1.25, at least 1.5, at least 1.75 or at least 2 as compared to a non-tumor cell. In some embodiment, the TE signature as per the present disclosure encompasses the at least 30, notably the at least 25, the at least 20, the at least 15, the at least 10, the at least 5 most differentially expressed TE for the tumor cell as compared to the at least one other non-neoplastic cell(s).

[0145] According to the present disclosure, the tumor cell Transposable Element (TE) signature corresponds to the TE transcripts which are specifically expressed by the tumor cell, in particular in some embodiments, the TE transcripts selected in the tumor cell signature are not found in the single cell transcriptomic pattern of TE transcripts obtained from the at least one non-tumor cell.

[0146] Typically, the differential analysis is performed in one or more tumor cells, from one or more tumor samples, from one or more patients against one or more non-tumor cells from one or more samples, from one or more subject. As previously mentioned, the tumor cells can be from the same or not tumor or tumor type. The non tumor cell can be or not from the same tissue sample, including immune cells, such as for example tumor infiltrating immune cells (such as macrophages) and non-tumor cells from the tumor microenvironment (e.g., from juxta tumor samples). In some embodiments, the differential analysis is performed between cells from the same patient and notably from the same sample or from samples collected from the same type of tumor (from one or more patient) and samples of the close environment of said tumor (i.e., juxta tumor samples) from one or more subject. In some embodiments, the one or more tumor cells can be obtained from tumor samples from the same patient at various time. T The method as herein disclosed allows to obtain a set of TE transcripts which are differentially expressed in a tumor cell, also named herein tumor cell “TE-signature” or tumor cell “transcriptomic TE pattern”, as compared to a non-tumor cell.

[0147] Differential analysis can be performed for example as detailed in the Materials and Methods paragraph of the Example Section.

### Method for Identifying or Screening TE-Derived Tumor Neoantigenic Peptides

[0148] The method comprises the obtention of single tumor cell TE-signature (or transcriptomic TE pattern) followed by in silico translation of the TE transcript sequences from the said tumor cell TE signature to obtain TE-derived tumor peptides.

[0149] The methods comprise a step of identifying the open reading frame (ORF) sequences from the transcripts of the TE-signature. In some embodiments, the transcripts are then in silico translated in six frame translations (both forward and reverse direction), and the resulting amino-acid sequences are then fragmented at all stop codons to obtain TE-encoded tumor peptide sequences than can be grouped to form a TE-derived tumor peptide library.

[0150] In some embodiments, the method further comprises a step allowing to identify the TE derived peptides that bind a least one MHC molecule. According to such embodiments, a library comprising the TE-encoded tumor peptide sequences (tumor TE library), obtained as above described from the TE tumor signature is typically compared to the MHC/HLA-ligandome obtained from more tumor cell(s) (including tumor cells from the same and/or different tumor types, such as for example glioblastoma cells) from one or more sample(s). Peptides from the MHC/HLA-ligandome that match with the tumor TE library are typically selected. This step allows the non-ambiguous identification of TE-encoded tumor neoantigenic peptides that are presented by HLA/MHC molecules.

[0151] Typically, the tumor TE library as above described is combined with the human protein sequences (i.e.: the human annotated proteome—e.g., Uniprot/SwissProt).

[0152] The identification of the TE derived peptides that bind a least one MHC/HLA molecule according to the present disclosure is typically achieved through a proteogenomic approach, wherein mass spectrometry (MS)-based proteomics (and notably immunoproteomics) data are matched against the peptide's library obtained from the tumor TE library as defined above more particularly, open reading frames derived from de novo assembled transcripts (e.g.: the tumor TE library previously defined) are searched against immunopeptidomics MS/MS spectra (obtained from a tissue samples or cells including cell lines such as tumor samples and tumor cells, in particular tumor samples or cell lines).

[0153] The MHC-ligandome is thus typically in the form of raw mass spectrometry (MS) data (i.e.: spectra) obtained in MS-based proteomics (notably immunoproteomics) techniques such as bottom-up proteomics (shot-gun proteomics) and top-down proteomics from one or more tissue sample or cells (e.g.: tumor samples and tumor cells).

[0154] The immunopeptidomics approach is typically based on immunoaffinity purification (IP) of HLA/MHC complexes typically from mild detergent solubilized lysates, followed by extraction of the HLA/MHC peptides (HLA/MHCp). The extracted peptides are then separated by chromatography and directly injected into a mass spectrometer. The tumor MHC/HLA-ligandome is typically obtained by first purifying surface MHC-bound (i.e., HLA-I or HLA-2 molecules) peptides followed by their amino acid sequence characterisation. Typically, the MHC/HLA ligandome is obtained from tumor cells (such as glioblastoma cells) from one or more tumor samples (e.g., biopsy or tissue) or tumor cell lines. For example, MHC/HLA-bound molecules can be purified by immunoprecipitation from the cell lysate, using an antibody specific to the desired MHC/HLA species (e.g., using MHC/HLA-IP). MHC/HLA-associated peptides can be separated from the larger MHC/HLA components and the peptide fraction can be further analysed by LC tandem mass spectrometry (LC-MS/MS).

[0155] The peptide sequences can be identified by spectral interpretation. The large-scale data acquired from high-resolution mass spectrometers are typically interpreted using algorithms that enable assignment of mass spectra to amino acid sequences There is a variety of software available to the skilled person for interpretation of MS fragment spectra (see for example Purcell, A. W., Ramarathinam, S. H. & Ternette, N. Mass spectrometry-based identification of MHC-bound peptides for immunopeptidomics. Nat Protoc 14, 1687-1707 (2019) or Prianichnikov, Nikita et al. “MaxQuant Software for Ion Mobility Enhanced Shotgun Proteomics.” Molecular & cellular proteomics: MCP vol. 19, 6 (2020): 1058-1069). MS-based immunopeptidomic analysis are also well detailed in Forlani, Greta et al. MCP, vol. 20 100032. 6 Jan. 2021; as well as Chong, Chloe et al. “High-throughput and Sensitive Immunopeptidomics Platform Reveals Profound Interferony-Mediated Remodeling of the Human Leukocyte Antigen (HLA) Ligandome.” Molecular & cellular proteomics: MCP vol. 17, 3 (2018): 533-548, which refers to the use of MaxQuant computational proteomics platform to search the peak lists against the UniProt databases—see Cox, Jiirgen, and Matthias Mann. Nature biotechnology vol. 26, 12 (2008): 1367-72.). Additional references which describe well-suited protocols for obtention of MS raw data usable according to the present disclosure are also provided in the results of the present application. According to the method of the present disclosure public MS data can be used as illustrated for example in the results included herein.

[0156] In some embodiments, the selected TE-encoded tumor neoantigenic MHC-bound peptides are further filtered against canonical proteins, typically canonical proteins from the human proteome (e.g.: typically obtained from Swiss-Prot and TrEMBL databases). UniProtKB/TrEMBL is a computer-annotated protein sequence database complementing the UniProtKB/Swiss-Prot Protein Knowledgebase. UniProtKB/TrEMBL contains the translations of all coding sequences (CDS) present in the EMBL/GenBank/DDBJ Nucleotide Sequence Databases and also protein sequences extracted from the literature or submitted to UniProtKB/Swiss-Prot. The database is enriched with automated classification and annotation.

[0157] In some embodiments, non-redundant peptides (i.e., which are encoded by a single genomic TE) are further selected. Such selection can be achieved as done for example in the results included herein by mapping the identified TE-encoded tumor neoantigenic MHC-bound peptides to the corresponding TEs in the TE signature.

[0158] In other embodiments redundant peptides are further selected. Redundant peptides with low genomic TE occurrence (encoded by e.g.: less than 100, notably less than 50, notably less than 10 genomic TE occurrences) that are encoded by a TE, which expression is highly upregulated in a tumor cell (log 2 fold change of at least 0.25, notably at least 0.5, at least 1, at least 1.5) and/or that is not expressed in a normal cell or sample (for example using the GTEx database) are of particular relevance.

[0159] Determination of the binding of putative neoantigen peptides obtained from the tumor cell TE-signature (and notably of the MHC/HLA bound peptides identified in the method described above) to at least one MHC molecule can also be performed in silico.

[0160] When carried out on human samples, the method may comprise a step of determining the patient's class I or class I Major Histocompatibility Complex (MHC, aka human leukocyte antigen (HLA) alleles).

[0161] An MHC allele database is carried out by analyzing known sequences of MHC I and MHC II and determining allelic variability for each domain. This can be typically determined in silico using appropriate software algorithms well-known in the field. Several tools have been developed to obtain HLA allele information from genome-wide sequencing data (whole-exome, whole-genome, and RNA sequencing data), including OptiType, Polysolver, PHLAT, HLAreporter, HLAforest, HLAminer, and seq2HLA (see Kiyotani K et al., Immunopharmacogenomics towards personalized cancer immunotherapy targeting neoantigens; Cancer Science 2018; 109:542-549). For example, the seq2hla tool (see Boegel S, Lower M, Schafer M, et al. HLA typing from RNA-Seq sequence reads. Genome Med. 2012; 4:102), which is well designed to perform the method as herein disclosed is an in silico method written in python and R, which takes standard RNA-Seq sequence reads in fastq format as input, uses a bowtie index (Langmead B, et al., Ultrafast and memory-efficient alignment of short DNA sequences to the human genome. Genome Biol. 2009, 10: R25-10. 1186/gb-2009-10⁻³-r25) comprising all HLA alleles and outputs the most likely HLA class I and class II genotypes (in 4 digits resolution), a p-value for each call, and the expression of each class.

[0162] The affinity of all possible peptides encoded by each transcript sequence for each MHC allele from the subject can be determined in silico using computational methods to predict peptide binding-affinity to HLA molecules. Indeed, accurate prediction approaches are based on artificial neural networks with predicted IC₅₀. For example, NetMHCpan software which has been modified from NetMHC to predict peptides binding to alleles for which no ligands have been reported, is well appropriate to implement the method as herein disclosed (Lundegaard C et al., NetMHC-3.0: accurate web accessible predictions of human, mouse and monkey MHC class I affinities for peptides of length 8-11; Nucleic Acids Res. 2008; 36:W509-W512; Nielsen M et al. NetMHCpan, a method for quantitative predictions of peptide binding to any HLA-A and -B locus protein of known sequence. PLoS One. 2007; 2:e796, but see also Kiyotani K et al., Immunopharmacogenomics towards personalized cancer immunotherapy targeting neoantigens; Cancer Science 2018; 109:542-549 and Yarchoan M et al., Nat rev. cancer 2017; 17(4):209-222, see also Reynisson B., Barra C., Kaabinejadian S., Hildebrand W. H., Peters B., Nielsen M. J. Proteome Res. 2020; 19:2304-2315 and Jurtz V, Paul S, Andreatta M, Marcatili P, Peters B, Nielsen M J Immunol. 2017 Nov. 1; 199(9):3360-3368 that discloses NetMHCpan-4.0 version.). NetMHCpan software predicts binding of peptides to any MHC molecule of known sequence using artificial neural networks (ANNs). The method is trained on a combination of more than 180,000 quantitative binding data and MS derived MHC eluted ligands. The binding affinity data covers 172 MHC molecules from human (HLA-A, B, C, E), mouse (H-2), cattle (BoLA), primates (Patr, Mamu, Gogo) and swine (SLA). The MS eluted ligand data covers 55 HLA and mouse alleles. NetMHCpan-4.0 version also pr Improved Peptide-MHC Class I Interaction Predictions Integrating Eluted Ligand and Peptide Binding Affinity Data.

[0163] In example embodiments, TE-encoded peptide from the tumor cell TE-signature as herein disclosed and having a Kd affinity of predicted peptides for MHC alleles with a score less than 10⁻⁴. 10⁻⁵, 10⁻⁶, 10⁻⁷, or less than 500 nM or a rank less than 2% (typically depending on netMHCpan version), are selected as tumor neoantigenic peptides.

[0164] MixMHCpred (v.2.0.2) (see Bassani-Sternberg M., et al., PLoS Comput. Biol. 2017; 13) and MixMHC2pred (v.1.0) (see Racle J., et al., Nat. Biotechnol. 2019; 37:1283-1286) can also be used to predict binding of peptides on patients HLA/MHC class I alleles and patients HLA/MHC class II alleles respectively as illustrated in Forlani, Greta et al. (MCP vol. 20, 2021: 100032).

[0165] In some embodiments, peptides binding to MHC Class 1 molecules can thus be predicted using for example the NetMHCpan 4.1 suite (http://www.cbs.dtu.dk/services/NetMHCpan/), using “HLA allele”=A2, “peptide length”=8-11 and “rank threshold for strong binding”=0.5% for which an example protocol is detailed in the results included in the Examples' Section.

[0166] Typically, TE-encoded peptides from the tumor cell TE signature having a predicted K_{d} affinity for MHC alleles with a score less than 50 nM or a rank less than 0.5% (typically depending on the netMHCpan version) are selected as tumor neoantigenic peptides. Thus, in some embodiments, a TE-encoded neoantigenic peptide as per the present disclosure, which typically identified as per the method, binds at least one HLA/MHC molecule with an affinity sufficient for the peptide to be presented on the surface of a cell as an antigen. Generally, the neoantigenic peptide has an IC₅₀ affinity of less than 10⁻⁴. or 10⁻⁵, or 10⁻⁶, or 10⁻⁷ or less than 500 nM, at least less than 250 nM, at least less than 200 nM, at least less than 150 nM, at least less than 100 nM, at least less than 50 nM or less for at least one HLA/MHC molecule (lower numbers indicating greater binding affinity), typically a molecule of said subject suffering from a cancer, or a tumor.

### Neoantigenic Peptides, Polynucleotides and Vectors

[0167] The present disclosure also encompasses an isolated tumor neoantigenic peptide having at least the following characteristics:
[0168] i. it has at least 8 amino acids and comprise a TE encoded sequence.
[0169] ii. it binds at least one MHC class I or II molecule of a subject with a K_{D} binding affinity of less than 10⁻⁵ M and/or it is presented by an MHC molecule of a subject.

[0170] MHC binding of a peptide as herein disclosed can be assessed in silico as previously described. Kd affinity for at least one MHC/HLA molecule can also be determined or predicted in vitro by using tetramer preparation as illustrated in the examples. Briefly, HLA 02:01/peptide multimers can be prepared using adapted commercial kits (for example EasYmers® kits from ImmunAware® which can be used according to their training guide) and incubated with human CD8⁺ prepared from healthy donors. Tetramer-CD8⁺ cell binding can be assessed by flow cytometry. Typically, binding affinity can be determined as a percentage of binding to a positive control. Generally, peptides showing a percentage of binding of at least 30%, notably at least 40% or even at least 50% of the positive control are selected. Typically, the neoantigenic peptide as per the present disclosure, and typically obtainable as per the present method, binds at least one HLA/MHC molecule with an affinity sufficient for the peptide to be presented on the surface of a cell as an antigen. In some embodiments, the neoantigenic peptide has an IC₅₀ of less than 10⁻⁴. or 10⁻⁵, or 10⁻⁶, or 10⁻⁷ or less than 500 nM, at least less than 250 nM, at least less than 200 nM, at least less than 150 nM, at least less than 100 nM, at least less than 50 nM or less (lower numbers indicating greater binding affinity). For example, the neoantigenic peptide has an IC₅₀ comprises between 0.1 nM and 500 nM, notably between 0.1 nM and 200 nM, notably between 1 and 200 nM. In some embodiments, a neoantigenic peptide of the present disclosure binds an MHC class I or class II molecule with a binding affinity Kd of less than about 10⁻⁴, 10⁻⁵, 10⁻⁶, 10⁻⁷, 10⁻⁸ or 10⁻⁹ M (lower numbers indicating higher binding affinity), notably comprised between 10⁻⁴ and 10⁻⁹ M, in particular between 10⁻⁴ and 10⁻⁸ M, notably comprise between 10⁻⁴ and 10⁻⁷ M.

[0171] In some embodiments, a neoantigenic peptide of the present disclosure binds an MHC class I molecule with a binding affinity of less than 2% percentile rank score predicted for example by NetMHCpan 4.0. In some embodiments, a neoantigenic peptide of the present disclosure binds an MHC class II with a binding affinity of less than 10% percentile rank score predicted for example by NetMHCpanII 3.2.

[0172] Presentation of a neoantigenic peptide according to the present disclosure, by an MHC/HLA molecule can also be assessed by interrogating the tumor immunopeptidome with the said neoantigenic peptide sequence as previously detailed.

[0173] The tumor neoantigenic peptide of the present disclosure further exhibits one or more of the following properties:
[0174] iii. The TE expression is derepressed in a tumor cell as compared to a non-tumor cell.

[0175] By derepressed in a tumor cell, it is herein intended that the expression of TE transcript sequence is statistically significantly up regulated (as previously defined) in a tumor cell as compared to a normal healthy cell. In some embodiments, the TE expression is derepressed in a tumor cell from a given type of cancer. In some embodiments, the TE transcript is expressed with an average log 2-fold of at least 0.25 change in a tumor cell, notably at least 0.5, at least 0.75, at least 1, at least 1.25, at least 1.5, at least 1.75 or at least 2 as compared to one or more non-tumor cell(s). For example, in some embodiments, the TE is derepressed in glioblastoma. Validation of TE specific tumor cell expression can be assessed as exemplified in the Example Section by performing RNAseq analysis. For example, the TE transcript sequence according to the present disclosure is overexpressed in scRNAseq from one or more tumor cell(s) as compared to scRNAseq from non-tumor cell(s) (for example including tumor infiltrating cells, notably immune cells such as macrophages) and/or in TCGA juxta-tumor bulk RNAseq samples (typically from the same tumor as the tumor cell used for the tumor single cell analysis). In some embodiments of the present disclosure the TE transcript sequence is not expressed non-tumor cell(s) (including tumor infiltrating cells), in samples from normal tissues and/or in juxta-tumor samples (obtained for example from the TCGA database).
[0176] iv. The TE is selected from TE over 50.106 years;
[0177] v. the TE is selected from the LINE-1, SVA and ERVK TE subfamilies; more particularly the TE is selected from L1PA/B/x TEs;
[0178] vi. The TE is selected from TEs bearing an intact or nearly intact ORF (no more than 2, notably no more than 1 mismatch between canonical TE protein from typically the gEVE database and the peptides sequences retrieved from immunopeptidomic profiles);
[0179] vii. The TE is selected from unique peptide-encoding TEs;
[0180] viii. The TE is selected from intronic or intergenic TEs (typically distal TEs located at more than 2 kb from the nearest gene).
[0181] ix. The TE is encoded by chromosome 7.

[0182] Typically, a neoantigenic peptide of the present disclosure is obtained according to the method as previously detailed.

[0183] In some embodiments, the tumor cell TE-signature is a glioblastoma cell TE-signature and the peptide sequences is obtained from a glioblastoma cell TE signature comprising the transcript sequences of SEQ ID NO:381 to 5020.

[0184] In some embodiments, the tumor cell TE-signature, in particular a glioblastoma cell TE-signature, excludes TEs that are entirely included with exons. In some more particularly embodiments, the neoantigenic peptide sequences is obtained from a glioblastoma cell TE signature comprising the transcript sequences of SEQ ID NO: 381 to 430 and 432 to 5020; preferably the neoantigenic peptide sequences is obtained from a glioblastoma cell TE signature comprising the transcript sequences of SEQ ID NO: 381 to 393; 395 to 430 and 432 to 5020

[0185] In some embodiments, the neoantigenic peptide is encoded by an ORF sequence or a fragment thereof, from a transcript of any one of SEQ ID NO:381 to 5020. In some particular embodiments, the neoantigenic peptide is encoded by an ORF sequence or a fragment thereof, from a transcript of any one of SEQ ID NO: 381 to 430 and 432 to 5020; more particularly the neoantigenic peptide is encoded by an ORF sequence or a fragment thereof, from a transcript of any one of SEQ ID NO: 381 to 393; 395 to 430 and 432 to 5020. Typically said transcripts are translated in six frame translations (both forward and reverse direction), and the resulting amino-acid sequences are then fragmented at all stop codons to obtain TE-encoded (tumor specific neoantigenic) peptide sequences.

[0186] In some embodiments, the neoantigenic peptide comprises a sequence or a fragment thereof of any one of SEQ ID NO: 1 to 380, notably of any one of SEQ ID NO:1, 2, 9, 11, 13, 18, 22, 23, 27, 30 to 32, 35, 36, 38 to 40, 42, 45, 48 to 50, 54, 57, 58, 60, 61, 63-66, 68, 70 to 73, 76, 78, 79, 82, 83, 88, 89, 91, 93 to 95, 98, 104 to 107, 110, 111, 114, 115, 117 to 124, 126, 127, 131, 133, 138, 139, 1141, 143, 144, 150 to 153, 157, 159, 161, 162, 164, 165, 167, 172, 173, 177, 179 to 182, 188, 190, 193, 198, 199, 206, 208, 212, 214, 215, 217, 218, 222, 223, 228, 238, 239, 243 to 246, 248, 251, 253, 256, 257, 259, 260, 262, 265,267, 275, 277, 279, 281 to 283, 285 to 288, 290 to 292, 294 to 302, 304, 305, 307, 311 to 315, 317, 318, 320, 323, 325, 326, 328, 329, 331, 333 to 335, 337, 343, 344, 346, 350, 352 to 356, 359 to 362, 365, 367, 369 or 370 (non-redundant; see Table 3).

[0187] In some particular embodiments, the neoantigenic peptide comprises a sequence or a fragment thereof of any one of SEQ ID NO: 1 to 26 and 28 to 380; preferably the neoantigenic peptide comprises a sequence or a fragment thereof of any one of SEQ ID NO: 1 to 10; 12 to 26; 28 to 57; 59 to 242; 244 to 255; 257 to 319 and 321 to 380, notably of any one of SEQ ID NO:1, 2, 9, 11, 13, 18, 22, 23, 30 to 32, 35, 36, 38 to 40, 42, 45, 48 to 50, 54, 57, 60, 61, 63-66, 68, 70 to 73, 76, 78, 79, 82, 83, 88, 89, 91, 93 to 95, 98, 104 to 107, 110, 111, 114, 115, 117 to 124, 126, 127, 131, 133, 138, 139, 1141, 143, 144, 150 to 153, 157, 159, 161, 162, 164, 165, 167, 172, 173, 177, 179 to 182, 188, 190, 193, 198, 199, 206, 208, 212, 214, 215, 217, 218, 222, 223, 228, 238, 239, 244 to 246, 248, 251, 253, 257, 259, 260, 262, 265,267, 275, 277, 279, 281 to 283, 285 to 288, 290 to 292, 294 to 302, 304, 305, 307, 311 to 315, 317, 318, 323, 325, 326, 328, 329, 331, 333 to 335, 337, 343, 344, 346, 350, 352 to 356, 359 to 362, 365, 367, 369 or 370 (non-redundant; see Table 3).

[0188] In some embodiments the isolated tumor specific neoantigenic peptide comprises at least 8 amino acids, in particular 8 or 9 amino acids and binds at least one MHC class I molecule of a subject as previously defined or comprises from 13 to 25 amino acids and binds at least one MHC class II molecule of a subject as previously defined.

[0189] In some embodiments, a tumor neoantigenic peptide as per the present disclosure binds to an MHC molecule present in at least 1%, 5%, 10%, 15%, 20%, 25% or more of subjects. Notably, a tumor neoantigenic peptide as herein disclosed is expressed in at least 1%, 5%, 10%, 15%, 20%, 25% of subjects from a population of subjects suffering from a given type or tumor, for example in a population of subjects suffering from a glioblastoma.

[0190] More particularly, a tumor neoantigenic peptide of the present disclosure can elicit an immune response against a tumor present in at least 5%, 6%, 7%, 8%, 9%, 10%, 15%, 20%, 25%, 30%, 40%, 50%, 60%, 70%, 80%, 90%, 95%, or even 99% of a population of subjects suffering from a cancer, or a tumor, and more specifically from a population of subjects suffering from given type of tumor, such as glioblastoma.

[0191] In some embodiments, the isolated tumor neoantigenic peptide comprises at least 8, 9, 10, 11, or 12 amino acids, encoded by a portion of an open reading frame (ORF) from the TE transcripts of SEQ ID NO: 381 to 5020, or comprises a sequence of a fragment thereof of any one of SEQ ID NO:1 to 380. In some particular embodiments, the isolated tumor neoantigenic peptide comprises at least 8, 9, 10, 11, or 12 amino acids, encoded by a portion of an open reading frame (ORF) from the TE transcripts of SEQ ID NO: 381 to 430 and 432 to 5020, preferably SEQ ID NO: 381 to 393; 395 to 430 and 432 to 5020; or comprises a sequence of a fragment thereof of any one of SEQ ID NO: I to 26 and 28 to 380, preferably SEQ ID NO: 1 to 10; 12 to 26; 28 to 57; 59 to 242; 244 to 255; 257 to 319 and 321 to 380. The peptide may notably be 8-9, 8-10, 8-11, 12-25, 13-25, 12-20, or 13-20 amino acids in length. The N-terminus of the peptides of at least 8 amino acids may thus typically be encoded by the triplet codon starting at any of nucleotide positions 1, 4, 7, 10, 13, 16, 19 (both forward and reverse direction).

[0192] Typically, a tumor specific neoantigenic peptide as per the present disclosure may exhibit one or more of the following properties:
[0193] It does not induce an autoimmune response and/or invoke immunological tolerance when administered to a subject. Tolerating mechanisms involve clonal deletion, ignorance, anergy, or suppression in the host of the reduction in the number of high-affinity self-reactive T cells.
[0194] It is specifically expressed in tumor cells, in some embodiments it is only expressed in one or more tumor cells and not in healthy cells (e.g., not detectably expressed). Lack of expression of a neoantigenic peptide in healthy cells may for example be tested using notably the Basic local alignment search tool (BLAST) and performing alignment of the sequence of the neoantigenic peptide against the transcriptome of healthy cells.

[0195] In some embodiments, the peptide is encoded by a single genomic TE (i.e.: the peptide is non-redundant).

[0196] In other embodiments the peptide is encoded by more than one TE (i.e: the peptide is redundant). In more particular embodiments, the peptide is either highly recurrent (typically it is encoded by more than 200 genomic TE occurrences) and is non tumor specific while in other particular embodiments, the peptide has a low redundancy (typically it is encoded by less than 100 genomic TE occurrences, notably less than 50 or less than 10) and is encoded by a TE which expression is highly up-regulated in a tumor cell and/or which is not expressed in normal cells or samples (e.g., which is only expressed in at least one tumor cells, notably a glioblastoma cell).

[0197] Typically, immunization with a tumor neoantigenic peptide as per the present disclosure elicits a T cell response (i.e., is immunogenic). Assessment of the immunogenicity of a neoantigenic peptide can be achieved using an in vitro vaccination assay as described for example in the Example Section. Assessment of specific CD8⁺ T cells can be achieved by flow cytometry (Flow Cytometry and Fluorescence-Activated Cell Sorting, FACS) using multimer staining.

[0198] The neoantigenic peptide can also be modified by extending or decreasing the compound's amino acid sequence, e.g., by the addition or deletion of amino acids. The peptides can also be modified by altering the order or composition of certain residues, it being readily appreciated that certain amino acid residues essential for biological activity, e.g., those at critical contact sites or conserved residues, may generally not be altered without an adverse effect on biological activity. The non-critical amino acids need not be limited to those naturally occurring in proteins, such as L-α-amino acids, or their D-isomers, but may include non-natural amino acids as well, such as β-γ-δ-amino acids, as well as many derivatives of L-α-amino acids.

[0199] Typically, a series of peptides with single amino acid substitutions are employed to determine the effect of electrostatic charge, hydrophobicity, etc. on binding. For instance, a series of positively charged (e.g., Lys or Arg) or negatively charged (e.g., Glu) amino acid substitutions are made along the length of the peptide revealing different patterns of sensitivity towards various MHC molecules and T cell receptors. In addition, multiple substitutions using small, relatively neutral moieties such as Ala, Gly, Pro, or similar residues may be employed. The substitutions may be homo-oligomers or hetero-oligomers. The number and types of residues which are substituted or added depend on the spacing necessary between essential contact points and certain functional attributes which are sought (e.g., hydrophobicity versus hydrophilicity). Increased binding affinity for an MHC molecule or T cell receptor may also be achieved by such substitutions, compared to the affinity of the parent peptide. In any event, such substitutions should employ amino acid residues or other molecular fragments chosen to avoid, for example, steric and charge interference which might disrupt binding.

[0200] Amino acid substitutions are typically of single residues. Substitutions, deletions, insertions or any combination thereof may be combined to arrive at a final peptide. Substitutional variants are those in which at least one residue of a peptide has been removed and a different residue inserted in its place. Such substitutions are generally made in accordance with the following Table 1 when it is desired to finely modulate the characteristics of the peptide.

TABLE 1

| Original residue | Exemplary substitution |
|---|---|
| Ala | Ser |
| Arg | Lys, His |
| Asn | Gln |
| Asp | Glu |
| Cys | Ser |
| Gln | Asn |
| Glu | Asp |
| Gly | Pro |
| His | Lys; Arg |
| Ile | Leu; Val |
| Leu | Ile; Val |
| Lys | Arg; His |
| Met | Leu; Ile |
| Phe | Tyr; Trp |
| Ser | Thr |
| Thr | Ser |
| Trp | Tyr, Phe |
| Tyr | Trp, Phe |
| Val | Ile, Leu |
| Pro | Gly |

[0201] Substantial changes in function (e.g., affinity for MHC molecules or T cell receptors) are made by selecting substitutions that are less conservative than those in above Table 1, i.e., selecting residues that differ more significantly in their effect on maintaining (a) the structure of the peptide backbone in the area of the substitution, for example as a sheet or helical conformation, (b) the charge or hydrophobicity of the molecule at the target site or (c) the bulk of the side chain. The substitutions which in general are expected to produce the greatest changes in peptide properties will be those in which (a) hydrophilic residue, e.g. seryl, is substituted for (or by) a hydrophobic residue, e.g. leucyl, isoleucyl, phenylalanyl, valyl or alanyl; (b) a residue having an electropositive side chain, e.g., lysl, arginyl, or histidyl, is substituted for (or by) an electronegative residue, e.g. glutamyl or aspartyl; or (c) a residue having a bulky side chain, e.g. phenylalanine, is substituted for (or by) one not having a side chain, e.g., glycine.

[0202] The peptides and polypeptides may also comprise isosteres of two or more residues in the neoantigenic peptide or polypeptides. An isostere as defined here is a sequence of two or more residues that can be substituted for a second sequence because the steric conformation of the first sequence fits a binding site specific for the second sequence. The term specifically includes peptide backbone modifications well known to those skilled in the art. Such modifications include modifications of the amide nitrogen, the α-carbon, amide carbonyl, complete replacement of the amide bond, extensions, deletions or backbone crosslinks. See, generally, Spatola, Chemistry and Biochemistry of Amino Acids, Peptides and Proteins, Vol. VII (Weinstein ed., 1983).

[0203] In addition, the neoantigenic peptide may be conjugated to a carrier protein, a ligand, or an antibody. Half-life of the peptide may be improved by PEGylation, glycosylation, polysialylation, HESylation, recombinant PEG mimetics, Fc fusion, albumin fusion, nanoparticle attachment, nanoparticulate encapsulation, cholesterol fusion, iron fusion, or acylation.

[0204] Modifications of peptides and polypeptides with various amino acid mimetics or unnatural amino acids are particularly useful in increasing the stability of the peptide and polypeptide in vivo. Stability can be assayed in a number of ways. For instance, peptidases and various biological media, such as human plasma and serum, have been used to test stability. See, e.g., Verhoef et al., Eur. J. Drug Metab Pharmacokin. 11:291-302 (1986). Half-life of the peptides of the present disclosure is conveniently determined using a 25% human serum (v/v) assay. The protocol is generally as follows. Pooled human serum (Type AB, non-heat inactivated) is delipidated by centrifugation before use. The serum is then diluted to 25% with RPMI tissue culture media and used to test peptide stability. At predetermined time intervals a small amount of reaction solution is removed and added to either 6% aqueous trichloracetic acid or ethanol. The cloudy reaction sample is cooled (4° C.) for 15 minutes and then spun to pellet the precipitated serum proteins. The presence of the peptides is then determined by reversed-phase HPLC using stability-specific chromatography conditions.

[0205] The peptides and polypeptides may be modified to provide desired attributes other than improved serum half-life. For instance, the ability of the peptides to induce CTL activity can be enhanced by linkage to a sequence which contains at least one epitope that is capable of inducing a T helper cell response. Particularly preferred immunogenic peptides/T helper conjugates are linked by a spacer molecule. The spacer is typically comprised of relatively small, neutral molecules, such as amino acids or amino acid mimetics, which are substantially uncharged under physiological conditions. The spacers are typically selected from, e.g., Ala, Gly, or other neutral spacers of nonpolar amino acids or neutral polar amino acids. It will be understood that the optionally present spacer need not be comprised of the same residues and thus may be a hetero- or homo-oligomer. When present, the spacer will usually be at least one or two residues, more usually three to six residues. Alternatively, the peptide may be linked to the T helper peptide without a spacer.

[0206] The neoantigenic peptide may be linked to the T helper peptide either directly or via a spacer either at the amino or carboxy terminus of the peptide. The amino terminus of either the neoantigenic peptide or the T helper peptide may be acylated. Exemplary T helper peptides include tetanus toxoid 830-843, influenza 307-319, malaria circumsporozoite 382-398 and 378-389.

[0207] Proteins or peptides may be made by any technique known to those of skill in the art, including the expression of proteins, polypeptides or peptides through standard molecular biological techniques, the isolation of proteins or peptides from natural sources, or the chemical synthesis of proteins or peptides. The nucleotide and protein, polypeptide and peptide sequences corresponding to various genes have been previously disclosed, and may be found at computerized databases known to those of ordinary skill in the art. One such database is the National Center for Biotechnology Infornation's Genbank and GenPept databases located at the National Institutes of Health website. The coding regions for known genes may be amplified and/or expressed using the techniques disclosed herein or as would be known to those of ordinary skill in the art. Alternatively, various commercial preparations of proteins, polypeptides and peptides are known to those of skill in the art.

[0208] In a further aspect, the present disclosure provides a nucleic acid (e.g.: polynucleotide) encoding a neoantigenic peptide as herein disclosed. The polynucleotide may be selected from DNA, cDNA, PNA, CNA, RNA, either single- and/or double-stranded, or native or stabilized forms of polynucleotides, such as for example polynucleotides with a phosphorothiate backbone, or combinations thereof and it may or may not contain introns so long as it codes for the peptide. Only peptides that contain naturally occurring amino acid residues joined by naturally occurring peptide bonds are encodable by a polynucleotide. In some embodiments, the polynucleotide may be linked to a heterologous regulatory control sequence (e.g., heterologous transcriptional and/or translational regulatory control nucleotide sequences as well-known in the field).

[0209] A still further aspect of the disclosure provides an expression vector capable of expressing a neoantigenic peptide as herein disclosed. Expression vectors for different cell types are well known in the art and can be selected without undue experimentation. Generally, the DNA is inserted into an expression vector, such as a plasmid, in proper orientation and correct reading frame for expression. The expression vector will comprise the appropriate heterologous transcriptional and/or translational regulatory control nucleotide sequences recognized by the desired host. The polynucleotide encoding the tumor neoantigenic peptide may be linked to such heterologous regulatory control nucleotide sequences or may be non-adjacent yet operably linked to such heterologous regulatory control nucleotide sequences. The vector is then introduced into the host through standard techniques. Guidance can be found for example in Sambrook et al. (1989) Molecular Cloning, A Laboratory Manual, Cold Spring Harbor Laboratory, Cold Spring Harbor, N.Y.

### Antigen Presenting Cells (APCs)

[0210] The present disclosure also encompasses a population of antigen presenting cells that have been pulsed with one or more of the peptides as previously defined and/or obtainable in a method as previously described. Preferably, the antigen presenting cells are dendritic cell (DCs) or artificial antigen presenting cells (aAPCs) (see Neal, Lillian R et al. “The Basics of Artificial Antigen Presenting Cells in T Cell-Based Cancer Immunotherapies.” Journal of immunology research and therapy vol. 2, 1 (2017): 68-79). Dendritic cells (DC) are professional antigen-presenting cells (APC) that have an extraordinary capacity to stimulate naive T-cells and initiate primary immune responses to pathogens. Indeed, the main role of mature DCs are to sense antigens and produce mediators that activate other immune cells, particularly T cells. DCs are potent stimulators for lymphocyte activation as they express MHC molecules that trigger TCRs (signal 1) and co-stimulatory molecules (signal 2) on T cells. Additionally, DCs also secrete cytokines that support T cell expansion. T cells require presented antigen in the form of a processed peptide to recognize foreign pathogens or tumor. Presentation of peptide epitopes derived from pathogen/tumor proteins is achieved through MHC molecules. MHC class I (MHC-I) and MHC class II (MHC-II) molecules present processed peptides to CD8+ T cells and CD4+ T cells, respectively. Importantly, DCs home to inflammatory sites containing abundant T cell populations to foster an immune response. Thus, DCs can be a crucial component of any immunotherapeutic approach, as they are intimately involved with the activation of the adaptive immune response. In the context of vaccines, DC therapy can enhance T cell immune responses to a desired target in healthy volunteers or patients with infectious disease or cancer. In one embodiment, APCs are artificial APC, which are genetically modified to express the desired T-cell co-stimulatory molecules, human HLA alleles and/or cytokines. Such artificial antigen presenting cells (aAPC) can provide the requirements for adequate T-cell engagement, co-stimulation, as well as sustained release of cytokines that allow for controlled T-cell expansion. These cells are not subject to the constraints of time and limited availability and can be stored in small aliquots for subsequent use in generating T-cell lines from different donors, thus representing an off the shelf reagent for immunotherapy applications. Expression of potent co-stimulatory signals on these aAPC endows this system with higher efficiency lending to increased efficacy of adoptive immunotherapy. Furthermore, aAPC can be engineered to express genes directing release of specific cytokines to facilitate the preferential expansion of desirable T-cell subsets for adoptive transfer; such as long lived memory T-cells (see for review Hasan A H et al., Artificial Antigen Presenting Cells: An Off the Shelf Approach for Generation of Desirable T-Cell Populations for Broad Application of Adoptive Immunotherapy; Adv Genet Eng. 2015; 4(3): 130, Kim J V, Latouche J B, Rivière I, Sadelain M. The ABCs of artificial antigen presentation. Nat Biotechnol. 2004; 22:403-410 or Wang C, Sun W, Ye Y, Bomba H N, Gu Z. Bioengineering of Artificial Antigen Presenting Cells and Lymphoid Organs. Theranostics 2017; 7(14):3504-3516.).

[0211] Typically, the dendritic cells are autologous dendritic cells that are pulsed with a neoantigenic peptide as herein disclosed. The peptide may be any suitable peptide that gives rise to an appropriate T-cell response. The antigen-presenting cell (or stimulator cell) typically has an MHC class I or II molecule on its surface, and in one embodiment is substantially incapable of itself loading the MHC class I or II molecule with the selected antigen. The MHC class I or II molecule may readily be loaded with the selected antigen in vitro.

[0212] As an alternative the antigen presenting cell may comprise an expression construct encoding a tumor neoantigenic peptide as herein disclosed. The polynucleotide may be any suitable polynucleotide as previously defined and it is preferred that it is capable of transducing the dendritic cell, thus resulting in the presentation of a peptide and induction of immunity.

[0213] Thus, the present disclosure encompasses a population of APCs than can be pulsed or loaded with the neoantigenic peptide as herein disclosed, genetically modified (via DNA or RNA transfer) to express at least one neoantigenic peptide as herein disclosed, or that comprise an expression construct encoding a tumor neoantigenic peptide of the present disclosure as well as a method of producing thereof. Typically, the population of APCs is pulsed or loaded, modified to express or comprises at least one, at least 5, at least 10, at least 15, or at least 20 different neoantigenic peptide or expression construct encoding it.

[0214] The present disclosure also encompasses compositions comprising APCs as herein disclosed. APCs can be suspended in any known physiologically compatible pharmaceutical carrier, such as cell culture medium, physiological saline, phosphate-buffered saline, cell culture medium, or the like, to form a physiologically acceptable, aqueous pharmaceutical composition. Parenteral vehicles include sodium chloride solution, Ringer's dextrose, dextrose and sodium chloride, lactated Ringer's. Other substances may be added as desired such as antimicrobials. As used herein, a “carrier” refers to any substance suitable as a vehicle for delivering an APC to a suitable in vitro or in vivo site of action. As such, carriers can act as an excipient for formulation of a therapeutic or experimental reagent containing an APC. Preferred carriers are capable of maintaining an APC in a form that is capable of interacting with a T cell. Examples of such carriers include, but are not limited to water, phosphate buffered saline, saline, Ringer's solution, dextrose solution, serum-containing solutions, Hank's solution and other aqueous physiologically balanced solutions or cell culture medium. Aqueous carriers can also contain suitable auxiliary substances required to approximate the physiological conditions of the recipient, for example, enhancement of chemical stability and isotonicity. Suitable auxiliary substances include, for example, sodium acetate, sodium chloride, sodium lactate, potassium chloride, calcium chloride, sorbitan monolaurate, triethanolamine oleate, and other substances used to produce phosphate buffer, Tris buffer, and bicarbonate buffer.

### Vaccine Compositions

[0215] The present disclosure further encompasses a vaccine or immunogenic composition capable of raising a specific T-cell response comprising:
[0216] one or more neoantigenic peptides as herein defined,
[0217] one or more polynucleotides encoding a neoantigenic peptide as herein defined; and/or
[0218] a population of antigen presenting cells (such as autologous dendritic cells or artificial APC) as described above.

[0219] A suitable vaccine or immunogenic composition will preferably contain between 1 and 20 neoantigenic peptides, more preferably 2, 3, 4, 5, 6, 7, 8, 9, 10, 11, 12, 13, 14, 15, 16, 17, 18, 19, 20, 21, 22, 23, 24, 25 different neoantigenic peptides, further preferred 6, 7, 8, 9, 10 11, 12, 13, or 14 different neoantigenic peptides, and most preferably 12, 13 or 14 different neoantigenic peptides.

[0220] The neoantigenic peptide(s) may be linked to a carrier protein. Where the composition contains two or more neoantigenic peptides, the two or more (e.g.: 2-25) peptides may be linearly linked by a spacer molecule as described above, e.g., a spacer comprising 2-6 nonpolar or neutral amino acids.

[0221] In one embodiment of the present disclosure the different neoantigenic peptides, encoding polynucleotides, vectors, or APCs are selected so that one vaccine or immunogenic composition comprises neoantigenic peptides capable of associating with different MHC molecules, such as different MHC class I molecules. Preferably, such neoantigenic peptides are capable of associating with the most frequently occurring MHC class I molecules, e.g., different fragments capable of associating with at least 2 preferred, more preferably at least 3 preferred, even more preferably at least 4 preferred MHC class I molecules. In some embodiments, the compositions comprise peptides, encoding polynucleotides, vectors, or APCs capable of associating with one or more MHC class II molecules. The MHC is optionally HLA-A, —B, —C, -DP, -DQ, or -DR.

[0222] The vaccine or immunogenic composition is capable of raising a specific cytotoxic T-cells response and/or a specific helper T-cell response.

[0223] Thus, in a particular embodiment, the present disclosure also relates to a neoantigenic peptide as described above, wherein the neoantigenic peptide has a tumor specific neoepitope and is included in a vaccine or immunogenic composition. A vaccine composition is to be understood as meaning a composition for generating immunity for the prophylaxis and/or treatment of diseases. Accordingly, vaccines are medicines which comprise or generate antigens and are intended to be used in humans or animals for generating specific defense and protective substance by vaccination. An “immunogenic composition” is to be understood as meaning a composition that comprises or generates antigen(s) and is capable of eliciting an antigen-specific humoral or cellular immune response, e.g.: T-cell response.

[0224] In a preferred embodiment, the neoantigenic peptide according to the disclosure is 8 or 9 residues long, or from 13 to 25 residues long. When the peptide is less than 20 residues, to have a peptide better suited for in vivo immunization, said neoantigenic peptide, is optionally flanked by additional amino acids to obtain an immunization peptide of more amino acids, usually more than 20.

[0225] Pharmaceutical compositions (i.e., the vaccine or immunogenic composition) comprising a peptide as herein described may be administered to an individual already suffering from a cancer or a tumor. In therapeutic applications, compositions are administered to a patient in an amount sufficient to elicit an effective CTL response to the tumor antigen and to cure or at least partially arrest symptoms and/or complications. An amount adequate to accomplish this is defined as “therapeutically effective dose.” Amounts effective for this use will depend on, e.g., the peptide composition, the manner of administration, the stage and severity of the disease being treated, the weight and general state of health of the patient, and the judgment of the prescribing physician, but generally range for the initial immunization (that is for therapeutic or prophylactic administration) from about 1.0 μg to about 50,000 μg of peptide for a 70 kg patient, followed by boosting dosages or from about 1.0 μg to about 10,000 μg of peptide pursuant to a boosting regimen over weeks to months depending upon the patient's response and condition by measuring specific CTL activity in the patient's blood. It must be kept in mind that the peptide and compositions of the present invention may generally be employed in serious disease states, that is, life-threatening or potentially life-threatening situations, especially when the cancer has metastasized. In such cases, in view of the minimization of extraneous substances and the relative nontoxic nature of the peptide, it is possible and may be felt desirable by the treating physician to administer substantial excesses of these peptide compositions.

[0226] For therapeutic use, administration should begin at the detection or surgical removal of tumors. This is followed by boosting doses until at least symptoms are substantially abated and for a period thereafter.

[0227] The vaccine or immunogenic compositions for therapeutic treatment are intended for parenteral, topical, nasal, oral or local administration. Preferably, the pharmaceutical compositions are administered parenterally, e.g., intravenously, subcutaneously, intradermally, or intramuscularly. The compositions may be administered at the site of surgical excision to induce a local immune response to the tumor.

[0228] The vaccine or immunogenic composition may be a pharmaceutical composition which additionally comprises a pharmaceutically acceptable adjuvant, immunostimulatory agent, stabilizer, carrier, diluent, excipient and/or any other materials well known to those skilled in the art. Such materials should be non-toxic and should not interfere with the efficacy of the active ingredient. The carrier is preferably an aqueous carrier, but its precise nature of the carrier or other material will depend on the route of administration. A variety of aqueous carriers may be used, e.g., water, buffered water, 0.9% saline, 0.3% glycine, hyaluronic acid, and the like. These compositions may be sterilized by conventional, well known sterilization techniques, or may be sterile filtered. The resulting aqueous solutions may be packaged for use as is, or lyophilized, the lyophilized preparation being combined with a sterile solution prior to administration. The compositions may further contain pharmaceutically acceptable auxiliary substances as required to approximate physiological conditions, such as pH adjusting and buffering agents, tonicity adjusting agents, wetting agents and the like, for example, sodium acetate, sodium lactate, sodium chloride, potassium chloride, calcium chloride, sorbitan monolaurate, triethanolamine oleate, etc. See, for example, Butterfield, B M J. 2015 22; 350 for a discussion of cancer vaccines.

[0229] Example adjuvants that increase or expand the immune response of a host to an antigenic compound include emulsifiers, muramyl dipeptides, avridine, aqueous adjuvants such as aluminum hydroxide, chitosan-based adjuvants, saponins, oils, Amphigen, LPS, bacterial cell wall extracts, bacterial DNA, CpG sequences, synthetic oligonucleotides, cytokines and combinations thereof. Emulsifiers include, for example, potassium, sodium and ammonium salts of lauric and oleic acid, calcium, magnesium and aluminum salts of fatty acids, organic sulfonates such as sodium lauryl sulfate, cetyltrhethylammonlum bromide, glycerylesters, polyoxyethylene glycol esters and ethers, and sorbitan fatty acid esters and their polyoxyethylene, acacia, gelatin, lecithin and/or cholesterol. Adjuvants that comprise an oil component include mineral oil, a vegetable oil, or an animal oil. Other adjuvants include Freund's Complete Adjuvant (FCA) or Freund's Incomplete Adjuvant (FIA). Cytokines useful as additional immunostimulatory agents include interferon alpha, interleukin-2 (IL-2), and granulocyte macrophage-colony stimulating factor (GM-CSF), or combinations thereof.

[0230] The concentration of peptides as herein described in the vaccine or immunogenic formulations can vary widely, i.e., from less than about 0.10%, usually at or at least about 2% to as much as 20% to 50% or more by weight, and will be selected primarily by fluid volumes, viscosities, etc., in accordance with the mode of administration selected.

[0231] The peptides as herein described may also be administered via liposomes, which target the peptides to a particular cells tissue, such as lymphoid tissue. Liposomes are also useful in increasing the half-life of the peptides. Liposomes include emulsions, foams, micelles, insoluble monolayers, liquid crystals, phospholipid dispersions, lamellar layers and the like. In these preparations the peptide to be delivered is incorporated as part of a liposome, alone or in conjunction with a molecule which binds to, e.g., a receptor prevalent among lymphoid cells, such as monoclonal antibodies which bind to the CD45 antigen, or with other therapeutic or immunogenic compositions. Thus, liposomes filled with a desired peptide of the invention can be directed to the site of lymphoid cells, where the liposomes then deliver the selected therapeutic/immunogenic peptide compositions. Liposomes for use in the invention are formed from standard vesicle-forming lipids, which generally include neutral and negatively charged phospholipids and a sterol, such as cholesterol. The selection of lipids is generally guided by consideration of, e.g., liposome size, acid lability and stability of the liposomes in the blood stream. A variety of methods are available for preparing liposomes, as described in, e.g., Szoka et al., Ann. Rev. Biophys. Bioeng. 9; 467 (1980), U.S. Pat. Nos. 4,235,871; 4,501,728; 4,837,028; and 5,019,369.

[0232] For targeting to the immune cells, a ligand to be incorporated into the liposome can include, e.g., antibodies or fragments thereof specific for cell surface determinants of the desired immune system cells. A liposome suspension containing a peptide may be administered intravenously, locally, topically, etc. in a dose which varies according to, inter alia, the manner of administration, the peptide being delivered, and the stage of the disease being treated.

[0233] For solid compositions, conventional or nanoparticle nontoxic solid carriers may be used which include, for example, pharmaceutical grades of mannitol, lactose, starch, magnesium stearate, sodium saccharin, talcum, cellulose, glucose, sucrose, magnesium carbonate, and the like. For oral administration, a pharmaceutically acceptable nontoxic composition is formed by incorporating any of the normally employed excipients, such as those carriers previously listed, and generally 10⁻⁹⁵% of active ingredient, that is, one or more peptides of the invention, and more preferably at a concentration of 25%-75%.

[0234] For aerosol administration, the immunogenic peptides are preferably supplied in finely divided form along with a surfactant and propellant. Typical percentages of peptides are 0.01%-20% by weight, preferably 1%-10%. The surfactant must, of course, be nontoxic, and preferably soluble in the propellant. Representative of such agents are the esters or partial esters of fatty acids containing from 6 to 22 carbon atoms, such as caproic, octanoic, lauric, palmitic, stearic, linoleic, linolenic, olesteric and oleic acids with an aliphatic polyhydric alcohol or its cyclic anhydride. Mixed esters, such as mixed or natural glycerides may be employed. The surfactant may constitute 0.1%-20% by weight of the composition, preferably 0.25-5%. The balance of the composition is ordinarily propellant. A carrier can also be included as desired, as with, e.g., lecithin for intranasal delivery.

[0235] Cytotoxic T-cells (CTLs) recognize an antigen in the form of a peptide bound to an MHC molecule rather than the intact foreign antigen itself. The MHC molecule itself is located at the cell surface of an antigen presenting cell. Thus, an activation of CTLs is only possible if a trimeric complex of peptide antigen, MHC molecule, and antigen presenting cell (APC) is present. Correspondingly, it may enhance the immune response if not only the peptide is used for activation of CTLs, but if additionally, APCs with the respective MHC molecule are added. Therefore, in some embodiments the vaccine or immunogenic composition according to the present disclosure alternatively or additionally contains at least one antigen presenting cell, preferably a population of APCs.

[0236] The vaccine or immunogenic composition may thus be delivered in the form of a cell, such as an antigen presenting cell, for example as a dendritic cell vaccine. The antigen presenting cells such as a dendritic cell may be pulsed or loaded with a neoantigenic peptide as herein disclosed, may comprise an expression construct encoding a neoantigenic peptide as herein disclosed, or may be genetically modified (via DNA or RNA transfer) to express one, two or more of the herein disclosed neoantigenic peptides, for example at least 2, 3, 4, 5, 6, 7, 8, 9, or 10 neoantigenic peptides.

[0237] Suitable vaccines or immunogenic compositions may also be in the form of DNA or RNA relating to neoantigenic peptides as described herein. For example, DNA or RNA encoding one or more neoantigenic peptides or proteins derived therefrom may be used as the vaccine, for example by direct injection to a subject. For example, DNA or RNA encoding at least 2, 3, 4, 5, 6, 7, 8, 9, 10, 11, 12, 13, 14, 15, 16, 17, 18, 19, 20, 21, 22, 23, 24 or 25 neoantigenic peptides or proteins derived therefrom.

[0238] Several methods are conveniently used to deliver the nucleic acids to the patient. For instance, the nucleic acid can be delivered directly, as “naked DNA”. This approach is described, for instance, in Wolff et al., Science 247: 1465-1468 (1990) as well as U.S. Pat. Nos. 5,580,859 and 5,589,466. The nucleic acids can also be administered using ballistic delivery as described, for instance, in U.S. Pat. No. 5,204,253. Particles comprised solely of DNA can be administered. Alternatively, DNA can be adhered to particles, such as gold particles.

[0239] The nucleic acids can also be delivered complexed to cationic compounds, such as cationic lipids. Lipid-mediated gene delivery methods are described, for instance, in WO 96/18372; WO 93/24640; Mannino & Gould-Fogerite, BioTechniques 6(7): 682-691 (1988); U.S. Pat. No. 5,279,833; WO 91/06309; and Felgner et al., Proc. Natl. Acad. Sci. USA 84: 7413-7414 (1987).

[0240] Delivery systems may optionally include cell-penetrating peptides, nanoparticulate encapsulation, virus like particles, liposomes, or any combination thereof. Cell penetrating 20 peptides include TAT peptide, herpes simplex virus VP22, transportan, Antp. Liposomes may be used as a delivery system. Listeria vaccines or electroporation may also be used.

[0241] The one or more neoantigenic peptides may also be delivered via a bacterial or viral vector containing DNA or RNA sequences which encode one or more neoantigenic peptides. The DNA or RNA may be delivered as a vector itself or within attenuated bacteria virus or live attenuated virus, such as vaccinia or fowlpox. This approach involves the use of vaccinia virus as a vector to express nucleotide sequences that encode the peptide of the invention. Upon introduction into an acutely or chronically infected host or into a noninfected host, the recombinant vaccinia virus expresses the immunogenic peptide, and thereby elicits a host CTL response. Vaccinia vectors and methods useful in immunization protocols are described in, e.g., U.S. Pat. No. 4,722,848. Another vector is BCG (Bacille Calmette Guerin). BCG vectors are described in Stover et al. (Nature 351:456-460 (1991)). A wide variety of other vectors useful for therapeutic administration or immunization of the peptides of the invention, e.g., Salmonella typhivectors and the like, will be apparent to those skilled in the art from the description herein.

[0242] An appropriate mean of administering nucleic acids encoding the peptides as herein described involves the use of minigene constructs encoding multiple epitopes. To create a DNA sequence encoding the selected CTL epitopes (minigene) for expression in human cells, the amino acid sequences of the epitopes are reverse translated. A human codon usage table is used to guide the codon choice for each amino acid. These epitope-encoding DNA sequences are directly adjoined, creating a continuous polypeptide sequence. To optimize expression and/or immunogenicity, additional elements can be incorporated into the minigene design. Examples of amino acid sequence that could be reverse translated and included in the minigene sequence include helper T lymphocyte, epitopes, a leader (signal) sequence, and an endoplasmic reticulum retention signal. In addition, MHC presentation of CTL epitopes may be improved by including synthetic (e.g.: poly-alanine) or naturally occurring flanking sequences adjacent to the CTL epitopes.

[0243] The minigene sequence is converted to DNA by assembling oligonucleotides that encode the plus and minus strands of the minigene. Overlapping oligonucleotides (30-100 bases long) are synthesized, phosphorylated, purified, and annealed under appropriate conditions using well known techniques. The ends of the oligonucleotides are joined using T4 DNA ligase. This synthetic minigene, encoding the CTL epitope polypeptide, can then cloned into a desired expression vector.

[0244] Standard regulatory sequences well known to those of skill in the art are included in the vector to ensure expression in the target cells. Thus, the DNA or RNA encoding the neoantigenic peptide(s) may typically be operably linked to one or more of:
[0245] a promoter that can be used to drive nucleic acid molecule expression. AAV ITR can serve as a promoter and is advantageous for eliminating the need for an additional promoter element. For ubiquitous expression, the following promoters can be used: CMV (notably human cytomegalovirus immediate early promoter (hCMV-IE)), CAG, CBh, PGK, SV40, RSV, Ferritin heavy or light chains, etc. For brain expression, the following promoters can be used: Synapsinl for all neurons, CaMKIIalpha for excitatory neurons, GAD67 or GAD65 or VGAT for GABAergic neurons, etc. Promoters used to drive RNA synthesis can include: Pol III promoters such as U6 or HI. The use of a Pol II promoter and intronic cassettes can be used to express guide RNA (gRNA). Typically, the promoter includes a down-stream cloning site for minigene insertion. For examples of suitable promoter sequences, see notably U.S. Pat. Nos. 5,580,859 and 5,589,466.
[0246] Transcriptional transactivators or other enhancer elements, which can also increase transcription activity, e.g.: the regulatory R region from the 5′ long terminal repeat (LTR) of human T-cell leukemia virus type 1 (HTLV-1) (which when combined with a CMV promoter has been shown to induce higher cellular immune response).
[0247] Translation optimizing sequences e.g.: a Kozak sequence flanking the AUG initiator codon (ACCAUGG) within mRNA, and codon optimization.

[0248] Additional vector modifications may be desired to optimize minigene expression and immunogenicity. In some cases, introns are required for efficient gene expression, and one or more synthetic or naturally occurring introns could be incorporated into the transcribed region of the minigene. The inclusion of mRNA stabilization sequences can also be considered for increasing minigene expression. It has recently been proposed that immunostimulatory sequences (ISSs or CpGs) play a role in the immunogenicity of DNA' vaccines. These sequences could be included in the vector, outside the minigene coding sequence, if found to enhance immunogenicity.

[0249] In some embodiments, a bicistronic expression vector, to allow production of the minigene-encoded epitopes and a second protein included to enhance or decrease immunogenicity can be used.

[0250] DNA vaccines or immunogenic compositions as herein described can be enhanced by co-delivering cytokines that promote cell-mediated immune responses, such as IL-2, IL-12, IL-18, GM-CSF and IFNγ. CXC chemokines such as IL-8, and CC chemokines such as macrophage inflammatory protein (MIP)-1α, MIP-3α, MIP-3β, and RANTES, may increase the potency of the immune response. DNA vaccine immunogenicity can also be enhanced by co-delivering plasmid-encoded cytokine-inducing molecules (e.g.: LeIF), co-stimulatory and adhesion molecules, e.g.: B7-1 (CD80) and/or B7-2 (CD86). Helper (HTL) epitopes could be joined to intracellular targeting signals and expressed separately from the CTL epitopes. This would allow direction of the HTL epitopes to a cell compartment different than the CTL epitopes. If required, this could facilitate more efficient entry of HTL epitopes into the MHC class II pathway, thereby improving CTL induction. In contrast to CTL induction, specifically decreasing the immune response by co-expression of immunosuppressive molecules (e.g.: TGF-β) may be beneficial in certain diseases.

[0251] Once an expression vector is selected, the minigene is cloned into the polylinker region downstream of the promoter. This plasmid is transformed into an appropriate E. coli strain, and DNA is prepared using standard techniques. The orientation and DNA sequence of the minigene, as well as all other elements included in the vector, are confirmed using restriction mapping and DNA sequence analysis. Bacterial cells harboring the correct plasmid can be stored as a master cell bank and a working cell bank.

[0252] Purified plasmid DNA can be prepared for injection using a variety of formulations. The simplest of these is reconstitution of lyophilized DNA in sterile phosphate-buffer saline (PBS). A variety of methods have been described, and new techniques may become available. As noted above, nucleic acids are conveniently formulated with cationic lipids. In addition, glycolipids, fusogenic liposomes, peptides and compounds referred to collectively as protective, interactive, non-condensing (PINC) could also be complexed to purified plasmid DNA to influence variables such as stability, intramuscular dispersion, or trafficking to specific organs or cell types.

[0253] Vaccines or immunogenic compositions comprising peptides may be administered in combination with vaccines or immunogenic compositions comprising polynucleotide encoding the peptides. For example, administration of peptide vaccine and DNA vaccine may be alternated in a prime-boost protocol. For example, priming with a peptide immunogenic composition and boosting with a DNA immunogenic composition is contemplated, as is priming with a DNA immunogenic composition, and boosting with a peptide immunogenic composition.

[0254] The present disclosure also encompasses a method for producing a vaccine composition comprising the steps of:
[0255] a) optionally, identifying at least one neoantigenic peptide according to the method as previously described;
[0256] b) producing said at least one neoantigenic peptide, at least one polypeptide encoding neoantigenic peptide(s), or at least a vector comprising said polypeptide(s) as described herein; and
[0257] c) optionally adding physiologically acceptable buffer, excipient and/or adjuvant and producing a vaccine with said at least one neoantigenic peptide, polypeptide, or vector.

[0258] Another aspect of the present disclosure is a method for producing a DC vaccine, wherein said DCs present at least one neoantigenic peptide as herein disclosed or expresses at least one expression construct encoding a tumor neoantigenic peptide as herein disclosed.

### Antibodies TCRs, CARs and Derivatives Thereof

[0259] The present disclosure also relates to an antibody or an antigen-binding fragment thereof that specifically binds a neoantigenic peptide as herein defined.

[0260] In some embodiments, the neoantigenic peptide is in association with an MHC or HLA molecule.

[0261] Typically, said antibody, or antigen-binding fragment thereof binds a neoantigenic peptide as herein defined, alone or optionally in association with an MHC or HLA molecule, with a K_{d} binding affinity of 10⁻⁷ M or less, 10⁻⁸ M or less, 10⁻⁹ M or less, 10⁻¹⁰ M or less, or 10⁻¹¹ M or less.

[0262] To promote the infiltration and recognition of tumor cells by lymphocytes T (LT), another strategy consists in using antibodies capable of recognizing more than one antigenic target simultaneously and more particularly two antigenic targets simultaneously. There are many formats of bispecific antibodies. BiTE (bi-specific T-cell engager) are the first to have been developed. These are proteins of fusion consisting of two scFvs (variable domains heavy VH and light VL chains) from two antibodies linked by a binding peptide: one recognizes the LT marker (CD3⁺) and the other a tumor antigen. The goal is to favor recruitment and activation of LTs in contact with tumor, thus leading to cell lysis tumor (See for review: Patrick A. Baeuerle and Carsten Reinhardt; Bispecific T-Cell Engaging Antibodies for Cancer Therapy; Cancer Res 2009; 69: (12). Jun. 15, 2009; and Galaine et al., Innovations & Thérapeutiques en Oncologie, vol. 3-n° 3-7, mai-août 2017).

[0263] In a particular embodiment, said antibody is a bi-specific T-cell engager that targets a tumor neoantigenic peptide as herein defined, optionally in association with an MHC or an HLA molecule and which further targets at least an immune cell antigen. Typically, the immune cell is a T cell, a NK cell, or a dendritic cell. In this context, the targeted immune cell antigen may be for example CD3, CD16, CD30 or a TCR.

[0264] The term “antibody” herein is used in the broadest sense and includes polyclonal and monoclonal antibodies, including intact antibodies and functional (antigen-binding) antibody fragments, including fragment antigen binding (Fab) fragments, F(ab′)2 fragments, Fab′ fragments, Fv fragments, recombinant IgG (rlgG) fragments, variable heavy chain (VH) regions capable of specifically binding the antigen, single chain antibody fragments, including single chain variable fragments (scFv), and single domain antibodies (e.g., VHH antibodies, sdAb, sdFv, nanobody) fragments. The term encompasses genetically engineered and/or otherwise variants modified forms of immunoglobulins, such as intrabodies, peptibodies, chimeric antibodies, fully human antibodies, humanized antibodies, and heteroconjugate antibodies, multispecific, e.g., bispecific, antibodies, diabodies, triabodies, and tetrabodies, tandem di-scFv, tandem tri-scFv. Unless otherwise stated, the term “antibody” should be understood to encompass functional antibody and fragments thereof. The term also encompasses intact or full-length antibodies, including antibodies of any class or sub-class, including IgG and sub-classes thereof, IgG1, IgG2, IgG3, IgG4, IgM, IgE, IgA, and IgD. In some embodiments, the antibody comprises a light chain variable domain and a heavy chain variable domain, e.g.: in an scFv format.

[0265] Antibodies include variant polypeptide species that have one or more amino acid substitutions, insertions, or deletions in the native amino acid sequence, provided that the antibody retains or substantially retains its specific binding function. Conservative substitutions of amino acids are well known and described above.

[0266] The present disclosure further includes a method of producing an antibody, or antigen-binding fragment thereof, comprising a step of selecting antibodies that bind to a tumor neoantigen peptide as herein defined, optionally in association with an MHC or HLA molecule, with a K_{d}binding affinity of about 106 M or less, 10⁻⁷ M or less, 10⁻⁸ M or less, 10⁻⁹ M or less, 1010 M or less, or 10⁻¹¹ M or less.

[0267] In some embodiments, the antibodies are selected from a library of human antibody sequences. In some embodiments, the antibodies are generated by immunizing an animal with a polypeptide comprising the neoantigenic peptide, optionally in association with an MHC or HLA molecule, followed by the selection step.

[0268] Antibodies including chimeric, humanized, or human antibodies can be further affinity matured and selected as described above. Humanized antibodies contain rodent-sequence derived CDR regions; typically, the rodent CDRs are engrafted into a human framework, and some of the human framework residues may be back-mutated to the original rodent framework residue to preserve affinity, and/or one or a few of the CDR residues may be mutated to increase affinity. Fully human antibodies have no murine sequence and are typically produced via phage display technologies of human antibody libraries, or immunization of transgenic mice whose native immunoglobin loci have been replaced with segments of human immunoglobulin loci.

[0269] Antibodies produced by said method, as well as immune cells expressing such antibodies or fragments thereof are also encompassed by the present disclosure.

[0270] The present disclosure also encompasses pharmaceutical compositions comprising one or more antibodies as herein disclosed alone or in combination with at least one other agent, such as a stabilizing compound, which may be administered in any sterile, biocompatible pharmaceutical carrier and optionally formulated with formulated with sterile pharmaceutically acceptable buffer(s), diluent(s), and/or excipient(s). Pharmaceutically acceptable carriers typically enhance or stabilize the composition, and/or can be used to facilitate preparation of the composition. Pharmaceutically acceptable carriers include solvents, dispersion media, coatings, antibacterial and antifungal agents, isotonic and absorption delaying agents, and the like that are physiologically compatible and, in some embodiments, pharmaceutically inert.

[0271] Administration of pharmaceutical composition comprising antibodies as herein disclosed can be accomplished orally or parenterally. Methods of parenteral delivery include topical, intra-arterial (directly to the tumor), intramuscular, spinal, subcutaneous, intramedullary, intrathecal, intraventricular, intravenous, intraperitoneal, or intranasal administration.

[0272] Thus, in addition to the active ingredients, these pharmaceutical compositions may contain suitable pharmaceutically acceptable carriers comprising excipients and auxiliaries which facilitate processing of the active compounds into preparations which can be used pharmaceutically. Further details on techniques for formulation and administration may be found in the latest edition of Remington's Pharmaceutical Sciences (Ed. Maack Publishing Co, Easton, Pa.).

[0273] Depending on the route of administration, the active compound, i.e., antibody, bispecific and multispecific molecule, may be coated in a material to protect the compound from the action of acids and other natural conditions that may inactivate the compound.

[0274] The composition is typically sterile and preferably fluid. Proper fluidity can be maintained, for example, by use of coating such as lecithin, by maintenance of required particle size in the case of dispersion and by use of surfactants. In many cases, it is preferable to include isotonic agents, for example, sugars, polyalcohols such as mannitol or sorbitol, and sodium chloride in the composition. Long-term absorption of the injectable compositions can be brought about by including in the composition an agent which delays absorption, for example, aluminum monostearate or gelatin.

[0275] Pharmaceutical compositions for oral administration can be formulated using pharmaceutically acceptable carriers well known in the art in dosages suitable for oral administration. Such carriers enable the pharmaceutical compositions to be formulated as tablets, pills, dragees, capsules, liquids, gels, syrups, slurries, suspensions, and the like, for ingestion by the patient.

[0276] Pharmaceutical compositions of the disclosure can be prepared in accordance with methods well known and routinely practiced in the art. See. e.g., Remington: The Science and Practice of Pharmacy, Mack Publishing Co., 20th ed., 2000; and Sustained and Controlled Release Drug Delivery Systems, J R. Robinson, ed., Marcel Dekker, Inc., New York, 1978. Pharmaceutical compositions are preferably manufactured under GMP conditions.

[0277] The present disclosure also encompasses a T cell receptor (TCR) that targets a neoantigenic peptide as herein defined in association with an MHC or HLA molecule.

[0278] The present disclosure further includes a method of producing a TCR, or an antigen-binding fragment thereof, comprising a step of selecting TCRs that bind to a tumor neoantigen peptide as herein defined, optionally in association with an MHC or HLA molecule, optionally with a K_{d} binding affinity of about 10⁻⁶ M or less, 10⁻⁷ M or less, 10⁻⁸ M or less, 10⁻⁹ M or less, 10⁻¹⁰ M or less, or 10⁻¹¹ M or less.

[0279] Nucleic acid encoding the TCR can be obtained from a variety of sources, such as by polymerase chain reaction (PCR) amplification of naturally occurring TCR DNA sequences, followed by expression of antibody variable regions, followed by the selecting step described above. In some embodiments, the TCR is obtained from T-cells isolated from a patient, or from cultured T-cell hybridomas. In some embodiments, the TCR clone for a target antigen has been generated in transgenic mice engineered with human immune system genes (e.g., the human leukocyte antigen system, or HLA). See, e.g., tumor antigens (see, e.g., Parkhurst et al. (2009) Clin Cancer Res. 15:169-180 and Cohen et al. (2005) J Immunol. 175:5799-5808. In some embodiments, phage display is used to isolate TCRs against a target antigen (see, e.g., Varela-Rohena et al. (2008) Nat Med. 14:1390-1395 and L1 (2005) Nat Biotechnol. 23:349-354.

[0280] A “T cell receptor” or “TCR” refers to a molecule that contains a variable α and β chains (also known as TCRa and TCRp, respectively) or a variable γ and δ chains (also known as TCRγ and TCRδ, respectively) and that is capable of specifically binding to an antigen peptide bound to a MHC receptor. In some embodiments, the TCR is in the UP form. Typically, TCRs that exist in αβ and γδ forms are generally structurally similar, but T cells expressing them may have distinct anatomical locations or functions. A TCR can be found on the surface of a cell or in soluble form. Generally, a TCR is found on the surface of T cells (or T lymphocytes) where it is generally responsible for recognizing antigens bound to major histocompatibility complex (MHC) molecules. In some embodiments, a TCR also can contain a constant domain, a transmembrane domain and/or a short cytoplasmic tail (see, e.g., Janeway et ah, Immunobiology: The Immune System in Health and Disease, 3^{rd} Ed., Current Biology Publications, p. 4:33, 1997). For example, in some aspects, each chain of the TCR can possess one N-terminal immunoglobulin variable domain, one immunoglobulin constant domain, a transmembrane region, and a short cytoplasmic tail at the C-terminal end. In some embodiments, a TCR is associated with invariant proteins of the CD3 complex involved in mediating signal transduction. Unless otherwise stated, the term “TCR” should be understood to encompass functional TCR fragments thereof. The term also encompasses intact or full-length TCRs, including TCRs in the up form or γδ form.

[0281] Thus, for purposes herein, reference to a TCR includes any TCR or functional fragment, such as an antigen-binding portion of a TCR that binds to a specific antigenic peptide bound in an MHC molecule, i.e., MHC-peptide complex. An “antigen-binding portion” or antigen-binding fragment” of a TCR, which can be used interchangeably, refers to a molecule that contains a portion of the structural domains of a TCR, but that binds the antigen (e.g.: MHC-peptide complex) to which the full TCR binds. In some cases, an antigen-binding portion contains the variable domains of a TCR, such as variable a chain and variable β chain of a TCR, sufficient to form a binding site for binding to a specific MHC-peptide complex, such as generally where each chain contains three complementarity determining regions.

[0282] In some embodiments, the variable domains of the TCR chains associate to form loops, or complementarity determining regions (CDRs) analogous to immunoglobulins, which confer antigen recognition and determine peptide specificity by forming the binding site of the TCR molecule and determine peptide specificity. Typically, like immunoglobulins, the CDRs are separated by framework regions (FRs) (see, e.g., Jores et al., Pwc. Nat'lAcad. Sci. U.S.A. 87:9138, 1990; Chothia et al., EMBO J. 7:3745, 1988; see also Lefranc et al., Dev. Comp. Immunol. 27:55, 2003). In some embodiments, CDR3 is the main CDR responsible for recognizing processed antigen, although CDR1 of the alpha chain has also been shown to interact with the N-terminal part of the antigenic peptide, whereas CDR1 of the beta chain interacts with the C-terminal part of the peptide. CDR2 is thought to recognize the MHC molecule. In some embodiments, the variable region of the β-chain can contain a further hypervariability (HV4) region.

[0283] In some embodiments, the TCR chains contain a constant domain. For example, like immunoglobulins, the extracellular portion of TCR chains (e.g., α-chain, β-chain) can contain two immunoglobulin domains, a variable domain (e.g., Va or Vp; typically amino acids 1 to 116 based on Kabat numbering Kabat et al., “Sequences of Proteins of Immunological Interest, US Dept. Health and Human Services, Public Health Service National Institutes of Health, 1991, 5th ed.) at the N-terminus, and one constant domain (e.g., a-chain constant domain or Ca, typically amino acids 117 to 259 based on Kabat, β-chain constant domain or Cp, typically amino acids 117 to 295 based on Kabat) adjacent to the cell membrane. For example, in some cases, the extracellular portion of the TCR formed by the two chains contains two membrane-proximal constant domains, and two membrane-distal variable domains containing CDRs. The constant domain of the TCR domain contains short connecting sequences in which a cysteine residue forms a disulfide bond, making a link between the two chains. In some embodiments, a TCR may have an additional cysteine residue in each of the α and β chains such that the TCR contains two disulfide bonds in the constant domains.

[0284] In some embodiments, the TCR chains can contain a transmembrane domain. In some embodiments, the transmembrane domain is positively charged. In some cases, the TCR chains contain a cytoplasmic tail. In some cases, the structure allows the TCR to associate with other molecules like CD3. For example, a TCR containing constant domains with a transmembrane region can anchor the protein in the cell membrane and associate with invariant subunits of the CD3 signaling apparatus or complex.

[0285] Generally, CD3 is a multi-protein complex that can possess three distinct chains (γ, δ, and ε) in mammals and the ζ-chain. For example, in mammals the complex can contain a CD3y chain, a CD35 chain, two CD3s chains, and a homodimer of CD3ζ chains. The CD3y, CD35, and CD3s chains are highly related cell surface proteins of the immunoglobulin superfamily containing a single immunoglobulin domain. The transmembrane regions of the CD3y, CD35, and CD3s chains are negatively charged, which is a characteristic that allows these chains to associate with the positively charged T cell receptor chains. The intracellular tails of the CD3y, CD35, and CD3s chains each contain a single conserved motif known as an immunoreceptor tyrosine-based activation motif or ITAM, whereas each CD3ζ chain has three. Generally, ITAMs are involved in the signaling capacity of the TCR complex. These accessory molecules have negatively charged transmembrane regions and play a role in propagating the signal from the TCR into the cell. The CD3− and ζ-chains, together with the TCR, form what is known as the T cell receptor complex.

[0286] In some embodiments, the TCR may be a heterodimer of two chains α and β (or optionally γ and δ) or it may be a single chain TCR construct. In some embodiments, the TCR is a heterodimer containing two separate chains (α and β chains or γ and δ chains) that are linked, such as by a disulfide bond or disulfide bonds.

[0287] While T-cell receptors (TCRs) are transmembrane proteins and do not naturally exist in soluble form, antibodies can be secreted as well as membrane bound. Importantly, TCRs have the advantage over antibodies that they in principle can recognize peptides generated from all degraded cellular proteins, both intra- and extracellular, when presented in the context of MHC molecules. Thus, TCRs have important therapeutic potential.

[0288] The present disclosure also relates to soluble T-cell receptors (sTCRs) that contain the antigen recognition part directed against a tumor neoantigenic peptide as herein disclosed (see notably Walseng E, Wilchli S, Fallang L-E, Yang W, Vefferstad A, Areffard A, et al. (2015) Soluble T-Cell Receptors Produced in Human Cells for Targeted Delivery. PLoS ONE 10(4): e0119559). In a particular embodiment, the soluble TCR can be fused to an antibody fragment directed to a T cell antigen, optionally wherein the targeted antigen is CD3 or CD16 (see for example Boudousquie, Caroline et al. “Polyfunctional response by ImmTAC (IMCgp100) redirected CD8+ and CD4+ T cells.” Immunology vol. 152, 3 (2017): 425-438. doi:10.1111/imm.12779).

[0289] The present disclosure also encompasses a chimeric antigen receptor (CAR) which is directed against a tumor neoantigenic peptide as herein disclosed. CARs are fusion proteins comprising an antigen-binding domain, typically derived from an antibody, linked to the signalling domain of the TCR complex. CARs can be used to direct immune cells such T-cells or NK cells against a tumor neoantigenic peptide as previously defined with a suitable antigen-binding domain selected.

[0290] The antigen-binding domain of a CAR is typically based on a scFv (single chain variable fragment) derived from an antibody. In addition to an N-terminal, extracellular antibody-binding domain, CARs typically may comprise a hinge domain, which functions as a spacer to extend the antigen-binding domain away from the plasma membrane of the immune effector cell on which it is expressed, a transmembrane (TM) domain, an intracellular signalling domain (e.g.: the signalling domain from the zeta chain of the CD3 molecule (CD3ζ) of the TCR complex, or an equivalent) and optionally one or more co-stimulatory domains which may assist in signalling or functionality of the cell expressing the CAR. Signalling domains from co-stimulatory molecules including CD28, OX-40 (CD134), ICOS-1, CD27, GITR, CD28, DAP10, and 4-1BB (CD137) can be added alone (second generation) or in combination (third generation) to enhance survival and increase proliferation of CAR modified T cells.

[0291] Thus, the CAR may include:
[0292] (1) In its extracellular portion, one or more antigen binding molecules, such as one or more antigen-binding fragment, domain, or portion of an antibody, or one or more antibody variable domains (heavy chain and/or light chain), and/or antibody molecules.
[0293] (2) In its transmembrane portion, a transmembrane domain derived from human T cell receptor-alpha or -beta chain, a CD3 zeta chain, CD28, CD3-epsilon, CD45, CD4, CD5, CD8, CD9, CD16, CD22, CD33, CD37, CD64, CD80, CD86, CD134, CD137, ICOS, CD154, or a GITR. In some embodiments, the transmembrane domain is derived from CD28, CD8 or CD3-zeta.
[0294] (3) One or more co-stimulatory domains, such as co-stimulatory domains derived from human CD28, 4-1BB (CD137), ICOS-1, CD27, OX 40 (CD137), DAP10, and GITR (AITR). In some embodiments, the CAR comprises co-stimulating domains of both CD28 and 4-1BB.
[0295] (4) In its intracellular signalling domain, one or more intracellular signalling domain(s) comprising one or more ITAMs, for example: the intracellular signalling domain or a portion thereof from CD3-zeta, or a variant thereof lacking one or two ITAMs (e.g.: ITAM3 and/or ITAM2), FcR gamma, FcR beta, CD3 gamma, CD3 delta, CD3 epsilon, CDS, CD22, CD79a, CD79b, and/or CD66d, notably selected from the intracellular domain of CD3-zeta, or a variant thereof lacking one or two ITAMs (e.g.: ITAM3 and ITAM2), or the intracellular signalling of FcRIy or a variant thereof.

[0296] The CAR can be designed to recognize tumor neoantigenic peptide alone or in association with an HLA or MHC molecule.

[0297] Exemplary antigen receptors, including CARs and recombinant TCRs, as well as methods for engineering and introducing the receptors into cells, include those described, for example, in international patent application publication numbers WO2000/14257, WO2013/126726, WO2012/129514, WO2014/031687, WO2013/166321, WO2013/071154, WO2013/123061 U.S. patent application publication numbers US2002131960, US2013287748, US20130149337, U.S. Pat. Nos. 6,451,995, 7,446,190, 8,252,592, 8,339,645, 8,398,282, 7,446,179, 6,410,319, 7,070,995, 7,265,209, 7,354,762, 7,446,191, 8,324,353, and 8,479,118, and European patent application number EP2537416, and/or those described by Sadelain et al., Cancer Discov. 2013 April; 3(4): 388-398; Davila et al. (2013) PLoS ONE 8(4): e61338; Turtle et al., Curr. Opin. Immunol., 2012 October; 24(5): 633-39; Wu et al., Cancer, 2012 Mar. 18(2): 160-75. In some aspects, the genetically engineered antigen receptors include a CAR as described in U.S. Pat. No. 7,446,190, and those described in International Patent Application Publication No.: WO2014/055668.

[0298] The present disclosure also encompasses polynucleotides encoding antibodies, antigen-binding fragments or derivatives thereof, TCRs and CARs as previously described as well as vector comprising said polynucleotide(s).

### Immune Cells

[0299] The present disclosure further encompasses immune cells which target one or more tumor neoantigenic peptides as previously described.

[0300] As used herein, the term “immune cell” includes cells that are of hematopoietic origin and that play a role in the immune response. Immune cells include lymphocytes, such as B cells and T cells, natural killer cells, myeloid cells, such as monocytes, macrophages, eosinophils, mast cells, basophils, and granulocytes.

[0301] As used herein, the term “T cell” includes cells bearing a T cell receptor (TCR), in particular TCR directed against a tumor neoantigenic peptide as herein disclosed. T-cells according to the present disclosure can be selected from the group consisting of inflammatory T-lymphocytes, cytotoxic T-lymphocytes, regulatory T-lymphocytes, Mucosal-Associated Invariant T cells (MAIT), Yδ T cell, tumour infiltrating lymphocyte (TILs) or helper T-lymphocytes included both type 1 and 2 helper T cells and Thl7 helper cells. In another embodiment, said cell can be derived from the group consisting of CD4⁺ T-lymphocytes and CD8⁺ T-lymphocytes. Said immune cells may originate from a healthy donor or from a subject suffering from a cancer, or a tumor.

[0302] Immune cells can be extracted from blood or derived from stem cells. The stem cells can be adult stem cells, embryonic stem cells, more particularly non-human stem cells, cord blood stem cells, progenitor cells, bone marrow stem cells, induced pluripotent stem cells, totipotent stem cells or hematopoietic stem cells. Representative human cells are CD34⁺ cells.

[0303] T-cells can be obtained from a number of non-limiting sources, including peripheral blood mononuclear cells, bone marrow, lymph node tissue, cord blood, thymus tissue, tissue from a site of infection, ascites, pleural effusion, spleen tissue, and tumors. In certain embodiments, T-cells can be obtained from a unit of blood collected from a subject using any number of techniques known to the skilled person, such as FICOLL™ separation. In one embodiment, cells from the circulating blood of a subject are obtained by apheresis. In certain embodiments, T-cells are isolated from PBMCs. PBMCs may be isolated from buffy coats obtained by density gradient centrifugation of whole blood, for instance centrifugation through a LYMPHOPREP™ gradient, a PERCOLL™ gradient or a FICOLL™ gradient. T-cells may be isolated from PBMCs by depletion of the monocytes, for instance by using CD14 DYNABEADS®. In some embodiments, red blood cells may be lysed prior to the density gradient centrifugation.

[0304] In another embodiment, said cell can be derived from a healthy donor, from a subject diagnosed with cancer or tumor, notably with glioblastoma. The cell can be autologous or allogeneic.

[0305] In allogeneic immune cell therapy, immune cells are collected from healthy donors, rather than the patient. Typically these are HLA matched to reduce the likelihood of graft vs. host disease. Alternatively, universal ‘off the shelf’ products that may not require HLA matching comprise modifications designed to reduce graft vs. host disease, such as disruption or removal of the TCRαβ receptor. See Graham et al., Cells. 2018 October; 7(10): 155 for a review. Because a single gene encodes the alpha chain (TRAC) rather than the two genes encoding the beta chain, the TRAC locus is a typical target for removing or disrupting TCRa (3 receptor expression. Alternatively, inhibitors of TCRαβ signalling may be expressed, e.g. truncated forms of CD3ζ can act as a TCR inhibitory molecule. Disruption or removal of HLA class I molecules has also been employed. For example, Torikai et al., Blood. 2013; 122:1341-1349 used ZFNs to knock out the HLA-A locus, while Ren et al., Clin. Cancer Res. 2017; 23:2255-2266 knocked out Beta-2 microglobulin (B2M), which is required for HLA class I expression. Ren et al. simultaneously knocked out TCRαβ, B2M and the immune-checkpoint PD1. Generally, the immune cells are activated and expanded to be utilized in the adoptive cell therapy. The immune cells as herein disclosed can be expanded in vivo or ex vivo. The immune cells, in particular T-cells can be activated and expanded generally using methods known in the art. Generally, the T-cells are expanded by contact with a surface having attached thereto an agent that stimulates a CD3/TCR complex associated signal and a ligand that stimulates a co-stimulatory molecule on the surface of the T cells.

[0306] In one embodiment of the present disclosure, the immune cell can be modified to be directed to tumor neoantigenic peptides as previously defined. In a particular embodiment, said immune cell may express a recombinant antigen receptor directed to said neoantigenic peptide its cell surface. By “recombinant” is meant an antigen receptor which is not encoded by the cell in its native state, i.e., it is heterologous, non-endogenous. Expression of the recombinant antigen receptor can thus be seen to introduce new antigen specificity to the immune cell, causing the cell to recognise and bind a previously described peptide. The antigen receptor may be isolated from any useful source. In some embodiments, the cells comprise one or more nucleic acids introduced via genetic engineering that encode one or more antigen receptors, wherein the antigen include at least one tumor neoantigenic peptide as per the present disclosure.

[0307] Among the antigen receptors as per the present disclosure are genetically engineered T cell receptors (TCRs) and components thereof, as well as functional non-TCR antigen receptors, such as chimeric antigen receptors (CAR) as previously described.

[0308] Methods by which immune cells can be genetically modified to express a recombinant antigen receptor are well known in the art. A nucleic acid molecule encoding the antigen receptor may be introduced into the cell in the form of e.g.: a vector, or any other suitable nucleic acid construct. Vectors, and their required components, are well known in the art. Nucleic acid molecules encoding antigen receptors can be generated using any method known in the art, e.g.: molecular cloning using PCR. Antigen receptor sequences can be modified using commonly used methods, such as site-directed mutagenesis.

[0309] The present disclosure also relates to a method for providing a T cell population which targets a tumor neoantigenic peptide as herein disclosed.

[0310] The T cell population may comprise CD8⁺ T cells, CD4⁺ T cells or CD8⁺ and CD4⁺ T cells.

[0311] T cell populations produced in accordance with the present disclosure may be enriched with T cells that are specific to, i.e.: target, the tumor neoantigenic peptide of the present disclosure. That is, the T cell population that is produced in accordance with the present disclosure will have an increased number of T cells that target one or more tumor neoantigenic peptide. For example, the T cell population of the disclosure will have an increased number of T cells that target a tumor neoantigenic peptide compared with the T cells in the sample isolated from the subject. That is to say, the composition of the T cell population will differ from that of a “native” T cell population (i.e.: a population that has not undergone the identification and expansion steps discussed herein), in that the percentage or proportion of T cells that target a tumor neoantigenic peptide will be increased.

[0312] T cell populations produced in accordance with the present disclosure may be enriched with T cells that are specific to, i.e.: target, tumor neoantigenic peptide. That is, the T cell population that is produced in accordance with the present disclosure will have an increased number of T cells that target one or more tumor neoantigenic peptide of the present disclosure. For example, the T cell population of the present disclosure will have an increased number of T cells that target a tumor neoantigenic peptide compared with the T cells in the sample isolated from the subject. That is to say, the composition of the T cell population will differ from that of a “native” T cell population (i.e.: a population that has not undergone the identification and expansion steps discussed herein), in that the percentage or proportion of T cells that target a tumor neoantigenic peptide will be increased.

[0313] The T cell population according to the present disclosure may have at least about 0.2, 0.3, 0.4, 0.5, 0.6, 0.7, 0.8, 0.9, 1, 2, 3, 4, 5, 6, 7, 8, 9, 10, 11, 12, 13, 14, 15, 16, 17, 18, 19, 20, 25, 30, 35, 40, 45, 50, 55, 60, 65, 70, 75, 80, 85, 90, 95 or 100% T cells that target a tumor neoantigenic peptide as herein disclosed. For example, the T cell population may have about 0.2%-5%, 5%-10%, 10⁻²⁰%, 20-30%, 30-40%, 40-50%, 50-70% or 70-100% T cells that target a tumor neoantigenic peptide of the present disclosure.

[0314] An expanded population of tumor neoantigenic peptide-reactive T cells may have a higher activity than a population of T cells not expanded, for example, using a tumor neoantigenic peptide. Reference to “activity” may represent the response of the T cell population to restimulation with a tumor neoantigenic peptide, e.g.: a peptide corresponding to the peptide used for expansion, or a mix of tumor neoantigenic peptide. Suitable methods for assaying the response are known in the art. For example, cytokine production may be measured (e.g.: IL2 or IFNγ production may be measured). The reference to a “higher activity” includes, for example, a 1-5, 5-10, 10-20, 20-50, 50-100, 100-500, 500-1000-fold increase in activity. In one aspect the activity may be more than 1000-fold higher.

[0315] In some embodiments, the present disclosure provides a plurality of T cells or a population of T cells wherein said plurality, or population, of T cells comprises at least a T cell which recognizes a clonal tumor neoantigenic peptide and at least another T cell which recognizes a different clonal tumor neoantigenic peptide. As such, the present disclosure provides a plurality of T cells which recognize different clonal tumor neoantigenic peptides. Different T cells in the plurality or population may alternatively have different TCRs which recognize the same tumor neoantigenic peptide.

[0316] In some embodiments the number of clonal tumor neoantigenic peptides recognized by the plurality of T cells is from 2 to 1000. For example, the number of clonal neo-antigens recognized may be 2, 3, 4, 5, 6, 7, 8, 9, 10, 20, 50, 100, 150, 200, 250, 300, 350, 400, 450, 500, 550, 600, 650, 700, 750, 800, 850, 900, 950 or 1000, preferably 2 to 100. There may be a plurality of T cells with different TCRs, but which recognize the same clonal neo-antigen.

[0317] The T cell population may be all or primarily composed of CD8⁺ T cells, or all or primarily composed of a mixture of CD8⁺ T cells and CD4⁺ T cells or all or primarily composed of CD4⁺ T cells.

[0318] In particular embodiments, the T cell population is generated from T cells isolated from a subject with a tumor. For example, the T cell population may be generated from T cells in a sample isolated from a subject with a tumor. The sample may be a tumor sample, a peripheral blood sample or a sample from other tissues of the subject.

[0319] In a particular embodiment the T cell population is generated from a sample from the tumor in which the tumor neoantigenic peptide is identified. In other words, the T cell population is isolated from a sample derived from the tumor of a patient to be treated. Such T cells are referred to herein as “tumor infiltrating lymphocytes” (TILs).

[0320] T cells may be isolated using methods which are well known in the art. For example, T cells may be purified from single cell suspensions generated from samples, based on expression of CD3*, CD4⁺ or CD8⁺ T cells, may be enriched from samples by passage through a Ficoll-plaque gradient.

### Cancer Therapeutic and Diagnostic Methods

[0321] In any of the embodiments, the Cancer Therapeutic Products described herein may be used in methods for inhibiting proliferation of cancer cells. The Cancer Therapeutic Products described herein may also be used in the treatment of cancer or tumor as previously listed, or for the prophylactic treatment of such cancer, in patients at risk of such cancer or tumor.

[0322] Cancers that can be treated using the therapy described herein include any solid or non-solid tumors. In a specific embodiment of the present disclosure, the tumor is glioblastoma.

[0323] Cancers includes also the cancers which are refractory to treatment with other chemotherapeutics. The term “refractory”, as used herein refers to a cancer (and/or metastases thereof), which shows no or only weak antiproliferative response (e.g., no, or only weak inhibition of tumor growth) after treatment with another chemotherapeutic agent. These are cancers that cannot be treated satisfactorily with other chemotherapeutics. Refractory cancers encompass not only (i) cancers where one or more chemotherapeutics have already failed during treatment of a patient, but also (ii) cancers that can be shown to be refractory by other means, e.g., biopsy and culture in the presence of chemotherapeutics.

[0324] The therapy described herein is also applicable to the treatment of patients in need thereof who have not been previously treated.

[0325] A subject as per the present disclosure is typically a patient in need thereof that has been diagnosed with tumor. The subject is typically a mammal, notably a human, dog, cat, horse, or any animal in which a tumor specific immune response is desired.

[0326] The present disclosure also pertains to a neoantigenic peptide, a population of APCs, a vaccine or immunogenic composition, a polynucleotide encoding a neoantigenic peptide or a vector as previously defined for use in cancer vaccination therapy of a subject or for treating cancer in a subject, wherein the peptide(s) binds at least one MHC molecule of said subject.

[0327] The present disclosure also provides a method for treating cancer in a subject, comprising administering a vaccine or immunogenic composition as described herein to said subject in a therapeutically effective amount to treat the subject. The method may additionally comprise the step of identifying a subject who has a cancer or a tumor, notably a glioblastoma.

[0328] The present disclosure also relates to a method of treating cancer, typically a glioblastoma, comprising producing an antibody or antigen-binding fragment thereof by the method as herein described and administering to a subject with cancer, or tumor said antibody or antigen-binding fragment thereof, or with an immune cell expressing said antibody or antigen-binding fragment thereof, in a therapeutically effective amount to treat said subject.

[0329] The present disclosure also relates to an antibody (including variants and derivatives thereof), a T cell receptor (TCR) (including variants and derivatives thereof), or a CAR (including variants and derivatives thereof) which are directed against a tumor neoantigenic peptide as herein described, optionally in association with an MHC or HLA molecule, for use in cancer therapy of a subject, notably glioblastoma therapy, wherein the tumor neoantigenic peptide binds at least one MHC molecule of said subject.

[0330] The present disclosure also relates to an antibody (including variants and derivatives thereof), a T cell receptor (TCR) (including variants and derivatives thereof), or a CAR (including variants and derivatives thereof) which are directed against a tumor neoantigenic peptide as herein described, optionally in association with an MHC or HLA molecule, or an immune cell which targets a neoantigenic peptide, as previously defined, for use in adoptive cell or CAR-T cell therapy in a subject, wherein the tumor neoantigenic peptide binds at least one MHC molecule of said subject.

[0331] Typically, the skilled person is able to select an appropriate antigen receptor which binds and recognizes a tumor neoantigenic peptide as previously defined with which to redirect an immune cell to be used for use in cancer cell therapy, notably glioblastoma cell therapy. In a particular embodiment, the immune cell for use in the method of the present disclosure is a redirected T-cell, e.g., a redirected CD8⁺ and/or CD4⁺ T-cell.

[0332] The inventors herein provide a method for identifying or screening population specific TE-signature, and in particular tumor cell specific TE-signature. This discovery has strong potentials in diagnostic. Indeed, it provides tumor-specific biomarkers that are shared among patients and that can differentiate neoplastic cells from other cell populations from the core tumor and/or the tumor microenvironment but also neoplastic cells from different type of tumors.

[0333] The present disclosure therefore also encompasses a method for the diagnostic of a tumor, such as for example a glioblastoma. Said method comprises the identification, as per the method as herein disclosed, in a tumor sample obtained from a patient a tumor cell specific TE signature as herein defined.

[0334] The present application also encompasses a method for treating a patient suffering from a tumor, notably suffering from a tumor associated with de-repressed TEs, notably suffering from glioblastoma tumor comprising a step of diagnosing said tumor as per the method as above defined and a step of administering a treatment dedicated to the identified tumor.

[0335] In some embodiment, the present application relates to a method for treating a patient suffering from a tumor, notably suffering from a tumor associated with de-repressed TEs, notably suffering from a glioblastoma tumor, comprising (i) a step of diagnosing said tumor as per the method as above defined and (ii) a step of administering any one or a combination of the cancer therapeutic products described herein.

[0336] In some embodiments, cancer treatment, vaccination therapy and/or adoptive cell cancer therapy as above described are administered in combination with additional cancer therapies. In some embodiments, cancer treatment, vaccination therapy and/or adoptive cell cancer therapy as above described are administered in combination with targeted therapy, immunotherapy such as immune checkpoint therapy and immune checkpoint inhibitor, co-stimulatory antibodies, chemotherapy and/or radiotherapy.

[0337] Immune checkpoint therapy such as checkpoint inhibitors include, but are not limited to programmed death-1 (PD-1) inhibitors, programmed death ligand-1 (PD-L1) inhibitors, programmed death ligand-2 (PD-L2) inhibitors, lymphocyte-activation gene 3 (LAG3) inhibitors, T-cell immunoglobulin and mucin-domain containing protein 3 (TIM-3) inhibitors, T cell immunoreceptor with Ig and ITIM domains (TIGIT) inhibitors, B- and T-lymphocyte attenuator (BTLA) inhibitors, V-domain Ig suppressor of T-cell activation (VISTA) inhibitors, cytotoxic T-lymphocyte-associated protein 4 (CTLA4) inhibitors, Indoleamine 2,3-dioxygenase (IDO) inhibitors, killer immunoglobulin-like receptors (KIR) inhibitors, KIR2L3 inhibitors, KIR3DL2 inhibitors and carcinoembryonic antigen-related cell adhesion molecule 1 (CEACAM-1) inhibitors. In particular, checkpoint inhibitors include antibodies anti-PD1, anti-PD-L1, anti-CTLA-4, anti-TIM-3, anti-LAG3. Co-stimulatory antibodies deliver positive signals through immune-regulatory receptors including but not limited to ICOS, CD137, CD27, OX-40 and GITR.

[0338] Example of anti-PD1 antibodies include, but are not limited to, nivolumab, cemiplimab (REGN2810 or REGN-2810), tislelizumab (BGB-A317), tislelizumab, spartalizumab (PDR001 or PDR-001), ABBV-181, JNJ-63723283, BI 754091, MAG012, TSR-042, AGEN2034, pidilizumab, nivolumab (ONO-4538, BMS-936558, MDX1106, GTPL7335 or Opdivo), pembrolizumab (MK-3475, MK03475, lambrolizumab, SCH-900475 or Keytruda) and antibodies described in International patent applications WO2004004771, WO2004056875, WO2006121168, WO2008156712, WO2009014708, WO2009114335, WO2013043569 and WO2014047350.

[0339] Example of anti-PD-L1 antibodies include, but are not limited to, LY3300054, atezolizumab, durvalumab and avelumab.

[0340] Example of anti-CTLA-4 antibodies include, but are not limited to, ipilimumab (see, e.g., US patents U.S. Pat. Nos. 6,984,720 and 8,017,114), tremelimumab (see, e.g., US patents U.S. Pat. Nos. 7,109,003 and 8,143,379), single chain anti-CTLA4 antibodies (see, e.g., International patent applications WO1997020574 and WO2007123737) and antibodies described in US patent U.S. Pat. No. 8,491,895.

[0341] Example of anti-VISTA antibodies are described in US patent application US20130177557.

[0342] Example of inhibitors of the LAG3 receptor are described in US patent U.S. Pat. No. 5,773,578.

[0343] Example of KIR inhibitor is IPH4102 targeting KIR3DL2.

[0344] As used herein, the term “chemotherapy” has its general meaning in the art and refers to the treatment that consists in administering to the patient a chemotherapeutic agent. A chemotherapeutic entity as used herein refers to an entity which is destructive to a cell, that is the entity reduces the viability of the cell. The chemotherapeutic entity may be a cytotoxic drug. Chemotherapeutic agents include, but are not limited to alkylating agents such as thiotepa and cyclosphosphamide; alkyl sulfonates such as busulfan, improsulfan and piposulfan; aziridines such as benzodopa, carboquone, meturedopa, and uredopa; ethylenimines and methylamelamines including altretamine, triethylenemelamine, trietylenephosphoramide, triethiylenethiophosphoramide and trimethylolomelamine; acetogenins (especially bullatacin and bullatacinone); a camptothecin (including the synthetic analogue topotecan); bryostatin; callystatin; CC-1065 (including its adozelesin, carzelesin and bizelesin synthetic analogues); cryptophycins (particularly cryptophycin 1 and cryptophycin 8); dolastatin; duocarmycin (including the synthetic analogues, KW-2189 and CB1-TM1); eleutherobin; pancratistatin; a sarcodictyin; spongistatin; nitrogen mustards such as chlorambucil, chlornaphazine, cholophosphamide, estramustine, ifosfamide, mechlorethamine, mechlorethamine oxide hydrochloride, melphalan, novembichin, phenesterine, prednimustine, trofosfamide, uracil mustard; nitrosureas such as carmustine, chlorozotocin, fotemustine, lomustine, nimustine, and ranimnustine; antibiotics such as the enediyne antibiotics (e.g., calicheamicin, especially calicheamicin gammall and calicheamicin omegall; dynemicin, including dynemicin A; bisphosphonates, such as clodronate; an esperamicin; as well as neocarzinostatin chromophore and related chromoprotein enediyne antiobiotic chromophores, aclacinomysins, actinomycin, authrarnycin, azaserine, bleomycins, cactinomycin, carabicin, caminomycin, carzinophilin, chromomycinis, dactinomycin, daunorubicin, detorubicin, 6-diazo-5-oxo-L-norleucine, doxorubicin (including morpholino-doxorubicin, cyanomorpholino-doxorubicin, 2—pyrrolino-doxorubicin and deoxy doxorubicin), epirubicin, esorubicin, idarubicin, marcellomycin, mitomycins such as mitomycin C, mycophenolic acid, nogalamycin, olivomycins, peplomycin, potfiromycin, puromycin, quelamycin, rodorubicin, streptonigrin, streptozocin, tubercidin, ubenimex, zinostatin, zorubicin; anti-metabolites such as methotrexate and 5-fluorouracil (5-FU); folic acid analogues such as denopterin, methotrexate, pteropterin, trimetrexate; purine analogs such as fludarabine, 6-mercaptopurine, thiamiprine, thioguanine; pyrimidine analogs such as ancitabine, azacitidine, 6-azauridine, carmofur, cytarabine, dideoxyuridine, doxifluridine, enocitabine, floxuridine; androgens such as calusterone, dromostanolone propionate, epitiostanol, mepitiostane, testolactone; anti-adrenals such as aminoglutethimide, mitotane, trilostane; folic acid replenisher such as frolinic acid; aceglatone; aldophosphamide glycoside; aminolevulinic acid; eniluracil; amsacrine; bestrabucil; bisantrene; edatraxate; defofamine; demecolcine; diaziquone; elformithine; elliptinium acetate; an epothilone; etoglucid; gallium nitrate; hydroxyurea; lentinan; lonidainine; maytansinoids such as maytansine and ansamitocins; mitoguazone; mitoxantrone; mopidanmol; nitraerine; pentostatin; phenamet; pirarubicin; losoxantrone; podophyllinic acid; 2-ethylhydrazide; methylhydrazine derivatives including N-methylhydrazine (MIH) and procarbazine; PSK polysaccharide complex); razoxane; rhizoxin; sizofuran; spirogermanium; tenuazonic acid; triaziquone; 2,2′,2″-trichlorotriethylamine; trichothecenes (especially T-2 toxin, verracurin A, roridin A and anguidine); urethan; vindesine; dacarbazine; mannomustine; mitobronitol; mitolactol; pipobroman; gacytosine; arabinoside (“Ara-C”); cyclophosphamide; thiotepa; taxoids, e.g., paclitaxel and doxetaxel; chlorambucil; gemcitabine; 6-thioguanine; mercaptopurine; methotrexate; platinum coordination complexes such as cisplatin, oxaliplatin and carboplatin; vinblastine; platinum; etoposide (VP− 16); ifosfamide; mitoxantrone; vincristine; vinorelbine; novantrone; teniposide; edatrexate; daunomycin; aminopterin; xeloda; ibandronate; irinotecan (e.g., CPT-1 1); topoisomerase inhibitor RFS 2000; difluoromethylomithine (DMFO); retinoids such as retinoic acid; capecitabine; anthracyclines, nitrosoureas, antimetabolites, epipodophylotoxins, enzymes such as L-asparaginase; anthracenediones; hormones and antagonists including adrenocorticosteroid antagonists such as prednisone and equivalents, dexamethasone and aminoglutethimide; progestin such as hydroxyprogesterone caproate, medroxyprogesterone acetate and megestrol acetate; estrogen such as diethylstilbestrol and ethinyl estradiol equivalents; antiestrogen such as tamoxifen; androgens including testosterone propionate and fluoxymesterone/equivalents; antiandrogens such as flutamide, gonadotropin-releasing hormone analogs and leuprolide; and non-steroidal antiandrogens such as flutamide; biological response modifiers such as IFNa, IL-2, G-CSF and GM-CSF; and pharmaceutically acceptable salts, acids or derivatives of any of the above.

[0345] Suitable examples of radiation therapies include, but are not limited to external beam radiotherapy (such as superficial X-rays therapy, orthovoltage X-rays therapy, megavoltage X-rays therapy, radiosurgery, stereotactic radiation therapy, Fractionated stereotactic radiation therapy, cobalt therapy, electron therapy, fast neutron therapy, neutron-capture therapy, proton therapy, intensity modulated radiation therapy (IMRT), 3-dimensional conformal radiation therapy (3D-CRT) and the like); brachytherapy; unsealed source radiotherapy; tomotherapy; and the like. Gamma rays are another form of photons used in radiotherapy. Gamma rays are produced spontaneously as certain elements (such as radium, uranium, and cobalt 60) release radiation as they decompose, or decay. In some embodiments, radiotherapy may be proton radiotherapy or proton minibeam radiation therapy. Proton radiotherapy is an ultra-precise form of radiotherapy that uses proton beams (Prezado Y, Jouvion G, Guardiola C, Gonzalez W, Juchaux M, Bergs J, Nauraye C, Labiod D, De Marzi L, Pouzoulet F, Patriarca A, Dendale R. Tumor Control in RG2 Glioma-Bearing Rats: A Comparison Between Proton Minibeam Therapy and Standard Proton Therapy. Int J Radiat Oncol Biol Phys. 2019 Jun. 1; 104(2):266-271. doi: 10.1016/j.ijrobp.2019.01.080; Prezado Y, Jouvion G, Patriarca A, Nauraye C, Guardiola C, Juchaux M, Lamirault C, Labiod D, Jourdain L, Sebrie C, Dendale R, Gonzalez W, Pouzoulet F. Proton minibeam radiation therapy widens the therapeutic index for high-grade gliomas. Sci Rep. 2018 Nov. 7; 8(1):16479. doi: 10.1038/s41598-018-34796-8). Radiotherapy may also be FLASH radiotherapy (FLASH-RT) or FLASH proton irradiation. FLASH radiotherapy involves the ultra-fast delivery of radiation treatment at dose rates several orders of magnitude greater than those currently in routine clinical practice (ultra-high dose rate) (Favaudon V, Fouillade C, Vozenin M C. The radiotherapy FLASH to save healthy tissues. Med Sci (Paris) 2015; 31: 121-123. DOI: 10.1051/medsci/20153102002); Patriarca A., Fouillade C. M., Martin F., Pouzoulet F., Nauraye C., et al. Experimental set-up for FLASH proton irradiation of small animals using a clinical system. Int J Radiat Oncol Biol Phys, 102 (2018), pp. 619-626. doi: 10.1016/j.ijrobp.2018.06.403. Epub 2018 Jul. 11).

[0346] “In combination” may refer to administration of the additional therapy before, at the same time as or after administration of the T cell composition according to the present disclosure.

[0347] In addition, or as an alternative to the combination with checkpoint blockade, the T cell composition of the present disclosure may also be genetically modified to render them resistant to immune-checkpoints using gene-editing technologies including but not limited to TALEN and Crispr/Cas. Such methods are known in the art, see e.g.: US20140120622. Gene editing technologies may be used to prevent the expression of immune checkpoints expressed by T cells (see the above listed checkpoint inhibitors) and more particularly but not limited to PD-1, Lag-3, Tim-3, TIGIT, BTLA CTLA-4 and combinations of these. The T cell as discussed here may be modified by any of these methods.

[0348] The T cell according to the present disclosure may also be genetically modified to express molecules increasing homing into tumors and or to deliver inflammatory mediators into the tumor microenvironment, including but not limited to cytokines, soluble immune-regulatory receptors and/or ligands.

[0349] In some embodiments, a tumor neoantigenic peptide of the present disclosure is used in cancer vaccination therapy in combination with another immunotherapy such as immune checkpoint therapy, more particularly in combination with anti-checkpoint antibodies such as the above exemplified antibodies and notably but not limited to the anti-PD1, anti-PDL1, anti-CTLA-4, anti-TIM-3, anti-LAG3, anti-GITR antibodies.

[0350] The present disclosure also encompasses the use of a tumor cell TE signature as defined herein, as a cancer cell biomarker, and/or as a biomarker for immune checkpoint therapy efficacy. In some embodiments, the cancer is glioblastoma and the tumor cell TE-signature comprises SEQ ID NO: 1 to 5020 and is thus a glioblastoma biomarker. In some particular embodiments, the cancer is glioblastoma and the tumor cell TE-signature comprises SEQ ID NO: 1 to 26, 28 to 5020; preferably SEQ ID NO: 1 to 10; 12 to 26, 28 to 430 and 432 to 5020; more preferably SEQ ID NO: 1 to 10, 12 to 26, 28 to 57, 59 to 242, 244 to 255, 257 to 319, 321 to 393, 395 to 430 and 432 to 5020 and is thus a glioblastoma biomarker.

[0351] The ability to distinguish self from non-self is a central principle of immunity. Invading pathogens must be recognized as non-self to trigger an adequate response while self-antigens must be tolerated to avoid autoimmunity. Innate detection of pathogens depends on the recognition of pathogen associated molecular patterns (PAMP) by pattern recognition receptors (PRR). Recognition of foreign nucleic acid is a key step in sensing of pathogens, however, host nucleic acid sensors recognise nucleic acid in a non-sequence-specific way. The fact that nucleic acid sensing is not sequence specific blurs the fundamental distinction between self and non-self. Indeed, expression of TEs can generate nucleic acids that act as endogenous PAMPs and possibly drive deleterious immune responses. The triggering of the immune system by an infectious virus antigenically similar to an endogenous retroviral protein could elicit such an autoimmune response. This possibility was also illustrated by the loss of tolerance to an endogenous viral protein in a transgenic mouse after virus infection (see Benihoud K et al., Oncogene (2002) 21, 5593-5600).

[0352] Accordingly, there is increasing evidence of a relationship between autoimmune and/or inflammation manifestations and the presence of endogenous or exogenous retroviral sequences. Systemic autoimmune diseases are characterized by defects in immune tolerance to self-antigens, which could include products of endogenous retroviral sequences and retrotransposons. (Herrmann M et al., (1998). Curr. Opin. Rheumatol., 10, 347-354.; Nakagawa K and Harrison L C. (1996). Immunol. Rev., 152, 193-236; C. A. Thomas et al., Cell stem cell 21, 319-331.e318 (2017), Tokuyama, Maria et al. “PNAS vol. 115, 50 (2018): 12565-12572; Zhang X, Zhang R, Yu J., Front Cell Dev Biol. 2020; 8:657. Published 2020 Aug. 7)).

[0353] In this context, TE-derived peptides of the present disclosure may be used in tolerance-inducing cellular therapies involving vaccination with or induction of tolerogenic DCs (tolDC) or regulatory T cells (Tregs). Such cellular therapies have indeed gained considerable interest for the treatment and or the prevention of autoimmune diseases (see Flórez-Grau, Georgina et al. “Tolerogenic Dendritic Cells as a Promising Antigen-Specific Therapy in the Treatment of Multiple Sclerosis and Neuromyelitis Optica From Preclinical to Clinical Trials.” Frontiers in immunology vol. 9 1169. 31 May. 2018; and Cauwels, Anje, and Jan Tavernier. “Tolerizing Strategies for the Treatment of Autoimmune Diseases: From ex vivo to in vivo Strategies.” Frontiers in immunology vol. 11 674. 14 May. 2020). Well-suited TE-derived peptides as per the present disclosure include peptides of any one of SEQ ID NO: 3 to 8, 10, 12, 14 to 17, 19 to 21, 24 to 26, 28, 29, 33, 34, 37, 41, 43, 44, 46, 47, 51 to 53, 55, 56, 59, 62, 67, 69, 74, 75, 77, 80, 81, 84 to 87, 90, 92, 96, 97, 99 to 103, 108, 109, 112, 113, 116, 125, 128 to 130, 132, 134 to 137, 140, 142, 145 to 149, 154, to 156, 158, 160, 163, 166, 168 to 171, 174 to 176, 178, 183 to 187, 189, 191, 192, 194 to 197, 200 to 205, 207, 209 to 211, 213, 216, 219 to 221, 224 to 227, 229 to 237, 240 to 242, 247, 249, 250, 252, 254, 255, 258, 261, 263, 264, 266, 268 to 274, 276, 278, 280, 284, 289, 293, 303, 306, 308 to 310, 316, 319, 321, 322, 324, 327, 330, 332, 336, 338 to 342, 345, 347 to 349, 351, 357, 358, 363, 364, 366 and 368 (redundant; see Table 3), notably SEQ ID: 3 to 7, 10, 12, 14 to 17, 19 to 21, 24 to 26, 28, 29, 33, 34, 37, 41, 43, 46, 52 to 53, 55, 56, 59, 62, 69, 74, 75, 77, 80, 92, 97, 99 to 102, 108, 109, 112, 113, 116, 128 to 130, 132, 134 to 137, 142, 145, 146, 148, 149, 154, to 156, 160, 163, 166, 168 to 171, 174 to 176, 178, 183 to 187, 189, 191, 194 to 197, 200 to 205, 207, 209 to 211, 213, 216, 219, 221, 224 to 227, 229 to 237, 240 to 242, 247, 249, 250, 252, 255, 261, 263, 266, 268, 271, 273, 274, 276, 278, 280, 284, 293, 303, 306, 308 to 310, 316, 319, 324, 327, 332, 336, 338 to 342, 345, 348, 349, 357, 358, 363, and 368 (redundant group 1; see Table 3) which are redundantly expressed by numerous TEs in the genome (typically that are encoded by more than 200 genomic TE occurrences). Typically, such TE-encoded peptides are not tumor specific. In some embodiments, the TE-derived peptides are LINE-1 peptides, in particular young L1HS, L1PAx- and L1PBx-derived peptides.

[0354] In some embodiments, the expression of one or more TEs (notably encoding the peptides as above mentioned) or preferably a combination thereof can be used as a biomarker for immune disease diagnosis.

### EXAMPLES

### Materials and Methods

### Transposable Elements Annotations

### Classification and TE Metadata

[0355] Transposable Elements annotations have been retrieved two different databases: from Homer repeats gtf annotation file (v4.11.1) based on hg19 (v6.4) UCSC annotations; from TEtranscript (Jin et al., 2015, doi: 10.1093/bioinformatics/btv422. Epub 2015 Jul. 23.) hg19 gtf annotation file. Both annotations are based on RepeatMasker database and have been merged based on identical coordinates to obtain following information on each repeat: Class, Family, Subfamily, Divergence, coordinates). L1 family was subdivided into 2 families: (1) L1PA/B/x that include TEs from closely related L1HS, L1PA (x), L1PB(x), L1P(x) subfamilies; (2) Other L1 regrouping all other L1 TEs that are not present in L1PA/B/x. All DNA transposons TEs were classified as DNA. annotatePeaks.pl from Homer was performed to obtain genomic locations (intron, exon, 3′UTR, 5′UTR, intergenic, other) for each individual TE. closest and intersect tools from bedtools (v2.29.2) have been used to retrieved for each TE, distance from closest protein-coding genes from gencode gtf annotation file (Release 19 GRCh37.p13).

### Age of TEs

[0356] Repeat age was calculated using percentage of divergence with following formula for human repeats: Divergence/(2.2*10-9), following as the formula from this article (Choudhary et al., Genome Biol, 2020, 21, 16).

### Intact ORFs

[0357] Intact open reading frame (ORF) locations were retrieved from gEVE database (Nakagawa, S., and Takahashi, M. U. Database (Oxford) 2016). As analyses were performed on human genome version hg19, hg38 gEVE annotations were formatted and adjusted for hg19 using “Lift Genome annotations” tools from UCSC available here: https://genome.ucsc.edu/cgi-bin/hgLiftOver. Coordinates from intact ORFs from gEVE annotations and from all individual TEs from the genome were matched to assign an intact ORF to individual TEs in case of coordinates overlap. 30517 individual TEs overlapped an intact ORF with most of them being L1 (mostly L1PA/B/x) and ERV (mostly ERV1, ERVK, ERVL) elements. To identify amino acid sequence similarity between canonical TE proteins from gEVE database and peptides from immunopeptidomics results, a blastp was perfomed between gEVE protein sequences and the immunopeptidomics sequences. No threshold on Evalue was set and similarity was estimated and classified in 3 categories: (1) 100% match: no mismatch, no gap and query coverage per HSP to 100%; (2) At most 1 mismatch: 1 mismatch, no gap and query coverage per HSP above 85%; (3) At most 2 mismatches: 2 mismatches, no gap and query coverage per HSP above 85%.

### Retrieving TE Nucleotide Sequence

[0358] getfasta (bedtools version 2.30.0) was used to obtain the fasta sequence from each TE. Due to getfasta processing step, first nucleotide is not taken into account, thus the length of sequence is minus 1 nucleotide.

### Analysis of Known TE Proteins

### LTR and LINE Proteins

[0359] LTR TEs coding for peptides overlapping an intact ORF were classified as Env, Gag, Pol or Pro using RetroTector annotations from gEVE. For LINE elements, a blastp was performed between LINE-derived peptides and either ORFIp and ORF2p protein sequences found in Uniprot (accession numbers Q9UN81 and 000370). Allowing at most 1 mismatch, 28 hits from either ORFIp and ORF2p were identified among our LINE-derived peptides. LINE and LTR TEs coding for a peptide were also compared to gEVE HMM profile annotations in order to classify the TE protein motif found in those TEs.

### TE ORF Annotations

[0360] A homemade R script was used to identify and annotate ORFs from TEs sequence. In details: (1) TE nucleotide sequences were formatted to obtain 6 frames using R package Biostrings (v2.58.0) and its function DNAStringSet and reverseComplement; (2) sequences from 6 frames were translated with translate function from Biostrings; (3) Stop codons and methionine were detected using matchPDict function from Biostrings; (4) Peptides from immunopeptidomics results were also found using matchPDict function; (5) ORFik R package (v1.10.13) was used to detect ORF with at least 30 bp (3 for start codon, 8AA*3 for sequence, 3 for stop codon) and keep only the longest ORF. Two different start codons pattern were submitted to detect ORFs: “ATG” for canonical start codons and “ATG|CTG|GTG|TTG” for canonical and non-canonical start codons. ORFs found only using the second pattern were classified as “CTG|GTG|TTG”; (6) Length of ORFs were calculated using start and end positions; (7) R package ggplot2 was used to represent all identified ORFs, stop codons, methionine and peptides locations in all 5 frames of the TEs.

### Single-Cell Data Analysis

### Downloading Data and Read Alignment to Genome

[0361] Smart-seq2 data (GEO accession number: GSE84465) were downloaded from the Sequence Read Archive (SRA) database using prefetch from SRA Toolkit (v2.10.0). SRA files were converted to fastq files using fastq-dump. Fastq files were 75 bp paired-end unstranded reads. Raw RNA reads were mapped to the human genome sequences (hg19) using the 2—pass mode of STAR (version 2.7.1.a) (parameters: —quantMode GeneCounts, —twopassMode Basic, —alignSJDBoverhangMin 1, —bamRemoveDuplicatesType UniqueIdentical, —winAnchorMultimapNmax 1000, —outFilterMultimapNmax 1000, —outFilterScoreMinOverLread 0.33, —outFilterMatchNminOverLread 0.33, —outFilterMismatchNoverLmax 0.04, —outMultimapperOrder Random, —sjdbOverhang 76).

### Quantification of Genes and TE Expression

[0362] To compute quantification of TE and gene expression, featureCounts from Subread (v1.6.4) was computed on each genome-mapped reads files. Different parameters were used depending on the analysis: (1) for gene expression: —p—ignoreDup—g gene_id using gencode gtf annotation file; (2) for TEs expression on individual copies (a) with only uniquely mapping reads: —p—ignoreDup—g transcript_id using TEtranscript hg19 gtf annotation file; (b) with uniquely and multi-mapping reads: —p—ignoreDup—g transcript_id —M—primary (3) for TEs expression on subfamilies with uniquely and multi-mapping reads: —p—ignoreDup—g gene_id —M—primary. Cell count files were merged into a matrix with a homemade python script (Python 3.6).

### Filtering Features and Cells, Normalization, Batch Correction

[0363] Cell metadata and features raw counts matrices were imported to R (version 4.0.3) to create a SingleCellExperiment R object. CPM, FPKM and TPM values on gene and TE expression were calculated on raw counts prior to any filtering using scuttle R package (v1.0.4) and its functions: calculateCPM, calculateFPKM, calculateTPM. Cells with low number of counts and low number of features (3 times lower than MAD) were removed using Scater and Scran packages. Considering the uniquely-mapped reads TE matrix (1): individual TEs with less than 1 count/cell in average were removed [22000 individual TEs remaining]; for multi-mapped reads (2): individual TEs with less than 5 counts in at least 20 cells were removed to take into account expression in small populations [130028 individual TEs]; for gene expression (3): genes with less than 5 counts in at least 20 cells were removed [19867 genes remaining]; for subfamily expression: no filtering was performed [992 subfamilies]. Raw counts matrices were then normalized using logNormCounts function from scater R package. After several verifications, a batch effect linked to the plate ID of the cells was identified. In order to correct it, removeBatchEffect function from limma R package was used providing the plate ID as batch and the cell type as design.

### Dimensionality Reduction

[0364] A single Seurat object was created importing raw, normalized and normalized+corrected features matrices into different assays. CPM, FPKM and TPM matrices were imported as well. Seurat v3 was used for the uniquely mapped reads analysis; Seurat v4 was used for the multi-mapped reads analysis, for the subfamily analysis and the gene analysis. From Seurat, FindVariableFeatures was performed to distinguish the 5000 most variable genes or individual TEs; ScaleData to scale feature expression, RunPCA to compute 75 Principal Components, RunTSNE to perform t-SNE dimension reduction on 50 Principal Components. Dimensionality reduction step was performed on normalized+corrected assay.

### Differential Expression Analysis and Enrichment Tests

[0365] From Seurat, FindAllMarkers was performed on annotated cell types with a threshold of 0.25 foldchange (either natural log with Seurat v3 or log 2 with v4) on features expressed in at least 10% of all cells in 1 cell type. Genes, subfamily and individual TE signatures were designed based on FindAllMarkers results using differentially expressed features with an adjusted p-value lower or equal to 0.05. Signature scores were computed with the Seurat function AddModuleScore using the feature signature of interest. This function calculates for each individual cell the average expression of each feature from the signature, subtracted by the aggregated expression of control feature sets. TE subfamily enrichment was performed using all annotated individual TEs in the genome (4.6 million TEs) as a reference and either all expressed TEs or individual TEs signatures from each population as queries. A hypergeometric test was computed using phyper from stats R package (v4.0.3). Then, a False Discovery Rate correction was applied using p.adjust from stats R package.

### FIGURES

[0366] Most figures were made using R (v4.0.3). Piecharts, lollipop charts, barplots, violin plots, boxplots, jitterplots, volcano plots, density plots, scatter plots and dimensionality reduction plot were made using either ggplot2 R package (v3.3.3) or functions from Seurat package. Pie donut chart was made with PieDonut function from webR package (v0.1.6). Heatmaps were built with Pheatmap R package (v1.0.12) and ComplexHeatmap (v2.6.2). Clustering method used was ward.D2. IGV (v2.8.10) was used to visualize read coverage of bulk-RNA samples.

### Radarplot and Chromosome Distribution

[0367] Radarplots representing feature distribution on chromosomes were made using radarchart function from fmsb R package (v0.7.1). Genomic proportions were calculated using all annotated genes and individual TEs from gencode and TEtranscript annotations respectively.

### Bulk RNA-Seq Data Analysis

### Downloading, Alignment to Genome and Quantification

[0368] Around 50 samples from each GTEx tissue were randomly targeted and their fastq reads files were downloaded using prefetch and fasterq-dump from sratoolkit (v2.10.0). Fastq reads from TCGA-GBM project were downloaded using gdc-client (v1.6.1). Alignment and feature quantification (genes, individual TEs, subfamilies) were done in the same protocol described for the Smart-seq2 analysis. Expression was normalized using estimateSizeFactors from DESeq2 R package (v1.30.1) to obtained normalized counts. TPM values were also computed using calculateTPM function from scuttle. Two subsets of TE expression matrices were obtained for each database: (1) Expression matrices with only TEs from the Neoplastic single-cell TE signatures; (2) Expression matrices with only TEs considered expressed. TEs were considered expressed if we could observe at least 5 counts for 20% of the samples (considering separately either all samples from TCGA or GTEx database). 130640 TEs were retained for the TCGA samples whereas 192243 TEs were kept for the GTEx samples. Among those, 103585 TEs were common to both databases.

### Downstream Analysis Ofbulk RNA-Seq Samples

[0369] Merged neoplastic signature specific matrix with all samples from TCGA and GTEx was imported in a Seurat object. DESeq2 normalized counts and TPM values were both imported. Using normalized counts, ScaleData, RunPCA and RunUMAP were applied to obtain UMAP representations. To assess signature expression in the samples, mean expression of all TEs from the neoplastic signature was done using TPM values.

### Gene Set Enrichment Analysis

[0370] Gene Set Enrichment Analysis (GSEA) was performed using DESeq2 normalized counts matrices of common expressed TEs between TCGA and GTEx databases (103585 TEs) to test enrichment of single-cell neoplastic signature in either Normal or Tumor samples. GSEA (v4.1.0) was running with default parameters. GSEA results were imported to R and ggplot2 was used to made representations.

### Read Coverage

[0371] Mapped-reads bam files from neoplastic single cells, immune single cells, TCGA tumor samples and TCGA normal samples were merged using samtools (v1.9) and its merge function. Merged bam files were indexed using index from samtools. Read coverage was calculated on each merged bam file with bamCoverage from deepTools (v3.3.1) and following parameters: —outFileFormat bigwig—normalizeUsing CPM. Results were visualized with IGV (v2.8.10).

### Peptide Binding to HLA-A*02:01, HLA-B*07:02 and Multimer Formation

[0372] Predicted peptides were synthetized by GeneCust with a purity >98%. HLA-A*0201 monomers were purchased as easYmers from Immunaware (Copenhagen, Denmark). Predicted and mass-spect (MS) TE-derived Peptides binding to HLA-A*0201 was measured as HLA-I-complex formation by FACS following manufacturer's instructions. Briefly, biotinylated monomers were incubated with synthetic peptides (100 mM) at 18° C. during 48h, then bound to streptavidin-coated beads and stained with PE-conjugated anti-β2-microglobulin. As positive control of HLA-I-complex formation we used CMV peptide pp65 495-503 (NLVPMVATV:: SEQ ID NO: 5021), CMV pp⁶⁵ 417-426 (TPRVTGGGAM:: SEQ ID NO: 5022) and CMV IEl 99-107 (RIKEHMLKK:: SEQ ID NO: 5023) for HLA-A*02:01, HLA-B*07:01. Melan-A mutated sequence (ELAGIGILTV:: SEQ ID NO: 5024), a known good binder peptide to HLA-A*0201, was also included as a second positive control of HLA-I-complex formation for this monomer. Binding is represented as percentage of HLA-I-complex formation relative to CMV positive control. Peptides with HLA-I-complex formation of at least 50% relative to positive control were used in in-vitro vaccinations experiments.

[0373] For multimer formation, peptide-HLA-I-complexes were tetramerized using different combinations of streptavidin conjugated to fluorochromes (PE, APC BV421, BV711, PE-CF549 and PECy5) in a final concentration of 8 mg/ml. All tetramers were kept at 4° C. and used within 2 months.

### Multimer Staining and Analysis

[0374] Multimer staining was performed on total cells after in-vitro vaccination experiments by combining 1 μl of each tetramer specificity and two different SA-labelled tetramers per specificity. The staining was performed during 20 min at RT in a final volume of 100 μl of PBS 1% BSA/1M cells. Then, 100 μl of surface antibody mix containing anti-CD3 BV650 and anti-CD8 PECy7 (BD Biosciences) was added at 1/200 final dilution and incubated for further 20 min at 4° C. Finally, cells were washed twice with PBS-1% BSA and analyzed by flow cytometry. Live/Dead Aqua-405 nm (ThermoFisher) was used to exclude dead cells. Data was collected using a ZE5 Cell Analyzer (Bio-Rad) and analyzed using FlowJo v10.3.

[0375] Multimer analysis was done on live, single cells, CD3+CD8+ cells following the strategy described by Andersen et al. (Andersen et al., Nat Protoc, 2012, 7, 891-902). Expansions are considered positive using the double multimer staining criteria. Expanded populations for each peptide are represented either as frequencies of total CD8+ cells in each replicate or as total multimer frequencies among total CD8+ T cells evaluated in all replicated for one donor.

### In-Vitro Vaccinations Assay

[0376] Buffy coats from healthy donors were obtained from Etablissement Frangais du Sang (Paris, France) in accordance with INSERM ethical guidelines. According to French Public Health Law (art L 1121-1-1, art L 1121-1-2), written consent and IRB approval are not required for human non-interventional studies.

[0377] PBMCs were obtained by density gradient separation using Lymphprep (StemCell technologies) and phenotyped by FACS using anti-HLA-A2 antibodies (clone BB7.2, BD Biosciences) and anti-HLA-B7 antibodies (clone BB7.1, Biolegend). Only HLA-A2+ and HLA-B7+ donors were used. Monocytes and lymphocytes from the same donor were purified as CD14⁺, CD4+ and CD8⁺ cells by positive selection using magnetic beads (Miltenyi Biotec). Monocyte-derived dendritic cells (mo-DCs) were obtained by differentiation of CD14+ fraction during 5 days at 10⁶ cells/ml in RPMI-1650/Glutamax (Gibco), 10% FBS, penicillin (100 U/ml)/streptomycin (100 μg/ml) supplemented with recombinant human IL-4 (50 ng/mL) and GM-CSF (10 ng/mL). Isolated CD4⁺ and CD8⁺ T cells were cryopreserved during mo-DCs differentiation.

[0378] After differentiation, mo-DCs were seeded in culture medium in 24 well plates at 1×10⁶ cells/ml and maturated OVN with LPS (100 ng/ml). After that, culture media was removed and LPS treated mo-DCs were pulsed during 3 h at 37° C. with a mix of selected good-binder TE-derived peptides (either predicted or MS-derived from HLA-I peptidomics data). Each peptide was at 1 g/mL final concentration. Finally, peptide-loaded mo-DCs were harvested, pelleted and counted. Cryopreserved lymphocyte fractions were thawed and co-cultures were performed by mixing 1×10⁶ CD8⁺ T cells with 0.1×10⁶ CD4⁺ T cells and 0.1×10⁶ peptide-loaded mo-DCs (CD8-CD4-mo-DCs ratio: 10:1:1, respectively) in a final volume of 2 ml in 24 well plate. Each well was considered as an independent replicate. Total number of replicated was determined by the total number of CD8⁺ T cells. Without disturbing the cells, media was half-changed after 5 days and then monitored every 3 days until day 15-20. Expansion of specific CD8⁺ T cells populations were evaluated by FACS using multimer staining. X-vivo 15 media (Lonza) supplemented with penicillin (100 U/ml)/streptomycin (100 μg/ml) (Gibco), 10% FBS, 10 U/ml of IL-2 (Novartis) and 10 ng/ml of IL-7 (PeproTech) were used as culture media. As negative control, with MS-derived peptides, a replicate using mo-DCs non-peptide pulsed was included. For HLA-A2⁺ donors a positive control of T-cells expansions (1 or 2 replicates) using mo-DCs pulsed only with Melan-A peptide (ELAGIGILTV) was included. Within the mix of MS-derived HLA-A2⁺ peptides, 3 HLA-A*02:01 binding peptides derived from the canonical sequences of normal proteins (present in Uniprot normal proteome) were included.

### Mass Spectrometry Based Immunopeptidomics

### Mass Spectrometry Data Analysis

[0379] Mass spectrometry-based immunopeptidomics files were obtained from PXD020079, PXD008127, PXD003790 and MSV000084442 and analysed with ProteomeDiscoverer 2.5 (ThermoFisher) using the following parameters: no-enzyme, precursor mass tolerance 20 ppm and fragment mass tolerance 0.02 Da. Methionine and N-acetylation were enabled as variable modifications. Using Percolator, a false discovery rate (FDR) of 1% was applied at peptide level and no FDR was used at protein level. Spectra were searched against the human Uniprot/SwissProt with isoforms (updated Jun. 3, 2020) concatenated with the 6 reading frame in silico translated neoplastic enriched TE database. Identified potential TE-derived peptides were filtered afterwards with UniProt/TrEMBL database considering leucine-isoleucine and lysine-glutamine as equivalent, respectively. Finally, spectrums from identified TE-derived peptides were manually verified.

### Peptide Hydrophobicity Index (HI) Calculation

[0380] For retention time versus hydrophobicity comparisons, HI were predicted using SSRCalc (Krokhin et al. 2004) web server (http://hs2.proteome.ca/SSRCalc/SSRCalcX.html).

### Single and all Assignments Definition

[0381] As multiple TEs can code for the same peptides, two different categories were made in order to make observations on TE-encoding peptides features. All assignments correspond to all TEs coding for a peptide (all 568 TEs for 370 peptides). Single assignment corresponds to a random selection for each peptide of an individual TE that can encode the corresponding peptide (370 TEs for 370 peptides).

### Identifying Potential Peptide-Encoding TEs

[0382] In order to identify or screen all TEs incorporating peptide sequences, peptides sequences were aligned to all annotated individual TEs in the genome in all six frames using tblastn (v2.11.0+). Sequences from all TEs in the genome were retrieved using getfasta from bedtools (v2.30.0) using TETranscript gtf processed into BED format. No restriction on Evalue was requested.No restriction on Evalue was requested. All hits with a number of mismatches equal to 0, a number of gap openings equal to 0 and a query coverage per HSP of 100 were kept and considered as peptide-coding TEs in addition to those from the neoplastic signature identified with ProteomeDiscoverer.

Spectrum Validation with Synthetic Peptides

[0383] To validate the spectra, 24 of the identified peptides were synthesized (GeneCust) with an HPLC purity of 95% and were injected in a Velos Orbitrap (CID). Raw files were analysed with ProteomeDiscoverer 2.5 (ThermoFisher). Spectrums were exported and compared to the spectra derived from the immunopeptidomics analysis. Only PSM with the same charge between synthetic and endogenous and without modifications were analysed. The same fragmentation type (CID or HCD) between both spectrums was prioritized when possible

### Identification of Tumor-Enriched TE-Derived Peptides

[0384] TPM expression of all possible TEs from the genome that can potentially code for the identified peptides was retrieved and 90^{th} percentile values were calculated for each tissue. TEs coding for each specific peptide were selected and their 90^{th} percentile values were summed to obtain the total transcript expression related to these peptides. For non-redundant peptides, related transcript expression was directly the 90^{th} percentile value of the TE coding for the peptides. A log 2 ratio was then performed between peptide related expression in GBM samples compared to each GTEx tissue to assess if the related expression of these peptides were higher in GBM samples compared Normal tissues. Using median TPM expression in GBM samples as a threshold, the percentage of expression in Normal samples with an equal or higher expression was also calculated for each tissue. Pheatmap function from ComplexHeatmap R package (v2.6.2) was then used to represent the log 2 ratio, the 90^{th} percentile values as well as the percentage of expression in Normal samples. Clustering method used in the heatmap with the log 2 ratio was ward.D2.

### Statistical Analyses

[0385] Wilcoxon tests were performed with R package ggpubr (version 0.4.0) and its function stat_compare_means (1): to compare distance to closest gene between Immune and Neoplastic signatures (2) to compare mean expression of the neoplastic signature in bulk RNA-seq samples; (3) to compare length of canonical and non-canonical TE-derived peptides ORFs. Pearson correlation scores were computed using stat_cor from ggpubr: (1) to assess the correlation between TEs and their closest protein-coding gene; (2) to assess the correlation between median age of TEs coding for a peptide and the number of TEs that can code for the peptide. Two proportions z-test were computed to compare LINE proportions in different subsets of individual TEs. The corresponding p-values to symbols are as follows: ns: p>0.05; *: p<=0.05; **: p<=0.01; ***: p<=0.001; ****: p<=0.0001.

### Results

### Single Cell TE-Expression Resolves all Cell Populations in Tumors

[0386] It was reasoned that a powerful way to identify TEs expressed specifically in tumor cells would be to compare TE expression in tumor and in tumor-infiltrating cells from the same patients. To do so, single cell transcriptomics (scRNAseq) of all cells present in the tumor microenvironment were used. The study was initiated on a public data set including tumor and juxta-tumor samples from 4 GBM patients analyzed by SMARTseq2 (Darmanis et al., Cell Rep, 2017, 21, 1399-1410). Consistent with the analysis performed in the original article, dimensionality reduction and t-SNE visualization based on gene expression resolves the 7 sorted cell populations from the tumor core and the surrounding tissue: immune cells (mostly macrophages), neoplastic cells and oligodendrocyte precursor cells (OPCs) are the most numerous (FIG. 1B.

[0387] To investigate TE expression in single cells, scRNAseq reads were mapped to either TE subfamilies (as shown previously in Kong et al., Nat Commun, 2019, 10, 5228) or to individual genomic TEs (FIG. 1A). Because mapping of TEs to individual genomic locations can be affected by high conservation of their repeat motifs, especially in young TE subfamilies, the use of uniquely and multi-mapping RNAseq reads were compared. Uniquely mapping reads allow accurate estimation of the expression of older TE subfamilies, but underestimates the expression for youngest TE subfamilies, as compared to multi-mapping reads, which reflect more accurately expression of young TE subfamilies (Lanciano and Cristofari, Nat Rev Genet, 2020, 21, 721-736). To quantify TE expression, FeatureCounts with—primary and randomly-reported positions (−M, for multiple alignment) were used as recommended in Teissandier et al. (Teissandier et al., Mob DNA, 2019, 10, 52)). tSNE based on expression of 992 TE subfamilies, or 5000 most variable individual TEs in single cells, like gene expression, resolves all cell populations in the tumor microenvironment (FIG. 1B middle panel). Neoplastic cells and OPCs are mostly present in tumor and juxta-tumor samples, respectively, while, as expected, immune cells are present in both (Darmanis et al., 2017). Individually mapped TEs allow better resolution of the different cell populations than TE subfamilies (FIG. 1B right panel). These results show that expression of individual TEs can be resolved at the single cell level and is sufficient to distinguish different cell populations in the tumor microenvironment.

### Te Subfamilies are Differentially Expressed in Neoplastic and Immune Cells

[0388] To better understand the nature of these TEs, differential expression (DE) analyses of TEs in each cell population were performed against all others, thus defining population-specific TE signatures. These signatures are highly specific for neoplastic cells (Table 2), immune cells (FIG. 1C), and for each of the other cell populations present in the tumor microenvironment. Heatmap representation of unsupervised clustering of the 20 most differentially expressed TEs for each type of cells based on the average log 2 fold change shows selective expression in each cell population, including in neoplastic cells (not shown). To further investigate the nature of the TEs differentially expressed in each cell population, each signature to all TEs expressed in the data set (130,028) was compared. TEs differentially expressed in neoplastic cells are depleted in SINEs (51.68% vs. 44.52%) and enriched in LTRs (8.33% vs. 12.11%), while TEs in immune cells are depleted in LINEs (30.29% vs. 26.47%) and LTRs (8.33% vs. 5.62%) and enriched in SINEs (51.68% vs. 59.18%), confirming the results from direct mapping of TE subfamilies. Statistical analyses by subfamily show strong enrichment for several LTR subfamilies in neoplastic cells (mainly HERV), while immune cells differentially express several SINE subfamilies (mainly Alu) (FIG. 1D). The different cell types present in the tumor environment therefore express distinct patterns of TE subfamilies that can be analyzed from individually mapped TEs by single cell transcriptomics.

[0389] The relationship between TE expression and genomic copy number alterations has been next investigated. Gain of chromosome 7 and loss of chromosome 10 are recurrent events in GBM (Kurscheid et al., Genome Biol, 2015, 16, 16.). Genes and TEs were mapped in each cell type-specific signature to their respective chromosomes. As shown in FIG. 1E, TEs differentially expressed in neoplastic cells, but not in other cell populations, present a clear bias for chromosome 7 (FIG. 1E and FIG. 1F). The bias for chromosome 7 in neoplastic cells is even stronger for TEs than for genes (17, 91% of expressed TEs are encoded in chromosome 7, compared to 9.14% for genes) (FIG. 1F). The loss of chromosome 10, by contrast, is similar in the TE (0.93% vs. 4.55% in the genome) and gene signatures (1.43 vs. 3.88% in the genome) (FIG. 1F). Individual TEs can therefore be accurately mapped from scRNAseq and, as expected, show a chromosome 7 bias selectively in neoplastic GBM cells.

TE Expression in Neoplastic Cells is Enriched in Elements Independent of their Closest Gene

[0390] To better understand the control of TE expression in different cell populations, TE genomic locations were first analyzed. As compared to all expressed TEs in the data set, TEs differentially expressed in neoplastic cells show reduced intronic locations (77% vs. 38.74%), including when compared to the proportion of intronic TEs differentially expressed in immune cells (68.77%) (FIG. 2A). Neoplastic TEs also show a marked increase in 3′UTR encoded TEs (25.29%), compared to all expressed TEs (5.02%) or to immune cell TEs (11.27%) (FIG. 2A). These results show that, while TEs differentially expressed in immune cells are largely intronic, in neoplastic cells intergenic and 3′UTRs TEs are more frequently differentially expressed.

[0391] Consistent with these results, the proportion of TEs located at more than 2 Kb (distal) from the nearest protein-coding gene is higher in the neoplastic cell signature (22.32%) that in the immune cell signature (12.98%, FIG. 2B). t-SNE analysis based on distal TEs resolves all cell populations, suggesting that cell type-specific TE expression may not be exclusively due to gene-driven transcription. Consistently, the TE-gene distances are increased for TEs differentially expressed in neoplastic cells, especially for LINE and LTRs (FIG. 2C), as compared to those TEs differentially expressed in immune cells. Higher distances from the closest genes for TEs expressed selectively in neoplastic cells could reflect gene-independent TE expression, including enhancer-dependent or long non-coding RNA (Lnc) RNA-dependent read-through transcription. The correlation between expression of TEs and their closest genes, in neoplastic and immune single cells was therefore next analyzed. Quantification of the proportions of proximal and distal TEs, expressed together or independently of their closest gene, shows that the proportion of both proximal and distal TEs that are expressed while their closest gene is silent (TE+ gene−), is higher in the neoplastic cell (39%) than in the immune cell TE signature (24%) (FIG. 2D). These results show that higher proportions of TEs differentially expressed in neoplastic cells are distant and transcribed independently of their closest gene neighbor, suggesting a higher level of autonomy in TE transcription in GBM cells.

### Validation of the Single Cell Neoplastic TE Signature in an Independent Cohort of GBM Patients

[0392] To validate the single cell-based TE-signatures, bulk RNAseq from the TCGA (155 GBM patients and 5 juxta tumor samples) and GTEx (1080 healthy samples from 25 tissues) was next analyzed. The muscle GTEX cohort was exclude because the library size is smaller compared to other. RNAseq reads were mapped to human genome and TE expression was quantified using RepeatMasker annotations. Principal component analysis (PCA) and Uniform Manifold Approximation and Projection (UMAP) based on GBM TE-signature show that GBM samples cluster away from normal tissue GTEx samples (FIGS. 3A and 3B). Heatmap Z-score representation in TCGA and GTEx samples shows higher expression of the 2000 top TEs of the single cell GBM signature in TCGA GBM samples, and reduced expression in healthy tissues (not shown). Gene Set Enrichment Analysis (GSEA) analysis shows that expression of the scRNAseq GBM TE-signature is highly enriched in GBM vs. normal brain samples (NES=1.67 and FDR<0.05, FIG. 3C) and vs. other normal tissues samples in GTEx. The mean scRNAseq GBM TE-signature expression level is also higher in GBM samples, compared to normal tissue GTEx samples (FIG. 3D). Of note a fraction of healthy brain tissue samples express high levels of the GBM TE-signature. Examples of individual TEs overexpressed in both datasets, bulkRNAseq (FIG. 3E, top panels) and scRNAseq (low panels) illustrates the specific expression of certain TEs in GBM cells. Analysis of individual TEs from scRNAseq is thus accurate and allows the identification of recurrent, tumor-specific TEs.

### TE-Derived Peptides are Presented on HLA-I and are Immunogenic In Vitro

[0393] To investigate if TE-derived peptides are presented by HLA-I molecules in GBM cells, 30 mass spectrometry-based immunopeptidomic samples from GBM primary tumors and cell lines (Forlani et al., Mol Cell Proteomics, 2021, 20, 100032; Sarkizova et al., Nat Biotechno, 2020, 38, 199-209; Shraibman et al., Mol Cell Proteomics, 2018, 17, 2132-2145; Shraibman et al., Mol Cell Proteomics, 2016, 15, 3058-3070) (FIG. 4A) were used. Two different databases of in silico translated TEs were generated from multi-mapping (3428) or uniquely-mapping (1945) differentially expressed, TE-encoding, reads (. Sequences of all TEs were in silico translated in all 6 reading frames (sense and anti-sense). The resulting translated TE sequences were combined with the human annotated proteome and interrogated in HLA-I peptidomics samples using Proteome Discoverer. The identified TE-derived peptides were then filtered against canonical proteins (Swissprot+TrEMBL) and spectra were reviewed manually (FIG. 4A). From 178 to 13720 total peptides were identified per sample from which 370 were TE-derived peptides (Table 3), including 63 peptides predicted from both signatures, 147 only from the multimapped-read, and 160 only from the uniquely-mapping read signatures. Heatmap representation of all identified TE-derived peptides shows that the number of peptides varies among samples, and that the same peptides are found recurrently in several different patients and cell lines (not shown).

[0394] TE-derived peptides showed similar SEQUEST quality scores and peptide length distribution as Uniprot-annotated peptidome, indicating that they are reliable identifications (FIG. 4B). HLA-A3 binding TE-derived peptides (n=96) contained the expected binding motif obtained from Immune Epitope Database (IEDB) (not shown). In addition, TE-derived peptides maintained the correlation between hydrophobicity and retention time (not shown). These results indicate that TE-derived peptidome is reliable and contains similar characteristics to the canonical peptidome. Twenty-three TE-derived peptides were synthetised and validated by comparison d with the endogenous sequence (out of 24 tested). Confirming the robustness of the pipeline, the identified peptides (using both the unique and multi-mapping signatures), similar to the TE signatures, are preferentially encoded by TEs from chromosome 7. TEs differentially expressed in GBM neoplastic cell are thus a source of peptides presented on HLA-I molecules.

[0395] To investigate the possibility that TE-encoded peptides can represent can encode potential tumor antigens, T cell precursors were searched in healthy donors. The TEs differentially expressed in neoplastic cells were in silico translated and NetMHC was used to predict HLA-A2 binding peptides (strong and weak binders). TEs were selected based on p-value (less than 1e⁻⁵⁰) and average log fold change (higher than 2.5) in the differential analysis. Using a tetramer-forming assay, the binding of 7 peptides from immunopeptidomics and 17 from NetMHC predictions on in silico translated GBM T-signature for HLA-A*02:01 (and for HLA-B*07:02 (2 peptides from the immunopeptidomics)) was first experimentally tested (FIG. 4C). 19 peptides were confirmed as HLA-I binders and were used to test immunogenicity in vitro. Immunogenicity was tested by co-culturing peptide-loaded monocyte-derived dendritic cells with autologous CD4⁺ and CD8⁺ T cells from 7 healthy donors and tetramer staining was used as read-out. Mutated Melan-A peptide, a strong binder to HLA-A*02:01 and high T cell precursor frequency in most healthy donors (Pittet et al., J Exp Med 190, 1999, 705-715) was used as positive control for cells expansions. 3 HLA-A*02:01 binding peptides from proteins not expressed specifically in GBM tumors and derived from canonical proteome, were also included as negative control. Expanded tetramer-positive CD8⁺ T cells were observed for 14 TE-derived peptides (including 5 from the immunopeptidomic identifications; Table 4), in at least one donor. The 3 peptides derived from canonical proteins induced very weak or no responses, although Melan-A derived peptides (also a non-TE-derived non-GBM-specific protein) induced high T cell responses (FIG. 4D). In conclusion, a subgroup of TEs differentially expressed in GBM can encode HLA-I-binding peptides that are immunogenic in vitro in healthy donors and could potentially represent a source of tumor antigens.

### Li, LTR and SVA Subfamilies are Main Source of TE-Derived HLA-I Peptides

[0396] To investigate the nature of the tumor-enriched TEs that encode HLA-I-presented peptides in GBM, next the peptide sequences to all differentially expressed TE from the single cell GBM TE-signature, was mapped. In doing so, it was realized that although 85.41% of the 347 peptides are encoded by one single TE, the remaining 15% of peptides could potentially be encoded by 2 to hundreds of TEs among those differentially expressed in this GBM-TE signature (FIG. 4A). These peptides will be referred to as “single-TE encoded peptides” or “multi-TE encoded peptides”. For further analyses, when the same peptide can be redundantly encoded by multiple TEs (since which TE encodes the peptide cannot be determined), it was considered either all the TEs bearing the peptide-coding nucleotide sequence (“all assignments”), or only one (chosen arbitrary) of these TEs per peptide (“single assignment”). The genomic location of the peptide-coding TEs relative to the nearest gene was first analyzed.

[0397] Among TEs coding for HLA-I-presented peptides 37.85% and 31.89% (for all and single assignments, respectively) are distal (over 2 Kb from their nearest gene), as compared to all expressed TEs (12.11%) or to neoplastic differentially expressed TEs (22.32%). Analysis of the genomic locations of peptide-coding TEs revealed that that most are intergenic (35.04% and 28.92% for all and single assignments, respectively, compared to 15.17% in the GBM-TE signature). The proportion of intronic TEs is also increased, but not as much (50% and 50.7% for all and single assignments, respectively, compared to 38.74% in TEs expressed in neoplastic cells). 3′ UTR TEs are less frequent in peptide-coding TEs 25.29% of TEs in neoplastic differentially expressed TEs, and only 5.81% and 7.03% for all and single assignments, respectively, among peptide-encoding TEs. These results establish selectivity in the genomic location of peptide-encoding TEs, which are preferentially intergenic or intronic, and not found in 3′UTRs.

[0398] It was then investigated if the identified peptides are preferentially derived from certain TE classes. Based on both all and single assignments, peptide-encoding TEs are significantly enriched for LINE elements (which represent around 30% of all expressed or neoplastic differentially expressed TEs, and from 52 to 64%, for all and single assignments of peptide-encoding TEs, respectively). These TE class analyses also revealed that TEs classified as “others” are also enriched (see below). These TE class analyses also revealed that TEs classified as “Other” are also enriched (see below). Among the “Other” category, SVA elements and other types of repeats codified in RepeatMasker as RC, RNA, Satellite and Unknown are represented. Among all TE-derived peptides from this category, around half of them are from SVA elements (23 out 51). Regarding SINE elements, it was observed that they are depleted among peptide-generating TEs (from 51.68% and 44.52% in all expressed and differentially expressed TEs, to around 11% in TE-encoding peptides). Therefore, GBM differentially expressed LINE elements are a major source of TE-derived peptides presented on HLA-I in GBM.

[0399] TEs within each class are classified in families and subfamilies. The evolutionary “age” of these subfamilies can be estimated from the degeneration of their characteristic repeat motifs (Choudhary et al., Genome Biol, 2020, 21, 16). A few of the most recent subfamilies include TEs that encoded for intact viral protein ORFs and some of which can still be “active” in terms of retro-transposition (Burns, Science, 2017, 348, 803-808; Rodic et al., Nat Med, 2015, 21, 1060-1064; Scott et al., Genome Res, 201, 26, 745-755). This finding that certain peptides can be redundantly encoded by multiple TEs could be due to conserved sequences present in young from the same TE subfamilies. Therefore the ages of the TE subfamilies was analyzed for each peptide-encoding TE. The median age of the peptide-coding SINE and DNA TEs are similar to all genomic TEs annotated in RepeatMasker, and to all expressed and differentially expressed TEs. For LTRs, the proportion of younger TEs is increased among peptide encoding TEs (decreasing the median age of the peptide-encoding TEs compared to other categories), but older TEs are also presented on HLA-I. For LINE and “others” (see below a more detailed analysis of this category) classes, a bi-modal distribution is observed, with a clear enrichment in peptides encoded by TEs from young subfamilies (under 50 M years) that are rare in RepeatMasker, in all expressed and in neoplastic differentially expressed TEs. Thus, among LINE, and LTR TE classes, recent TEs are more prone to provide peptides for HLA-I presentation.

### Ancient Viral Proteins are a Source of HLA-Presented Peptides

[0400] It was next investigated if peptides from TEs are derived from annotated Endogenous Viral Elements (EVE) which are documented and validated in the gEVE database (Nakagawa and Takahashi, Database (Oxford) 2016). These EVEs of at least 80 amino acids were identified processing both RepeatMasker annotations and conserved known motifs from viral proteins like Gag and Pol. Mapping peptide-coding TEs to gEVE shows that, for both LINEs and LTRs, TEs mapping annotated EVE are significantly enriched among peptide-coding TEs (based on both all and single assignments), as compared to RepeatMasker, all expressed and differentially expressed TEs (FIG. 5). Consistent with these results, mapping of the peptide-coding TEs to their corresponding sub-families shows selectivity for Alu among SINEs, L1PA/B/x and L2 among LINEs, ERV1, ERVK, ERVL and ERV-MaLR among LTRs and SVA among others. Allowing one or two nucleotide mismatches (to take into account possible mutations or polymorphisms) increases markedly the proportion of peptide-coding TEs that map to annotated ORFs from gEVE, including for classes and sub-families, suggesting that recently mutated TEs are also a major source of peptides for HLA-I presentation. Most peptides are derived from ORFs bearing a start codon, either ATG (canonical) or CTG/GTG/TTG (non-canonical).

[0401] An example of peptides are 3 peptides encoded in a SVA-family member, SVA_B_dup189. The 3 peptides are encoded on the forward strand, in 2 different reading frames (RF). The 2 peptides encoded in RF1 are present in ORFs longer than 30 amino acids, while the third peptide (encoded in RF3) is not found in a detected ORF. It could be that the ORF is shorter than 30 amino acids, that the start codon for this ORF is not among the 4 ORFs used in the pipeline or that the start codon is outside the TE. Analysis of the length of the ORFs encoding HLA-presented peptides shows that among L1PA|B|x, but not among other TE subfamilies, ORFs generating peptides and containing a canonical ATG start codon are longer than the ones starting with a non-canonical one. Among peptide-coding TEs mapping a gEVE annotate LTR ORFs, the actual peptide coding sequence can be present in all retroviral proteins, with an enrichment for Gag (which represent 10.6% of ORFs in gEVE, vs. 28% in peptide-coding TE ORFs). In the case of LINEs, Pol are the only gEVE annotated proteins. Blast of the peptide-coding sequences shows that the majority of LINE encoded peptides are not derived from the two major LINE ORFs, ORF1p (3.1%) and ORF2p, (10.8%). In conclusion, TEs from young subfamilies, preferentially bearing retroviral protein motif, are more prone to provide peptides for presentation by HLA-I molecules in GBM cells. The peptides are encoded by ORFs bearing canonical or alternative start codons and can be from 10 to 1000 amino acids long.

### TE Subfamilies Share HLA-Presented Peptide Coding Sequences

[0402] To investigate if some TEs are more prone to provide HLA-binding peptides than others, the proportions of TE families among the ones differentially expressed in GBM (and used for the peptide MS/MS search) and the proportions found among the TEs that code for peptides were compared. For LTRs, SINEs and Others, the proportions of different families are similar in the GBM TE-signature and the peptide encoding TE (both with all or single assignments). For LINEs, in contrast, peptides are preferentially derived from L1PA/B/x: 25.3% in GBM TE-signature vs. 76.6% or 49.7% for All and Single assignments, respectively. Other LINE families are depleted among peptide-coding TEs (especially L2, which represent 25.1% of GBM TE-signature and provide for only 7.4% or 15.4% of peptide-coding TEs, with all and main assignments, respectively). Statistical analysis shows significant enrichment in peptide-coding TE over GBM TE-signature for L1PA/B/x and SVA, as well as in ERVK. Among the RM category “Others”, XX are also enriched. L2, SINEs (including Alu and MIR) and ERVs (including ERVL and ERVL-MalR) are all significantly depleted among peptide-coding TEs, as compared to GBM TE-signature (FIG. 6). L1PA/B/x include L1HS (or L1PA1, among the very few still active TEs in humans) and their closely related subfamilies L1PA(x) and L1PB(x), which are all among the younger subfamilies compared to other LINE-1 subfamilies. In conclusion, certain recent, mainly LINE-1, TE families, preferentially generate HLA-I-presented peptides in GBM.

[0403] Because recent TEs have more conserved repeat motifs, it was next sought to investigate if multi-TE encoded HLA-presented peptides corresponded to shared subfamily motifs. The 152 TE subfamilies coding for the 347 identified HLA peptides were represented in 2-dimensional plots coloring the intersections between 2 subfamilies according to the numbers of shared peptides (not shown). The green diagonal in this plot indicates that most subfamilies code for only one peptide. A red square on the diagonal indicates that one TE subfamily can code for more than one peptide. A green square off the diagonal indicates that a peptide can be encoded by TEs from different subfamilies, while a red square outside the diagonal indicates that two different subfamilies code for several shared peptides (up to 25). The class and age of the subfamilies are indicated in color scales on the side of the graph. The three main groups of TE subfamilies coding one or multiple peptides, or redundancy clusters, appear as large squares and are enlarged. The first redundancy cluster (upper left corner) corresponds to a group of L1HS and L1PA(x), two young subfamilies of LINE-1 elements that share up to 25 peptides, pairwise. The second cluster identifies relatively young SINE elements (mainly Alu) that share single peptides (lower right to first group). The third cluster (lower right corner of zoomed panel), corresponds to a group of young subfamilies of SVA elements that share variable numbers of peptides. Therefore, redundancy occurs within multiple TEs from the same recent related subfamilies that could all potentially code for multiple peptides presented on HLA-I molecules. Redundancy in peptide-encoding TEs is therefore limited to a small number of recent TE subfamilies.

[0404] To investigate further the links between redundancy and age of TEs, the analysis was extended to all TEs in the genome (redundancy was so far analyzed among GBM TE-signature). Genomic TE-redundancy analysis shows that 49.46% of the 370 peptides identified by immunopeptidomics are encoded by only one TE in the genome (as compared to 85.49% in the scRNAseq GBM TE-signature). At the opposite end, 15.95% of these peptides could potentially be encoded by 201-13500 TE occurrences in the genome. A plot of each peptide according to the number of TEs it can potentially be encoded by, and the age of the corresponding subfamilies was drawn. Among SINEs, Alu-derived peptides are highly redundant and from recent subfamilies, while the MIR-derived peptides are encoded by single TEs from older subfamilies. The same correlation is observed among LINE-1 peptides, with young L1HS, L1PA(x)− and L1PB(x)−derived peptides being encoded by multiple elements, and peptides derived from older L2 and other L 1 subfamilies by unique elements. The negative correlation between the number of TEs potentially encoding single peptides and the age of the corresponding TE subfamilies is confirmed across all TE families (r=−0.61). In conclusion, regardless of TE classes (LINE, SINE, LTR or DNA), subfamilies of young TEs bear shared (redundant) sequences that could code for the same HLA-I peptide, while peptides encoded by TEs from older, more degenerated subfamilies are vastly derived from unique genomic sequences.

### Single-TE Encoded Peptides are More Tumor-Specific

[0405] To investigate how redundancy of TE derived peptides affects tumor specificity, the ratio between its expression in TCGA GBM samples and in all healthy tissues from GTEx was represented for each differentially expressed GBM TE from the scRNAseq data set (not shown), brown for higher expression in GBM, blue for the opposite). Unsupervised clustering of the TEs identifies two main groups of peptide coding TEs, group 1 and 2, dominated by TEs overexpressed in GBM and in GTEx, respectively. Group 1 (TEs overexpressed in GTEx) contain higher proportions of LINEs and Others (including all 23 peptide-coding SVA elements), while group 2 contains more LTRs and DNA transposons (FIG. 6, right panels). Moreover, group 1 contains a majority of redundant TEs (63.5%), compared to only 26.6% in group 2 (FIG. 6). Consistently, the median age of group 1 TEs is much lower than the one of Group 2 (FIG. 7). These results show that non-redundant peptides from older TE subfamilies are more likely to be overexpressed in GBM, as compared to healthy tissues than TEs from younger subfamilies encoding redundant peptides.

[0406] It was then asked if tumor-specific TEs can be identified. Expression of the top 50 tumor-enriched, peptide-encoding TEs in GBM and all GTEx healthy tissues (as 90 percentile expression, left panel, and percentage of samples with higher expression than GBM median expression, right panel) was determined (not shown). The most tumor-specific TEs are from different classes, but are preferentially derived from ORFs containing a canonical start codon. Some of these TEs are expressed at different levels in a majority of GBM tumors, and undetectable in all, or in a majority, of GTEx healthy tissues (including brain). For some of these TEs, over 90% of the cells expressing the TE are GBM tumor cells in the four patients in the scRNAseq data sets. In conclusion, a subset of unique, non-redundant, peptide-coding TEs are highly tumor-specific and recurrent in cancer patients. These peptide-coding, non-redundant TEs represent interesting potential targets for immunotherapy.

### DISCUSSION

[0407] The inventors used here a TE-centered proteogenomic approach to investigate HLA-I presentation of TE-derived peptides, in search for tumor specific recurrent antigens. Two main innovative approaches were combined: i) the pipeline starts with a TE analysis of scRNAseq from total primary tumors, that allows assignment of reads of TEs to GBM cells, and not to hematopoietic or stroma cells, and ii) the alignment for TE mapping was performed to individual TE occurrences, rather than to TE subfamilies, as before (Kong et al., 2019). This sc/individual TE transcriptomic analysis was validated by showing that the differentially expressed TEs were also over expressed in a cohort of 155 bulk RNAseq samples from GBM patients (TCGA), as compared to all tissues, including brain tissue, from healthy donors (GTEx). The signature showed a bias for TEs encoded on chromosome 7, which is frequently amplified in GBM tumor cells, further validating this sc/individual TE strategy. The TE signature was used to interrogate immunopeptidomic mass-spectrometry data bases from 30 GBM primary tumors and cell lines. A set of 347 TE-derived peptides was identified with reliable profiles and motif compliance to HLA alleles of the corresponding samples. These peptides are encoded by 568 TEs, whose analysis revealed some new aspects of the biology of presentation of peptides from TEs in GBM cells. Not all identified peptides, however, are derived from tumor-specific TEs. Further analysis of peptide-coding TEs allowed identification of truly tumor-specific individual TE that actually provide HLA-presented peptides, offering a source of potential targets for immunotherapy.

[0408] This study relies largely from scRNAseq mapping of TEs. Several recent papers have analyzed TEs on scRNAseq data sets, and even if a few early studies (He et al., Nat Commun, 2021, 10, 5228. Shao and Wang, Genome Res, 2021, 31, 88-100) pointed to possible bias and limitations, reliable pipelines and guidelines are now available, and have been followed in the present study. These results also rely of different internal controls that support the robustness of these TE scRNAseq analyses. First, it is shown that the TEs expressed in neoplastic GBM cells, but not in other cell populations, are biased for TEs encoded on chromosome 7 (FIG. 1). This corresponds to the known chromosome 7 amplification in GBM and is also detected for coding genes. Second, the GBM TE-signature based on scRNAseq is overexpressed in GBM bulk RNAseq patient cohorts compared to healthy tissues (FIGS. 3C and 3D). Likewise, HLA-I peptidomics with in silico translated RNAseq databases is delicate and can yield numerous false positive identifications. Particular care was taken in validating these TE-derived peptides based on peptide lengths, identification scores, hydrophobicity/RT correlation analyses and binding motif compliance. Furthermore, 23 of the peptides were validated using synthetic peptide comparisons. Importantly, the identified peptides also show the same chromosome 7 bias, which further and independently validates the identifications. One original finding is that the proportions of intronic and intergenic TE occurrences are increased among peptide-coding TEs, as compared to the corresponding proportions in GBM TE-signature (the database used to identify the peptides), at the expense of 3′UTR TEs. HLA-I-presented peptides can therefore be derived from both gene-dependent and gene-independent transcription and translation, but the reasons why intronic TEs provide proportionally more peptides than 3′UTR TEs is worth further analyses. Previous studies found that 3′UTR can code for HLA-presented peptides (Laumont et al., Nat Commun, 2016, 7, 10238; Ruiz Cuevas et al., Cell Rep, 2021, 34, 108815; Zhao et al., Cancer Immunol Res, 2020, 8, 544-555) but these studies did not consider TEs from other genomic locations, as done here. It was also found that LINE-I elements are the major source of HLA-I presented peptides in GBM. LINE-1 represent around 30% of TEs in the human genome, of all TEs expressed in GBM, and of GBM TE-signature, but over 50% of the TE encoded peptides presented on HLA-I. SVA-derived peptides are also strongly enriched, while the proportion of SINE-derived peptides is reduced (as compared to genomic, expressed and differentially expressed SINEs in GBM). LINE-1 elements with and without intact ORFs are preferentially represented among peptide-generating TEs and this bias is observed whether TEs are assigned to multiple or to single locations, indicating that the bias is not due to TE mapping issues.

[0409] Another conclusion from this study is that HLA-I molecules present peptides that can be encoded by one or by multiple redundant TEs (bearing the exact same nucleotide sequence encoding the peptide). Other peptides are encoded by TE sequences present only once in the genome. Redundancy, in most cases, occurs within TE subfamilies, and in some cases within different subfamilies that are always from the same TE classes. The most redundant TEs (from several hundred to several thousand occurrences) are from L1PA/B/x and often bear intact annotated ORFs. Peptides derived from Alu (a SINE family member), ERV1 (an LTR family) and SVA (an intermediate length independent family), which are all among the youngest TE families in humans, are also highly represented and redundant. Redundancy is negatively correlated with the age of the TE subfamilies, suggesting that the recurrent sequences encoding HLA-I-binding peptides are part of the ancestral TE insertion event, which subsequently degenerated by mutations and disappeared with time as members of the subfamilies diverged. This scenario is supported by the observation that if 1 or 2 nucleotide mismatches are allowed, the number of redundant TEs is even larger. This is an intriguing observation, and it is not known yet if the peptides identified by mass spectrometry are derived from multiple or unique TE loci. The observation that many of these redundant TEs are actively transcribed and differentially expressed in GBM suggests that the redundant peptides are indeed encoded by multiple loci.

[0410] Analysis of the peptide-coding TE ORFs revealed that peptides are generally encoded in 10-100 amino acid long ORFs (with exception of around half of the LINE-encoded peptides that are derived from longer ORFs). In LTRs, peptides are derived from all viral ORFs, with a positive bias for env-derived peptides, as compared to the proportion of env genes annotated in the databases. Among LINE-derived peptides, only a small proportion (around 10%) are derived from the know ORF1p and ORF2p loci. The TE-coding ORFs bear either canonical or alternative start codons, with exception of the longer LINE1 ORFs (over 100 amino acids) which are all driven by canonical ATG start codons.

[0411] How, then, it was asked if this knowledge can be used to identify tumor specific TE-derived antigens?Analysis of the relative expression of individual peptide-coding TEs in GBM tumors and a wide series of healthy tissues revealed that redundant TEs from younger subfamilies are generally less tumor-specific than unique TEs from older ones. Because of their more promiscuous expression, it is most likely that the immune system is more tolerized to these antigens from these TEs (although this would need to be addressed specifically). Redundant TEs are therefore probably not the best candidates for tumor-specific targets for immunotherapy, although vaccination with LINE-1 intact ORFs has been shown to be both immunogenic and safe in mice and monkeys (Sacha et al., Immunol, 2012, 189, 1467-1479). These results, however, also identify unique peptide-coding TEs, that are preferentially from MIR, LINE-1 and -2 and some ERV oldest subfamilies. These non-redundant peptide-coding TEs are in majority from relatively old TE subfamilies (over 50 M years), and tBLASTn analysis showed that some of these sequences are present only once in the genome. Some of these TEs are from subfamilies recurrently and selectively de-repressed in tumors, mostly through local DNA demethylation (Brocks et al., Nat Genet, 2017, 49, 1052-1060; Chiappinelli et al., Cell, 2017, 169, 361; Lavie et al., J Virol, 2005, 79, 876-883; Ohtani et al., Cancer Res, 2020, 80, 2441-2450; Roulois et al., Cell, 2015, 1 162, 961-973; Sacha et al., Immunol, 2012, 189, 1467-1479). It is shown that some of these peptide-coding TEs that are expressed in a majority of GBM tumors, are either not detected in healthy tissues or detected at low frequencies and/or low levels.

[0412] The results of in vitro stimulation with some of the TE-derived peptides indicate that the TCR repertoire for TEs in healthy individuals exists, opening the possibility that these TEs are immunogenic in patients. Previous studies, however, have shown T cell reactivity against tumor-expressed TEs, establishing the proof of concept that TEs, including ERVs, can be immunogenic in cancer patients (Saini et al., Nat Commun, 2020, 11, 5660; Smith et al.; Wang-Johanning et al., Cancer Res, 2008, 68, 5869-5877). In this context, mapping the expression of individual TEs from single-cell and bulk RNAseq in cancer patients proved efficient in defining individual TE occurrences that yield HLA-I-presented peptides. The tumor-specificity and high recurrence of these peptide-generating TEs opens new perspectives for immunotherapies in many cancer types with de-repressed TEs and beyond, in other immune pathologies where TEs are de-regulated.

### Tables 2 to 4

[0413] Table 2 refers to the detailed identification of the TE from neoplastic signature from the present study, corresponding to the transcripts of SEQ ID NO: 381 to 5020. The column numbers refer to the following:
[0414] Column n° 1: TE_ID
[0415] Column n° 2: Analysis
[0416] Column n° 3: Immunopeptidomics_peptide_found
[0417] Column n° 4: Peptide_IDs
[0418] Column n° 5: Specificity
[0419] Column n° 6: TE_Class
[0420] Column n° 7: TE_Category
[0421] Column n° 8: Genomic_coordinate
[0422] Column n° 9: Strand
[0423] Column n° 10: Age million
[0424] Column n° 11: Length
[0425] Column n° 12: Closest gene
[0426] Column n° 13: gene_proximity
[0427] Column n° 14: Distance_to_closest_gene
[0428] Column n° 15: TE_with_gEVE
[0429] Column n° 16: TE transcript sequence SEQ ID NO:

[0430] According to the conventional nomenclature, TE transcript sequences are disclosed herein as DNA sequences corresponding to the coding DNA

TABLE 2

| 1 | 2 | 3 | 4 | 5 | 6 | 7 | 8 | 9 | 10 | 11 | 12 | 13 | 14 | 15 | 16 |
|---|---|---|---|---|---|---|---|---|---|---|---|---|---|---|---|
| L1MC4_dup135 | Multi | Yes | PEP: 0001 | Non | LINE | Other L1 | chr1: 10491418-10491630 | − | 120 | 213 | APITD1 | Proximal | 0 | Not documented | 381 |
| | | | | redundant | | | | | | | | | | | |
| L1HS_dup53 | Multi | Yes | PEP: 0324, | Redundant | LINE | L1PA\|B\|x | chr1: 105386456-105392486 | − | 2.7 | 6031 | AMY1C | Distal | 1085145 | EVE annotated | 2 |
| | | | PE | | | | | | | | | | | | |
| SVA_D_dup65 | Multi | Yes | PEP: 0004, | Redundant | Other | SVA | chr1: 109078098-109079480 | − | 25 | 1383 | FAM102B | Distal | 23232 | Not documented | 3 |
| | | | PE | | | | | | | | | | | | |
| L1PA13_dup1 | Uniquely | Yes | PEP: 0111 | Non | LINE | L1PA\|B\|x | chr1: 114030827-114037137 | + | 58 | 6311 | MAGI3 | Proximal | 0 | Not documented | 4 |
| | | | | redundant | | | | | | | | | | | |
| L1MC1_dup576 | Uniquely | Yes | PEP: 0130 | Redundant | LINE | Other L1 | chr1: 119650321-119654546 | − | 69 | 4226 | WARS2 | Proximal | 0 | Not documented | 5 |
| L1PA6_dup3 | Uniquely | Yes | PEP: 0113 | Redundant | LINE | L1PA\|B\|x | chr1: 121241581-121244135 | + | 34 | 2555 | FCGR1B | Distal | 305645 | EVE annotated | 6 |
| L1PA5_dup399 | Multi | Yes | PEP: 0219, | Redundant | LINE | L1PA\|B\|x | chr1: 145047815-145053955 | + | 25 | 6141 | PDE4DIP | Proximal | 0 | EVE annotated | 7 |
| | | | PE | | | | | | | | | | | | |
| L1PA5_dup419 | Multi/ | Yes | PEP: 0053, | Redundant | LINE | L1PA\|B\|x | chr1: 149923965-149930070 | − | 27 | 6106 | OTUD7B | Proximal | 0 | EVE annotated | 8 |
| | Uniquely | | PE | | | | | | | | | | | | |
| LTR5_Hs_dup52 | Multi | Yes | PEP: 0261 | Redundant | LTR | ERVK | chr1: 155596457-155597424 | − | 4.5 | 968 | MSTO1 | Proximal | 0 | EVE annotated | 9 |
| HERVK-int_dup14 | Multi | Yes | PEP: 0175, | Redundant | LTR | ERVK | chr1: 155597425-155599135 | − | 2.3 | 1711 | MSTO1 | Proximal | 0 | EVE annotated | 390 |
| | | | PE | | | | | | | | | | | | |
| LTR5_Hs_dup53 | Multi | Yes | PEP: 0261 | Redundant | LTR | ERVK | chr1: 155604669-155605636 | − | 4.5 | 968 | MSTO1 | Proximal | 0 | Not documented | 1 |
| LTR12F_dup23 | Multi | Yes | PEP: 0048, | Non | LTR | ERV1 | chr1: 155607243-155607452 | − | 86 | 210 | MSTO1 | Proximal | 0 | Not documented | 2 |
| | | | PE | redundant | | | | | | | | | | | |
| L1PA6_dup301 | Uniquely | Yes | PEP: 0303 | Redundant | LINE | L1PA\|B\|x | chr1: 162715794-162721945 | + | 30 | 6152 | DDR2 | Proximal | 0 | Not documented | 3 |
| Kanga2_a_dup79 | Multi | Yes | PEP: 0011 | Non | DNA | DNA | chr1: 166819281-166819572 | + | 150 | 292 | POGK | Proximal | 0 | Not documented | 4 |
| | | | | redundant | | | | | | | | | | | |
| L1P2_dup90 | Uniquely | Yes | PEP: 0303 | Redundant | LINE | L1PA\|B\|x | chr1: 169249076-169253600 | − | 43 | 4525 | NME7 | Proximal | 0 | EVE annotated | 5 |
| AluSz_dup6687 | Multi/ | Yes | PEP: 0338 | Redundant | SINE | Alu | chr1: 202098129-202098436 | − | 49 | 308 | GPR37L1 | Proximal | 0 | Not documented | 6 |
| | Uniquely | | | | | | | | | | | | | | |
| HERVK9-int_dup46 | Uniquely | Yes | PEP: 0195 | Redundant | LTR | ERVK | chr1: 205863345-205864770 | + | 27 | 1426 | SLC26A9 | Distal | 17407 | EVE annotated | 7 |
| L1PA6_dup428 | Multi | Yes | PEP: 0324, | Redundant | LINE | L1PA\|B\|x | chr1: 220778863-220785034 | − | 30 | 6172 | MARK1 | Proximal | 0 | Not documented | 8 |
| | | | PE | | | | | | | | | | | | |
| HAL1_dup1913 | Multi/ | Yes | PEP: 0068 | Non | LINE | Other L1 | chr1: 227490014-227491596 | − | 120 | 1583 | CDC42BPA | Proximal | 0 | Not documented | 9 |
| | Uniquely | | | redundant | | | | | | | | | | | |
| L1PA5_dup718 | Multi | Yes | PEP: 0112, | Redundant | LINE | L1PA\|B\|x | chr1: 242332443-242338355 | + | 41 | 5913 | PLD5 | Proximal | 0 | EVE annotated | 400 |
| | | | PE | | | | | | | | | | | | |
| AluJb_dup4015 | Multi/ | Yes | PEP: 0341, | Redundant | SINE | Alu | chr1: 39575897-39576209 | − | 67 | 313 | MACF1 | Proximal | 0 | Not documented | 1 |
| | Uniquely | | PE | | | | | | | | | | | | |
| AluSc8_dup531 | Multi | Yes | PEP: 0273 | Redundant | SINE | Alu | chr1: 40344660-40344956 | + | 40 | 297 | TRIT1 | Proximal | 0 | Not documented | 2 |
| Charlie2a_dup13 | Multi | Yes | PEP: 0238, | Redundant | DNA | DNA | chr1: 40721880-40722996 | − | 95 | 1117 | ZMPSTE24 | Proximal | 784 | Not documented | 3 |
| | | | PE | | | | | | | | | | | | |
| Charlie2b_dup24 | Multi | Yes | PEP: 0042 | Non | DNA | DNA | chr1: 40723075-40723295 | − | 120 | 221 | ZMPSTE24 | Proximal | 485 | Not documented | 4 |
| | | | | redundant | | | | | | | | | | | |
| L1MA6_dup24 | Multi/ | Yes | PEP: 0141, | Redundant | LINE | Other L1 | chr1: 41633374-41635982 | − | 100 | 2609 | SCMH1 | Proximal | 0 | Not documented | 5 |
| | Uniquely | | PE | | | | | | | | | | | | |
| L2a_dup3767 | Uniquely | Yes | PEP: 0121, | Non | LINE | L2 | chr1: 46535208-46536508 | − | 130 | 1301 | PIK3R3 | Proximal | 0 | Not documented | 6 |
| | | | PE | redundant | | | | | | | | | | | |
| L1PB1_dup157 | Multi/ | Yes | PEP: 0230 | Redundant | LINE | L1PA\|B\|x | chr1: 63205260-63209244 | + | 35 | 3985 | ATG4C | Distal | 40563 | EVE annotated | 7 |
| | Uniquely | | | | | | | | | | | | | | |
| HERV9-int_dup19 | Uniquely | Yes | PEP: 0221 | Redundant | LTR | ERV1 | chr1: 63220509-63225349 | + | 23 | 4841 | ATG4C | Distal | 24458 | EVE annotated | 8 |
| L1HS_dup20 | Multi | Yes | PEP: 0324, | Redundant | LINE | L1PA\|B\|x | chr1: 67544544-67550598 | − | 1.4 | 6055 | C1orf141 | Distal | 7251 | EVE annotated | 9 |
| | | | PE | | | | | | | | | | | | |
| L2a_dup5791 | Uniquely | Yes | PEP: 0070, | Non | LINE | L2 | chr1: 68617114-68618583 | − | 130 | 1470 | WLS | Proximal | 0 | Not documented | 410 |
| | | | PE | redundant | | | | | | | | | | | |
| L2_dup1585 | Uniquely | Yes | PEP: 0248 | Non | LINE | L2 | chr1: 68832447-68832653 | + | 130 | 207 | RPE65 | Distal | 61853 | Not documented | 1 |
| | | | | redundant | | | | | | | | | | | |
| L2b_dup4815 | Multi | Yes | PEP: 0220 | Redundant | LINE | L2 | chr1: 70820751-70820876 | − | 110 | 126 | HHLA3 | Proximal | 0 | Not documented | 2 |
| L1PA16_dup221 | Uniquely | Yes | PEP: 0030 | Non | LINE | L1PA\|B\|x | chr1: 75970521-75972589 | − | 80 | 2069 | SLC44A5 | Proximal | 0 | Not documented | 3 |
| | | | | redundant | | | | | | | | | | | |
| L1HS_dup33 | Multi | Yes | PEP: 0210, | Redundant | LINE | L1PA\|B\|x | chr1: 84518060-84524089 | − | 1.8 | 6030 | PRKACB | Distal | 19657 | EVE annotated | 4 |
| | | | PE | | | | | | | | | | | | |
| L1PA7_dup307 | Multi/ | Yes | PEP: 0324, | Redundant | LINE | L1PA\|B\|x | chr1: 92853960-92860042 | + | 36 | 6083 | RPAP2 | Proximal | 0 | EVE annotated | 5 |
| | Uniquely | | PE | | | | | | | | | | | | |
| MLT1H_dup350 | Multi/ | Yes | PEP: 0123 | Non | LTR | ERVL- | chr1: 93805005-93805156 | + | 110 | 152 | DR1 | Distal | 6290 | Not documented | 6 |
| | Uniquely | | | redundant | | MaLR | | | | | | | | | |
| LTR7B_dup536 | Multi | Yes | PEP: 0268 | Redundant | LTR | ERV1 | chr10: 102140677-102141062 | + | 22 | 386 | SCD | Distal | 16087 | Not documented | 7 |
| L1PA4_dup8539 | Multi | Yes | PEP: 0324, | Redundant | LINE | L1PA\|B\|x | chr10: 102166088-102172241 | + | 22 | 6154 | SCD | Distal | 41498 | EVE annotated | 8 |
| | | | PE | | | | | | | | | | | | |
| L1HS_dup1121 | Multi | Yes | PEP: 0324, | Redundant | LINE | L1PA\|B\|x | chr10: 107137105-107143135 | − | 1.4 | 6031 | SORCS3 | Distal | 112113 | EVE annotated | 9 |
| | | | PE | | | | | | | | | | | | |
| L1PA7_dup9493 | Uniquely | Yes | PEP: 0303 | Redundant | LINE | L1PA\|B\|x | chr10: 120405843-120412254 | − | 37 | 6412 | CACUL1 | Distal | 21426 | EVE annotated | 420 |
| L1MC4a_dup16650 | Uniquely | Yes | PEP: 0198 | Non | LINE | Other L1 | chr10: 25606952-25607631 | − | 110 | 680 | GPR158 | Proximal | 0 | Not documented | 1 |
| | | | | redundant | | | | | | | | | | | |
| L1ME5_dup2184 | Multi | Yes | PEP: 0328 | Non | LINE | Other L1 | chr10: 31616339-31616948 | − | 130 | 610 | ZEB1 | Proximal | 0 | Not documented | 2 |
| | | | | redundant | | | | | | | | | | | |
| L1PB3_dup2485 | Uniquely | Yes | PEP: 0054, | Non | LINE | L1PA\|B\|x | chr10: 60294142-60299303 | + | 75 | 5162 | BICC1 | Proximal | 0 | EVE annotated | 3 |
| | | | PE | redundant | | | | | | | | | | | |
| MamRep605_dup3009 | Multi/ | Yes | PEP: 0103 | Redundant | Other | Other | chr10: 60934720-60934951 | + | 160 | 232 | PHYHIPL | Proximal | 1400 | Not documented | 4 |
| | Uniquely | | | | | Repeats | | | | | | | | | |
| L1HS_dup1087 | Multi | Yes | PEP: 0324, | Redundant | LINE | L1PA\|B\|x | chr10: 6411598-6417629 | − | 1.8 | 6032 | DKFZP667F0711 | Distal | 16876 | EVE annotated | 5 |
| | | | PE | | | | | | | | | | | | |
| SVA_D_dup817 | Multi | Yes | PEP: 0075, | Redundant | Other | SVA | chr10: 73628416-73630264 | − | 16 | 1849 | PSAP | Distal | 17291 | Not documented | 6 |
| | | | PE | | | | | | | | | | | | |
| L2a_dup107251 | Uniquely | Yes | PEP: 0254 | Redundant | LINE | L2 | chr10: 83813380-83814521 | − | 140 | 1142 | NRG3 | Proximal | 0 | Not documented | 7 |
| L1PA6_dup4237 | Uniquely | Yes | PEP: 0113, | Redundant | LINE | L1PA\|B\|x | chr10: 96865056-96871181 | − | 35 | 6126 | CYP2C8 | Distal | 35803 | EVE annotated | 8 |
| | | | PE | | | | | | | | | | | | |
| HERVK-int_dup176 | Multi | Yes | PEP: 0200 | Redundant | LTR | ERVK | chr11: 101566762-101574291 | + | 2.7 | 7530 | TRPC6 | Proximal | 0 | EVE annotated | 9 |
| L1ME4a_dup30100 | Multi | Yes | PEP: 0138 | Non | LINE | Other L1 | chr11: 105968605-105969023 | − | 130 | 419 | AASDHPPT | Proximal | 0 | Not documented | 430 |
| | | | | redundant | | | | | | | | | | | |
| Charlie1_dup1272 | Multi/ | Yes | PEP: 0320, | Non | DNA | DNA | chr11: 10874252-10876178 | − | 130 | 1927 | ZBED5 | Proximal | 0 | Not documented | 1 |
| | Uniquely | | PE | redundant | | | | | | | | | | | |
| L1PA5_dup8498 | Multi | Yes | PEP: 0324, | Redundant | LINE | L1PA\|B\|x | chr11: 113094670-113100816 | + | 25 | 6147 | NCAM1 | Proximal | 0 | EVE annotated | 2 |
| | | | PE | | | | | | | | | | | | |
| L1HS_dup1201 | Multi | Yes | PEP: 0324, | Redundant | LINE | L1PA\|B\|x | chr11: 125406506-125412536 | + | 2.7 | 6031 | EI24 | Distal | 26577 | EVE annotated | 3 |
| | | | PE | | | | | | | | | | | | |
| L1MB8_dup10879 | Uniquely | Yes | PEP: 0118 | Non | LINE | Other L1 | chr11: 12802088-12803387 | + | 87 | 1300 | TEAD1 | Proximal | 0 | Not documented | 4 |
| | | | | redundant | | | | | | | | | | | |
| MIRc_dup67159 | Multi | Yes | PEP: 0302 | Non | SINE | MIR | chr11: 17304345-17304486 | + | 120 | 142 | NUCB2 | Proximal | 0 | Not documented | 5 |
| | | | | redundant | | | | | | | | | | | |
| SVA_D_dup851 | Multi | Yes | PEP: 0075, | Redundant | Other | SVA | chr11: 19880686-19882618 | − | 11 | 1933 | NAV2 | Proximal | 0 | Not documented | 6 |
| | | | PE | | | | | | | | | | | | |
| L1PA7_dup9595 | Multi/ | Yes | PEP: 0145, | Redundant | LINE | L1PA\|B\|x | chr11: 20092505-20096486 | − | 38 | 3982 | NAV2 | Proximal | 0 | EVE annotated | 7 |
| | Uniquely | | PE | | | | | | | | | | | | |
| L1HS_dup1149 | Multi | Yes | PEP: 0324, | Redundant | LINE | L1PA\|B\|x | chr11: 24349498-24355547 | + | 1.8 | 6050 | LUZP2 | Distal | 162970 | EVE annotated | 8 |
| | | | PE | | | | | | | | | | | | |
| L1PA5_dup8001 | Uniquely | Yes | PEP: 0303 | Redundant | LINE | L1PA\|B\|x | chr11: 2655405-2661585 | − | 27 | 6181 | KCNQ1 | Proximal | 0 | EVE annotated | 9 |
| L1PA5_dup8143 | Uniquely | Yes | PEP: 0303 | Redundant | LINE | L1PA\|B\|x | chr11: 27686849-27692569 | + | 32 | 5721 | BDNF | Proximal | 0 | Not documented | 440 |
| LTR25-int_dup441 | Uniquely | Yes | PEP: 0189 | Redundant | LTR | ERV1 | chr11: 28158080-28161203 | − | 75 | 3124 | METTL15 | Proximal | 0 | Not documented | 1 |
| Tigger6a_dup561 | Multi | Yes | PEP: 0315 | Non | DNA | DNA | chr11: 30358575-30359619 | + | 89 | 1045 | ARL14EP | Proximal | 0 | Not documented | 2 |
| | | | | redundant | | | | | | | | | | | |
| L1PB4_dup5262 | Multi/ | Yes | PEP: 0204 | Redundant | LINE | L1PA\|B\|x | chr11: 33911212-33911757 | + | 57 | 546 | LMO2 | Proximal | 0 | Not documented | 3 |
| | Uniquely | | | | | | | | | | | | | | |
| L1PA4_dup8796 | Multi/ | Yes | PEP: 0053, | Redundant | LINE | L1PA\|B\|x | chr11: 35776053-35782191 | − | 23 | 6139 | TRIM44 | Proximal | 0 | EVE annotated | 4 |
| | Uniquely | | PE | | | | | | | | | | | | |
| L1PA5_dup8179 | Multi/ | Yes | PEP: 0053, | Redundant | LINE | L1PA\|B\|x | chr11: 35795022-35801113 | − | 30 | 6092 | TRIM44 | Proximal | 0 | EVE annotated | 5 |
| | Uniquely | | PE | | | | | | | | | | | | |
| L1HS_dup1157 | Multi | Yes | PEP: 0324, | Redundant | LINE | L1PA\|B\|x | chr11: 36573157-36579186 | − | 1.4 | 6030 | RAG1 | Proximal | 0 | EVE annotated | 6 |
| | | | PE | | | | | | | | | | | | |
| L1M4c_dup4425 | Multi | Yes | PEP: 0144 | Non | LINE | Other L1 | chr11: 65267057-65267487 | + | 140 | 431 | SCYL1 | Distal | 25062 | Not documented | 7 |
| | | | | redundant | | | | | | | | | | | |
| HAL1_dup18654 | Multi | Yes | PEP: 0361 | Non | LINE | Other L1 | chr11: 66300846-66301152 | − | 100 | 307 | ZDHHC24 | Proximal | 0 | Not documented | 8 |
| | | | | redundant | | | | | | | | | | | |
| MER49_dup896 | Multi | Yes | PEP: 0023, | Non | LTR | ERV1 | chr11: 71162311-71163232 | + | 67 | 922 | DHCR7 | Proximal | 0 | Not documented | 9 |
| | | | PE | redundant | | | | | | | | | | | |
| L1M4_dup11911 | Uniquely | Yes | PEP: 0108 | Redundant | LINE | Other L1 | chr11: 74541078-74543102 | + | 81 | 2025 | RNF169 | Proximal | 0 | Not documented | 450 |
| L1HS_dup1176 | Multi | Yes | PEP: 0324, | Redundant | LINE | L1PA\|B\|x | chr11: 78388818-78394847 | − | 1.4 | 6030 | TENM4 | Proximal | 0 | EVE annotated | 1 |
| | | | PE | | | | | | | | | | | | |
| AluSz_dup57983 | Multi | Yes | PEP: 0077 | Redundant | SINE | Alu | chr11: 784155-784462 | + | 44 | 308 | AP006621.5 | Proximal | 0 | Not documented | 2 |
| L1PA4_dup9057 | Uniquely | Yes | PEP: 0113, | Redundant | LINE | L1PA\|B\|x | chr11: 81245341-81251463 | − | 21 | 6123 | FAM181B | Distal | 1191591 | EVE annotated | 3 |
| | | | PE | | | | | | | | | | | | |
| L1HS_dup1178 | Multi | Yes | PEP: 0324, | Redundant | LINE | L1PA\|B\|x | chr11: 81866908-81872933 | + | 2.7 | 6026 | FAM181B | Distal | 570121 | EVE annotated | 4 |
| | | | PE | | | | | | | | | | | | |
| L1PA15_dup6234 | Uniquely | Yes | PEP: 0013 | Non | LINE | L1PA\|B\|x | chr11: 85165222-85171708 | − | 76 | 6487 | DLG2 | Proximal | 0 | Not documented | 5 |
| | | | | redundant | | | | | | | | | | | |
| L1HS_dup1185 | Multi | Yes | PEP: 0324, | Redundant | LINE | L1PA\|B\|x | chr11: 92869805-92875839 | + | 1.4 | 6035 | SLC36A4 | Proximal | 1503 | EVE annotated | 6 |
| | | | PE | | | | | | | | | | | | |
| L1PA3_dup8142 | Multi | Yes | PEP: 0210, | Redundant | LINE | L1PA\|B\|x | chr11: 93149299-93152361 | + | 13 | 3063 | CCDC67 | Proximal | 0 | EVE annotated | 7 |
| | | | PE | | | | | | | | | | | | |
| L1HS_dup1186 | Multi | Yes | PEP: 0324, | Redundant | LINE | L1PA\|B\|x | chr11: 93154153-93160197 | + | 1.4 | 6045 | CCDC67 | Proximal | 0 | EVE annotated | 8 |
| | | | PE | | | | | | | | | | | | |
| L1M5_dup44273 | Multi | Yes | PEP: 0091 | Non | LINE | Other L1 | chr11: 94802434-94802578 | − | 140 | 145 | ENDOD1 | Distal | 20397 | Not documented | 9 |
| | | | | redundant | | | | | | | | | | | |
| L1HS_dup1188 | Multi | Yes | PEP: 0210, | Redundant | LINE | L1PA\|B\|x | chr11: 95169381-95175410 | + | 1.4 | 6030 | SESN3 | Distal | 203677 | EVE annotated | 460 |
| | | | PE | | | | | | | | | | | | |
| SVA_F_dup721 | Multi/ | Yes | PEP: 0012, | Redundant | Other | SVA | chr12: 104716578-104717542 | − | 21 | 965 | TXNRD1 | Proximal | 0 | Not documented | 1 |
| | Uniquely | | PE | | | | | | | | | | | | |
| L1PA8_dup6016 | Multi/ | Yes | PEP: 0053, | Redundant | LINE | L1PA\|B\|x | chr12: 107475814-107479613 | + | 34 | 3800 | CRY1 | Proximal | 0 | EVE annotated | 2 |
| | Uniquely | | PE | | | | | | | | | | | | |
| ERVL-E-int_dup6539 | Uniquely | Yes | PEP: 0181 | Non | LTR | ERVL | chr12: 11134596-11135836 | + | 160 | 1241 | TAS2R14 | Proximal | 0 | Not documented | 3 |
| | | | | redundant | | | | | | | | | | | |
| L1HS_dup1256 | Multi | Yes | PEP: 0210, | Redundant | LINE | L1PA\|B\|x | chr12: 126783557-126789584 | − | 1.4 | 6028 | TMEM132B | Distal | 636641 | EVE annotated | 4 |
| | | | PE | | | | | | | | | | | | |
| SVA_D_dup975 | Multi | Yes | PEP: 0284, | Redundant | Other | SVA | chr12: 132410290-132411662 | − | 19 | 1373 | PUS1 | Distal | 2084 | Not documented | 5 |
| | | | PE | | | | | | | | | | | | |
| L1PA3_dup8332 | Multi | Yes | PEP: 0324, | Redundant | LINE | L1PA\|B\|x | chr12: 20820770-20826793 | + | 12 | 6024 | PDE3A | Proximal | 0 | EVE annotated | 6 |
| | | | PE | | | | | | | | | | | | |
| L1PA4_dup9392 | Uniquely | Yes | PEP: 0113, | Redundant | LINE | L1PA\|B\|x | chr12: 31703001-31709139 | − | 18 | 6139 | DENND5B | Proximal | 0 | EVE annotated | 7 |
| | | | PE | | | | | | | | | | | | |
| L1PA3_dup8450 | Uniquely | Yes | PEP: 0113, | Redundant | LINE | L1PA\|B\|x | chr12: 45764630-45770648 | + | 12 | 6019 | ANO6 | Proximal | 0 | EVE annotated | 8 |
| | | | PE | | | | | | | | | | | | |
| SVA_D_dup928 | Multi | Yes | PEP: 0284, | Redundant | Other | SVA | chr12: 49235222-49237100 | + | 18 | 1879 | DDX23 | Proximal | 0 | Not documented | 9 |
| | | | PE | | | | | | | | | | | | |
| SVA_D_dup931 | Multi | Yes | PEP: 0075, | Redundant | Other | SVA | chr12: 49829429-49830392 | − | 31 | 964 | SPATS2 | Proximal | 0 | Not documented | 470 |
| | | | PE | | | | | | | | | | | | |
| L1PA7_dup10346 | Multi/ | Yes | PEP: 0015, | Redundant | LINE | L1PA\|B\|x | chr12: 58820015-58824933 | + | 41 | 4919 | RP11-362K2.2 | Distal | 112975 | EVE annotated | 1 |
| | Uniquely | | PE | | | | | | | | | | | | |
| L1HS_dup1233 | Multi | Yes | PEP: 0324, | Redundant | LINE | L1PA\|B\|x | chr12: 70167191-70173221 | − | 2.3 | 6031 | RAB3IP | Proximal | 0 | EVE annotated | 2 |
| | | | PE | | | | | | | | | | | | |
| MLT2B2_dup1668 | Multi | Yes | PEP: 0193 | Non | LTR | ERVL | chr12: 70573879-70574408 | + | 93 | 530 | CNOT2 | Distal | 62367 | Not documented | |
| | | | | redundant | | | | | | | | | | | |
| SVA_E_dup173 | Multi | Yes | PEP: 0075, | Redundant | Other | SVA | chr12: 70596315-70597562 | + | 32 | 1248 | CNOT2 | Distal | 39213 | Not documented | 4 |
| | | | PE | | | | | | | | | | | | |
| AluY_dup80635 | Multi | Yes | PEP: 0338 | Redundant | SINE | Alu | chr12: 70656048-70656354 | − | 27 | 307 | CNOT2 | Proximal | 0 | Not documented | 5 |
| AluSz_dup62220 | Multi | Yes | PEP: 0341 | Redundant | SINE | Alu | chr12: 7085605-7085893 | + | 44 | 289 | EMG1 | Proximal | 0 | Not documented | 6 |
| HERVL-int_dup1822 | Uniquely | Yes | PEP: 0249 | Redundant | LTR | ERVL | chr12: 75766093-75771061 | − | 49 | 4969 | CAPS2 | Proximal | 0 | EVE annotated | 7 |
| L1M4c_dup4562 | Uniquely | Yes | PEP: 0149 | Redundant | LINE | Other L1 | chr12: 9841361-9844457 | + | 110 | 3097 | CLEC2D | Proximal | 0 | Not documented | 8 |
| L1P3_dup2710 | Uniquely | Yes | PEP: 0303 | Redundant | LINE | L1PA\|B\|x | chr13: 24167940-24172311 | + | 40 | 4372 | TNFRSF19 | Proximal | 0 | Not documented | 9 |
| L1HS_dup1258 | Multi | Yes | PEP: 0210, | Redundant | LINE | L1PA\|B\|x | chr13: 30215844-30221843 | − | 1.4 | 6000 | SLC7A1 | Distal | 46020 | EVE annotated | 480 |
| | | | PE | | | | | | | | | | | | |
| MER21B_dup2011 | Uniquely | Yes | PEP: 0143 | Non | LTR | ERVL | chr13: 31871592-31872407 | − | 77 | 816 | B3GALTL | Proximal | 0 | Not documented | 1 |
| | | | | redundant | | | | | | | | | | | |
| L1HS_dup1261 | Multi | Yes | PEP: 0324, | Redundant | LINE | L1PA\|B\|x | chr13: 35054400-35060431 | − | 2.7 | 6032 | NBEA | Distal | 455994 | EVE annotated | 2 |
| | | | PE | | | | | | | | | | | | |
| L1MC2_dup4820 | Uniquely | Yes | PEP: 0064, | Non | LINE | Other L1 | chr13: 45101485-45105120 | + | 75 | 3636 | TSC22D1 | Proximal | 0 | Not documented | 3 |
| | | | PE | redundant | | | | | | | | | | | |
| ALR/Alpha_dup1020 | Multi | Yes | PEP: 0360, | Redundant | Other | Other | chr14: 19000006-19048872 | − | 63 | 48867 | OR11H12 | Distal | 328651 | Not documented | 4 |
| | | | PE | | | Repeats | | | | | | | | | |
| CER_dup30 | Multi/ | Yes | PEP: 0216, | Redundant | Other | Other | chr14: 19215371-19320499 | − | 67 | 105129 | OR11H12 | Distal | 57024 | Not documented | 5 |
| | Uniquely | | PE | | | Repeats | | | | | | | | | |
| L1PA3_dup9152 | Multi | Yes | PEP: 0231, | Redundant | LINE | L1PA\|B\|x | chr14: 28882082-28883407 | − | 11 | 1326 | FOXG1 | Distal | 351644 | Not documented | 6 |
| | | | PE | | | | | | | | | | | | |
| L1HS_dup1306 | Multi | Yes | PEP: 0210, | Redundant | LINE | L1PA\|B\|x | chr14: 32263063-32267338 | − | 3.2 | 4276 | NUBPL | Proximal | 0 | EVE annotated | 7 |
| | | | PE | | | | | | | | | | | | |
| L1PA5_dup9524 | Multi/ | Yes | PEP: 0324, | Redundant | LINE | L1PA\|B\|x | chr14: 33557268-33563332 | + | 32 | 6065 | NPAS3 | Proximal | 0 | EVE annotated | 8 |
| | Uniquely | | PE | | | | | | | | | | | | |
| MLT1G1_dup2780 | Uniquely | Yes | PEP: 0368 | Redundant | LTR | ERVL- | chr14: 33939014-33939565 | − | 120 | 552 | NPAS3 | Proximal | 0 | Not documented | 9 |
| | | | | | | MaLR | | | | | | | | | |
| L1HS_dup1314 | Multi | Yes | PEP: 0324, | Redundant | LINE | L1PA\|B\|x | chr14: 45946341-45952372 | − | 3.6 | 6032 | MIS18BP1 | Distal | 223599 | EVE annotated | 490 |
| | | | PE | | | | | | | | | | | | |
| MIR_dup136799 | Uniquely | Yes | PEP: 0072 | Non | SINE | MIR | chr14: 51543262-51543524 | − | 120 | 263 | TRIM9 | Proximal | 0 | Not documented | 1 |
| | | | | redundant | | | | | | | | | | | |
| AluSx1_dup77995 | Multi/ | Yes | PEP: 0338 | Redundant | SINE | Alu | chr14: 55185440-55185745 | + | 50 | 306 | SAMD4A | Proximal | 0 | Not documented | 2 |
| | Uniquely | | | | | | | | | | | | | | |
| AluSg_dup29867 | Multi | Yes | PEP: 0201 | Redundant | SINE | Alu | chr14: 55534120-55534420 | − | 47 | 301 | MAPK1IP1L | Proximal | 0 | Not documented | 3 |
| L1HS_dup1332 | Multi | Yes | PEP: 0324, | Redundant | LINE | L1PA\|B\|x | chr14: 71014008-71020039 | + | 2.3 | 6032 | ADAM20 | Distal | 12277 | EVE annotated | 4 |
| | | | PE | | | | | | | | | | | | |
| AluSp_dup35870 | Multi | Yes | PEP: 0338 | Redundant | SINE | Alu | chr14: 74525506-74525809 | + | 35 | 304 | ALDH6A1 | Proximal | 0 | Not documented | 5 |
| SVA_A_dup203 | Multi | Yes | PEP: 0200 | Redundant | Other | SVA | chr14: 92653391-92654300 | − | 32 | 910 | CPSF2 | Distal | 22637 | Not documented | 6 |
| ALR/Alpha_dup1025 | Multi | Yes | PEP: 0336 | Redundant | Other | Other | chr15: 20000001-20022125 | − | 71 | 22125 | GOLGA6L6 | Distal | 714970 | Not documented | 7 |
| | | | | | | Repeats | | | | | | | | | |
| L1HS_dup1341 | Multi | Yes | PEP: 0231 | Redundant | LINE | L1PA\|B\|x | chr15: 20022226-20023450 | − | 0.91 | 1225 | GOLGA6L6 | Distal | 713645 | Not documented | 8 |
| L1PA5_dup9834 | Multi | Yes | PEP: 0219, | Redundant | LINE | L1PA\|B\|x | chr15: 25500761-25506894 | + | 30 | 6134 | UBE3A | Distal | 75488 | EVE annotated | 9 |
| | | | PE | | | | | | | | | | | | |
| SVA_D_dup1058 | Multi | Yes | PEP: 0075, | Redundant | Other | SVA | chr15: 27248371-27249814 | − | 11 | 1444 | GABRG3 | Proximal | 0 | Not documented | 500 |
| | | | PE | | | | | | | | | | | | |
| L1MC1_dup11204 | Uniquely | Yes | PEP: 0106 | Non | LINE | Other L1 | chr15: 35661914-35663738 | + | 74 | 1825 | DPH6 | Proximal | 0 | Not documented | 1 |
| | | | | redundant | | | | | | | | | | | |
| AluSx1_dup80906 | Multi | Yes | PEP: 0338 | Redundant | SINE | Alu | chr15: 41590812-41591106 | + | 51 | 295 | OIP5 | Distal | 10361 | Not documented | 2 |
| L1PA5_dup9899 | Uniquely | Yes | PEP: 0303 | Redundant | LINE | L1PA\|B\|x | chr15: 46717128-46723258 | + | 33 | 6131 | FKSG62 | Distal | 702436 | Not documented | 3 |
| L1M1_dup8362 | Uniquely | Yes | PEP: 0334 | Non | LINE | Other L1 | chr15: 46809737-46813656 | + | 99 | 3920 | FKSG62 | Distal | 612038 | Not documented | 4 |
| | | | | redundant | | | | | | | | | | | |
| SVA_D_dup1070 | Multi | Yes | PEP: 0284, | Redundant | Other | SVA | chr15: 50449925-50451308 | + | 20 | 1384 | ATP8B4 | Proximal | 0 | Not documented | 5 |
| | | | PE | | | | | | | | | | | | |
| SVA_D_dup1072 | Multi | Yes | PEP: 0075, | Redundant | Other | SVA | chr15: 52577645-52579153 | + | 20 | 1509 | MYO5C | Proximal | 0 | Not documented | 6 |
| | | | PE | | | | | | | | | | | | |
| SVA_D_dup1074 | Multi | Yes | PEP: 0075, | Redundant | Other | SVA | chr15: 56402252-56403872 | + | 34 | 1621 | RFX7 | Proximal | 0 | Not documented | 7 |
| | | | PE | | | | | | | | | | | | |
| L1PA6_dup5230 | Uniquely | Yes | PEP: 0113 | Redundant | LINE | L1PA\|B\|x | chr15: 56691188-56697340 | + | 31 | 6153 | TEX9 | Proximal | 0 | EVE annotated | 8 |
| SVA_C_dup230 | Multi | Yes | PEP: 0284, | Redundant | Other | SVA | chr15: 61238433-61239907 | + | 14 | 1475 | RORA | Proximal | 0 | Not documented | 9 |
| | | | PE | | | | | | | | | | | | |
| L1HS_dup1360 | Multi | Yes | PEP: 0324, | Redundant | LINE | L1PA\|B\|x | chr15: 71022084-71027499 | + | 0.91 | 5416 | UACA | Proximal | 0 | EVE annotated | 510 |
| | | | PE | | | | | | | | | | | | |
| L1PA7_dup11763 | Uniquely | Yes | PEP: 0290, | Redundant | LINE | L1PA\|B\|x | chr15: 71260341-71266080 | − | 39 | 5740 | LRRC49 | Proximal | 0 | Not documented | 1 |
| | | | PE | | | | | | | | | | | | |
| AluSx1_dup82767 | Multi | Yes | PEP: 0077 | Redundant | SINE | Alu | chr15: 80199851-80200079 | + | 55 | 229 | ST20 | Proximal | 0 | Not documented | 2 |
| L1HS_dup1366 | Multi | Yes | PEP: 0210, | Redundant | LINE | L1PA\|B\|x | chr15: 83551646-83557671 | − | 1.4 | 6026 | HOMER2 | Proximal | 0 | EVE annotated | 3 |
| | | | PE | | | | | | | | | | | | |
| MIR3_dup75620 | Multi/ | Yes | PEP: 0133 | Non | SINE | MIR | chr15: 83673660-83673823 | + | 160 | 164 | C15orf40 | Proximal | 0 | Not documented | 4 |
| | Uniquely | | | redundant | | | | | | | | | | | |
| HERV4_I-int_dup288 | Uniquely | Yes | PEP: 0335, | Non | LTR | ERV1 | chr15: 90006206-90012622 | + | 37 | 6417 | RHCG | Proximal | 0 | EVE annotated | 5 |
| | | | PE | redundant | | | | | | | | | | | |
| L1HS_dup1374 | Multi | Yes | PEP: 0324, | Redundant | LINE | L1PA\|B\|x | chr16: 16934394-16940413 | − | 1.8 | 6020 | XYLT1 | Distal | 255214 | EVE annotated | 6 |
| | | | PE | | | | | | | | | | | | |
| ALR/Alpha_dup1050 | Multi | Yes | PEP: 0087 | Redundant | Other | Other | chr16: 33902322-33910905 | − | 71 | 8584 | RP11-812E19.9 | Distal | 254627 | Not documented | 7 |
| | | | | | | Repeats | | | | | | | | | |
| ALR/Alpha_dup1055 | Multi | Yes | PEP: 0087 | Redundant | Other | Other | chr16: 33981456-33997390 | + | 72 | 15935 | CTD-2144E22.5 | Distal | 259118 | Not documented | 8 |
| | | | | | | Repeats | | | | | | | | | |
| ALR/Alpha_dup1060 | Multi | Yes | PEP: 0087, | Redundant | Other | Other | chr16: 34005354-34016791 | − | 70 | 11438 | CTD-2144E22.5 | Distal | 239717 | EVE annotated | 9 |
| | | | PE | | | Repeats | | | | | | | | | |
| L1HS_dup1382 | Multi | Yes | PEP: 0324, | Redundant | LINE | L1PA\|B\|x | chr16: 34016792-34021340 | − | 17 | 4549 | CTD-2144E22.5 | Distal | 235168 | EVE annotated | 520 |
| | | | PE | | | | | | | | | | | | |
| MIR3_dup77616 | Multi | Yes | PEP: 0343 | Non | SINE | MIR | chr16: 56717268-56717422 | − | 140 | 155 | MT1X | Proximal | 0 | Not documented | 1 |
| | | | | redundant | | | | | | | | | | | |
| L1HS_dup1395 | Multi | Yes | PEP: 0210, | Redundant | LINE | L1PA\|B\|x | chr16: 65723915-65729923 | + | 5 | 6009 | CDH11 | Distal | 563901 | EVE annotated | 2 |
| | | | PE | | | | | | | | | | | | |
| AluSz6_dup37377 | Multi/ | Yes | PEP: 0074 | Redundant | SINE | Alu | chr16: 70702034-70702322 | + | 71 | 289 | MTSS1L | Proximal | 0 | Not documented | 3 |
| | Uniquely | | | | | | | | | | | | | | |
| AluSq2_dup44494 | Multi/ | Yes | PEP: 0339 | Redundant | SINE | Alu | chr16: 70705970-70706273 | + | 50 | 304 | MTSS1L | Proximal | 0 | Not documented | 4 |
| | Uniquely | | | | | | | | | | | | | | |
| L1MA2_dup6686 | Uniquely | Yes | PEP: 0332, | Redundant | LINE | Other L1 | chr16: 72482343-72487601 | − | 53 | 5259 | PMFBP1 | Distal | 271567 | Not documented | 5 |
| | | | PE | | | | | | | | | | | | |
| L1HS_dup1372 | Multi | Yes | PEP: 0210, | Redundant | LINE | L1PA\|B\|x | chr16: 8107922-8110803 | + | 2.3 | 2882 | RBFOX1 | Distal | 344583 | EVE annotated | 6 |
| | | | PE | | | | | | | | | | | | |
| L1HS_dup1399 | Multi | Yes | PEP: 0324, | Redundant | LINE | L1PA\|B\|x | chr16: 83670858-83676901 | + | 1.4 | 6044 | CDH13 | Proximal | | EVE annotated | 7 |
| | | | PE | | | | | | | | | | | | |
| L1MDa_dup6175 | Uniquely | Yes | PEP: 0096 | Redundant | LINE | Other L1 | chr17: 19938218-19938923 | − | 83 | 706 | SPECC1 | Proximal | 0 | Not documented | 8 |
| HERVK9-int_dup571 | Uniquely | Yes | PEP: 0107 | Non | LTR | ERVK | chr17: 20981128-20983385 | − | 51 | 2258 | USP22 | Distal | 34056 | EVE annotated | 9 |
| | | | | redundant | | | | | | | | | | | |
| AluSz6_dup38489 | Multi | Yes | PEP: 0008 | Redundant | SINE | Alu | chr17: 33477943-33478114 | − | 63 | 172 | UNC45B | Proximal | 0 | Not documented | 530 |
| Harlequin-int_dup432 | Uniquely | Yes | PEP: 0038 | Non | LTR | ERV1 | chr17: 41312738-41317903 | − | 27 | 5166 | NBR1 | Distal | 4596 | EVE annotated | 1 |
| | | | | redundant | | | | | | | | | | | |
| Tigger5_dup2360 | Uniquely | Yes | PEP: 0298, | Non | DNA | DNA | chr17: 57776702-57777518 | − | 48 | 817 | PTRH2 | Proximal | 0 | Not documented | 2 |
| | | | PE | redundant | | | | | | | | | | | |
| MIR3_dup78920 | Multi | Yes | PEP: 0301 | Non | SINE | MIR | chr17: 6027127-6027256 | + | 120 | 130 | WSCD1 | Proximal | 0 | Not documented | 3 |
| | | | | redundant | | | | | | | | | | | |
| AluJb_dup123717 | Uniquely | Yes | PEP: 0089 | Non | SINE | Alu | chr17: 66102544-66102866 | − | 75 | 323 | KPNA2 | Distal | 59587 | Not documented | 4 |
| | | | | redundant | | | | | | | | | | | |
| L1HS_dup1413 | Multi | Yes | PEP: 0210, | Redundant | LINE | L1PA\|B\|x | chr17: 68455098-68461128 | + | 1.4 | 6031 | KCNJ2 | Distal | 278910 | EVE annotated | 5 |
| | | | PE | | | | | | | | | | | | |
| AluSx_dup121658 | Multi | Yes | PEP: 0008, | Redundant | SINE | Alu | chr17: 74560233-74560505 | − | 60 | 273 | ST6GALNAC2 | Proximal | 0 | Not documented | 6 |
| | | | PE | | | | | | | | | | | | |
| THE1B_dup20543 | Multi | Yes | PEP: 0251 | Non | LTR | ERVL- | chr17: 74560657-74560763 | + | 51 | 107 | ST6GALNAC2 | Proximal | 0 | Not documented | 7 |
| | | | | redundant | | MaLR | | | | | | | | | |
| MER76_dup633 | Multi | Yes | PEP: 0245 | Non | LTR | ERVL | chr17: 80005780-80006205 | − | 120 | 426 | RFNG | Proximal | 0 | Not documented | 8 |
| | | | | redundant | | | | | | | | | | | |
| CER_dup34 | Multi | Yes | PEP: 0356 | Non | Other | Other | chr18: 15235272-15246086 | + | 59 | 10815 | ANKRD30B | Distal | 382536 | Not documented | 9 |
| | | | | redundant | | Repeats | | | | | | | | | |
| AluJr_dup67276 | Multi/ | Yes | PEP: 0270 | Redundant | SINE | Alu | chr18: 22032766-22033030 | − | 75 | 265 | IMPACT | Proximal | 0 | Not documented | 540 |
| | Uniquely | | | | | | | | | | | | | | |
| L1MEf_dup12734 | Uniquely | Yes | PEP: 0149 | Redundant | LINE | Other L1 | chr18: 31786186-31788259 | − | 130 | 2074 | NOL4 | Proximal | 0 | Not documented | 1 |
| L2c_dup130480 | Uniquely | Yes | PEP: 0063, | Non | LINE | L2 | chr18: 32198764-32200368 | − | 160 | 1605 | DTNA | Proximal | 0 | Not documented | 2 |
| | | | PE | redundant | | | | | | | | | | | |
| L2b_dup87581 | Uniquely | Yes | PEP: 0078 | Non | LINE | L2 | chr18: 32280212-32282205 | + | 150 | 1994 | DTNA | Proximal | 0 | Not documented | 3 |
| | | | | redundant | | | | | | | | | | | |
| AluJo_dup62764 | Multi | Yes | PEP: 0270 | Redundant | SINE | Alu | chr18: 32404712-32404809 | − | 79 | 98 | DTNA | Proximal | 0 | Not documented | 4 |
| L1PA3_dup10033 | Multi | Yes | PEP: 0324, | Redundant | LINE | L1PA\|B\|x | chr18: 32474739-32480892 | + | 17 | 6154 | DTNA | Distal | 2932 | EVE annotated | 5 |
| | | | PE | | | | | | | | | | | | |
| L1PA10_dup6514 | Multi/ | Yes | PEP: 0003, | Redundant | LINE | L1PA\|B\|x | chr18: 32839824-32841822 | − | 34 | 1999 | ZNF397 | Proximal | 0 | Not documented | 6 |
| | Uniquely | | PE | | | | | | | | | | | | |
| L1HS_dup1439 | Multi | Yes | PEP: 0169, | Redundant | LINE | L1PA\|B\|x | chr18: 41031549-41032491 | + | 2.3 | 943 | SYT4 | Distal | 173935 | Not documented | 7 |
| | | | PE | | | | | | | | | | | | |
| HAL1_dup25212 | Uniquely | Yes | PEP: 0283 | Non | LINE | Other L1 | chr18: 45444224-45445733 | + | 120 | 1510 | SMAD2 | Proximal | 0 | Not documented | 8 |
| | | | | redundant | | | | | | | | | | | |
| L1HS_dup1463 | Multi | Yes | PEP: 0145, | Redundant | LINE | L1PA\|B\|x | chr18: 68352434-68353930 | − | 2.7 | 1497 | GTSCR1 | Distal | 34455 | Not documented | 9 |
| | | | PE | | | | | | | | | | | | |
| L1ME1_dup29500 | Multi | Yes | PEP: 0040, | Non | LINE | Other L1 | chr18: 73443999-73446189 | + | 120 | 2191 | SMIM21 | Distal | 304342 | Not documented | 550 |
| | | | PE | redundant | | | | | | | | | | | |
| L1PA4_dup11311 | Multi | Yes | PEP: 0215, | Redundant | LINE | L1PA\|B\|x | chr19: 20810588-20816745 | − | 22 | 6158 | ZNF626 | Proximal | 0 | EVE annotated | 1 |
| | | | PE | | | | | | | | | | | | |
| L1PA2_dup4699 | Multi | Yes | PEP: 0324, | Redundant | LINE | L1PA\|B\|x | chr19: 24073248-24079257 | − | 15 | 6010 | ZNF726 | Distal | 18422 | EVE annotated | 2 |
| | | | PE | | | | | | | | | | | | |
| L1PA3_dup10214 | Multi | Yes | PEP: 0145, | Redundant | LINE | L1PA\|B\|x | chr19: 24295543-24298489 | + | 17 | 2947 | ZNF254 | Proximal | 0 | EVE annotated | 3 |
| | | | PE | | | | | | | | | | | | |
| ALR/Alpha_dup1252 | Uniquely | Yes | PEP: 0300 | Non | Other | Other | chr19: 28212954-28218421 | − | 99 | 5468 | UQCRFS1 | Distal | 1479753 | Not documented | 4 |
| | | | | redundant | | Repeats | | | | | | | | | |
| SVA_F_dup917 | Multi | Yes | PEP: 0075, | Redundant | Other | SVA | chr19: 30389241-30390240 | − | 20 | 1000 | URI1 | Distal | 24312 | Not documented | 5 |
| | | | PE | | | | | | | | | | | | |
| L1PA17_dup4621 | Multi | Yes | PEP: 0313 | Non | LINE | L1PA\|B\|x | chr19: 35856441-35857924 | + | 110 | 1484 | GPR42 | Distal | 3908 | Not documented | 6 |
| | | | | redundant | | | | | | | | | | | |
| SVA_C_dup263 | Multi | Yes | PEP: 0284, | Redundant | Other | SVA | chr19: 36559267-36560956 | − | 16 | 1690 | WDR62 | Proximal | 0 | Not documented | 7 |
| | | | PE | | | | | | | | | | | | |
| HERVS71-int_dup155 | Multi | Yes | PEP: 0086 | Redundant | LTR | ERV1 | chr19: 36818249-36821384 | − | 50 | 3136 | ZFP14 | Distal | 5779 | EVE annotated | 8 |
| L1M2_dup8525 | Multi | Yes | PEP: 0190 | Non | LINE | Other L1 | chr19: 37656289-37656473 | − | 140 | 185 | ZNF585A | Proximal | 0 | Not documented | 9 |
| | | | | redundant | | | | | | | | | | | |
| LTR5_Hs_dup560 | Multi | Yes | PEP: 0261 | Redundant | LTR | ERVK | chr19: 38356817-38357784 | + | 3.6 | 968 | WDR87 | Distal | 17680 | Not documented | 560 |
| L1PA11_dup3959 | Multi | Yes | PEP: 0100 | Redundant | LINE | L1PA\|B\|x | chr19: 44473801-44478910 | + | 50 | 5110 | ZNF155 | Proximal | 0 | Not documented | 1 |
| SVA_D_dup1277 | Multi | Yes | PEP: 0075, | Redundant | Other | SVA | chr19: 46150779-46152484 | + | 18 | 1706 | EML2 | Proximal | 1893 | Not documented | 2 |
| | | | PE | | | | | | | | | | | | |
| AluYa5_dup3714 | Multi | Yes | PEP: 0044 | Redundant | SINE | Alu | chr19: 50640453-50640584 | − | 48 | 132 | IZUMO2 | Distal | 15222 | Not documented | 3 |
| AluSx1_dup102038 | Uniquely | Yes | PEP: 0006 | Redundant | SINE | Alu | chr19: 50987276-50987584 | − | 47 | 309 | EMC10 | Proximal | 669 | Not documented | 4 |
| SVA_D_dup1282 | Multi | Yes | PEP: 0075, | Redundant | Other | SVA | chr19: 52456124-52456907 | + | 14 | 784 | ZNF613 | Distal | 4113 | Not documented | 5 |
| | | | PE | | | | | | | | | | | | |
| MER21C_dup5086 | Uniquely | Yes | PEP: 0260 | Non | LTR | ERVL | chr19: 52517616-52518262 | − | 110 | 647 | ZNF614 | Proximal | 0 | Not documented | 6 |
| | | | | redundant | | | | | | | | | | | |
| SVA_E_dup217 | Multi | Yes | PEP: 0075, | Redundant | Other | SVA | chr19: 53314169-53316035 | + | 11 | 1867 | ZNF28 | Proximal | 0 | Not documented | 7 |
| | | | PE | | | | | | | | | | | | |
| SVA_E_dup220 | Multi | Yes | PEP: 0075, | Redundant | Other | SVA | chr19: 53689207-53690174 | − | 27 | 968 | ZNF665 | Proximal | 0 | Not documented | 8 |
| | | | PE | | | | | | | | | | | | |
| Tigger2a_dup3153 | Multi | Yes | PEP: 0167 | Non | DNA | DNA | chr19: 53756075-53756530 | − | 75 | 456 | ZNF677 | Proximal | 0 | Not documented | 9 |
| | | | | redundant | | | | | | | | | | | |
| L1HS_dup1486 | Multi | Yes | PEP: 0145, | Redundant | LINE | L1PA\|B\|x | chr19: 55091668-55097367 | − | 38 | 5700 | LILRA2 | Proximal | 0 | EVE annotated | 570 |
| | | | PE | | | | | | | | | | | | |
| L1PA11_dup3963 | Uniquely | Yes | PEP: 0140 | Redundant | LINE | L1PA\|B\|x | chr19: 57309708-57310995 | + | 40 | 1288 | ZIM2 | Proximal | 0 | Not documented | 1 |
| HERVL-int_dup2168 | Uniquely | Yes | PEP: 0310 | Redundant | LTR | ERVL | chr19: 57706458-57711314 | − | 30 | 4857 | ZNF264 | Proximal | 0 | EVE annotated | 2 |
| L1MEe_dup11189 | Multi/ | Yes | PEP: 0362 | Non | LINE | Other L1 | chr19: 57818984-57819694 | − | 120 | 711 | ZNF543 | Distal | 12184 | Not documented | 3 |
| | Uniquely | | | redundant | | | | | | | | | | | |
| L1PA4_dup11411 | Multi | Yes | PEP: 0219, | Redundant | LINE | L1PA\|B\|x | chr19: 58240488-58244802 | + | 19 | 4315 | AC003006.7 | Proximal | 0 | EVE annotated | 4 |
| | | | PE | | | | | | | | | | | | |
| HERVK3-int_dup297 | Multi | Yes | PEP: 0330, | Redundant | LTR | ERVK | chr19: 58822615-58824644 | + | 83 | 2030 | AC010642.1 | Proximal | 0 | EVE annotated | 5 |
| | | | PE | | | | | | | | | | | | |
| L1PA6_dup638 | Multi/ | Yes | PEP: 0145, | Redundant | LINE | L1PA\|B\|x | chr2: 104087133-104092702 | − | 34 | 5570 | TMEM182 | Distal | 626782 | EVE annotated | 6 |
| | Uniquely | | PE | | | | | | | | | | | | |
| L1MA2_dup746 | Uniquely | Yes | PEP: 0124 | Non | LINE | Other L1 | chr2: 105331200-105334955 | − | 65 | 3756 | POU3F3 | Distal | 137015 | Not documented | 7 |
| | | | | redundant | | | | | | | | | | | |
| MIR_dup21736 | Uniquely | Yes | PEP: 0049 | Non | SINE | MIR | chr2: 105953233-105953438 | + | 110 | 206 | C2orf49 | Proximal | 379 | Not documented | 8 |
| | | | | redundant | | | | | | | | | | | |
| L1HS_dup164 | Multi | Yes | PEP: 0324, | Redundant | LINE | L1PA\|B\|x | chr2: 113261390-113267422 | − | 2.3 | 6033 | TTL | Proximal | 0 | EVE annotated | 9 |
| | | | PE | | | | | | | | | | | | |
| L2_dup7269 | Multi | Yes | PEP: 0067 | Redundant | LINE | L2 | chr2: 114383106-114383268 | + | 130 | 163 | RABLZA | Proximal | 1539 | Not documented | 580 |
| AluJb_dup18789 | Multi | Yes | PEP: 0224, | Redundant | SINE | Alu | chr2: 128604936-128605224 | + | 79 | 289 | POLR2D | Proximal | 0 | Not documented | 1 |
| | | | PE | | | | | | | | | | | | |
| L1PA3_dup1176 | Multi | Yes | PEP: 0145, | Redundant | LINE | L1PA\|B\|x | chr2: 132957414-132959879 | + | 12 | 2466 | ANKRD30BL | Proximal | 0 | EVE annotated | 2 |
| | | | PE | | | | | | | | | | | | |
| SVA_D_dup192 | Multi | Yes | PEP: 0233 | Redundant | Other | SVA | chr2: 132977958-132978887 | + | 20 | 930 | ANKRD30BL | Proximal | 0 | Not documented | 3 |
| L1PA3_dup1177 | Multi | Yes | PEP: 0324, | Redundant | LINE | L1PA\|B\|x | chr2: 132988899-132994855 | + | 15 | 5957 | ANKRD30BL | Proximal | 0 | EVE annotated | 4 |
| | | | PE | | | | | | | | | | | | |
| L1PA4_dup1338 | Multi | Yes | PEP: 0219, | Redundant | LINE | L1PA\|B\|x | chr2: 133286455-133292577 | + | 20 | 6123 | GPR39 | Proximal | 0 | EVE annotated | 5 |
| | | | PE | | | | | | | | | | | | |
| L1PA7_dup1431 | Multi | Yes | PEP: 0053, | Redundant | LINE | L1PA\|B\|x | chr2: 142199999-142206420 | − | 46 | 6422 | LRP1B | Proximal | 0 | EVE annotated | 6 |
| | | | PE | | | | | | | | | | | | |
| L2a_dup23251 | Uniquely | Yes | PEP: 0262, | Non | LINE | L2 | chr2: 142661213-142663222 | − | 160 | 2010 | LRP1B | Proximal | 0 | Not documented | 7 |
| | | | PE | redundant | | | | | | | | | | | |
| L1PA7_dup1433 | Multi | Yes | PEP: 0163 | Redundant | LINE | L1PA\|B\|x | chr2: 142772780-142773280 | + | 37 | 501 | LRP1B | Proximal | 0 | Not documented | 8 |
| L1HS_dup179 | Multi | Yes | PEP: 0210, | Redundant | LINE | L1PA\|B\|x | chr2: 144618526-144624556 | + | 2.3 | 6031 | GTDC1 | Distal | 71080 | EVE annotated | 9 |
| | | | PE | | | | | | | | | | | | |
| L1HS_dup181 | Multi | Yes | PEP: 0324, | Redundant | LINE | L1PA\|B\|x | chr2: 153864281-153870310 | − | 3.2 | 6030 | ARL6IP6 | Distal | 246515 | EVE annotated | 590 |
| | | | PE | | | | | | | | | | | | |
| L1PA8A_dup203 | Uniquely | Yes | PEP: 0185 | Redundant | LINE | L1PA\|B\|x | chr2: 15484374-15487251 | + | 41 | 2878 | NBAS | Proximal | | EVE annotated | 1 |
| L1PA4_dup1483 | Uniquely | Yes | PEP: 0113 | Redundant | LINE | L1PA\|B\|x | chr2: 169723779-169727875 | + | 16 | 4097 | SPC25 | Proximal | 0 | EVE annotated | 2 |
| L1HS_dup192 | Multi | Yes | PEP: 0324, | Redundant | LINE | L1PA\|B\|x | chr2: 170105134-170111166 | + | 2.3 | 6033 | LRP2 | Proximal | 0 | EVE annotated | 3 |
| | | | PE | | | | | | | | | | | | |
| L1HS_dup194 | Multi | Yes | PEP: 0324, | Redundant | LINE | L1PA\|B\|x | chr2: 176346694-176352722 | − | 2.3 | 6029 | ATP5G3 | Distal | 297360 | EVE annotated | 4 |
| | | | PE | | | | | | | | | | | | |
| L1PA6_dup790 | Uniquely | Yes | PEP: 0303 | Redundant | LINE | L1PA\|B\|x | chr2: 179216841-179222974 | + | 34 | 6134 | OSBPL6 | Proximal | 0 | EVE annotated | 5 |
| L1HS_dup206 | Multi | Yes | PEP: 0324, | Redundant | LINE | L1PA\|B\|x | chr2: 197770312-197776343 | + | 1.8 | 6032 | PGAP1 | Proximal | 0 | EVE annotated | 6 |
| | | | PE | | | | | | | | | | | | |
| AluSz6_dup6483 | Multi | Yes | PEP: 0008 | Redundant | SINE | Alu | chr2: 198339128-198339427 | + | 49 | 300 | COQ10B | Proximal | 0 | Not documented | 7 |
| L1PA7_dup1817 | Uniquely | Yes | PEP: 0002 | Non | LINE | L1PA\|B\|x | chr2: 210352720-210359164 | + | 42 | 6445 | MAP2 | Proximal | 0 | EVE annotated | 8 |
| | | | | redundant | | | | | | | | | | | |
| L1HS_dup122 | Multi | Yes | PEP: 0324, | Redundant | LINE | L1PA\|B\|x | chr2: 214431956-214437986 | − | 3.6 | 6031 | SPAG16 | Proximal | 0 | EVE annotated | 9 |
| | | | PE | | | | | | | | | | | | |
| AluSx_dup21091 | Multi | Yes | PEP: 0132 | Redundant | SINE | Alu | chr2: 224831952-224832249 | − | 52 | 298 | MRPL44 | Proximal | 0 | Not documented | 600 |
| L1PA6_dup514 | Multi | Yes | PEP: 0324, | Redundant | LINE | L1PA\|B\|x | chr2: 24318028-24324128 | + | 29 | 6101 | FAM228B | Proximal | 0 | EVE annotated | 1 |
| | | | PE | | | | | | | | | | | | |
| AluSq10_dup194 | Uniquely | Yes | PEP: 0321 | Redundant | SINE | Alu | chr2: 27099830-27100133 | − | 28 | 304 | DPYSL5 | Proximal | 0 | Not documented | 2 |
| L1HS_dup126 | Multi | Yes | PEP: 0324, | Redundant | LINE | L1PA\|B\|x | chr2: 4781320-4787350 | + | 1.4 | 6031 | DCDC2C | Distal | 945199 | EVE annotated | 3 |
| | | | PE | | | | | | | | | | | | |
| L1PA2_dup376 | Multi | Yes | PEP: 0210, | Redundant | LINE | L1PA\|B\|x | chr2: 49235167-49238753 | − | 10 | 3587 | FSHR | Proximal | 0 | EVE annotated | 4 |
| | | | PE | | | | | | | | | | | | |
| L1PA6_dup549 | Multi | Yes | PEP: 0219 | Redundant | LINE | L1PA\|B\|x | chr2: 49454726-49460932 | − | 41 | 6207 | FSHR | Distal | 73051 | EVE annotated | 5 |
| AluJr_dup7585 | Uniquely | Yes | PEP: 0292 | Non | SINE | Alu | chr2: 51099809-51100150 | + | 72 | 342 | NRXN1 | Proximal | 0 | Not documented | 6 |
| | | | | redundant | | | | | | | | | | | |
| L1MA2_dup599 | Uniquely | Yes | PEP: 0155 | Redundant | LINE | Other L1 | chr2: 51616498-51618520 | − | 81 | 2023 | NRXN1 | Distal | 356825 | Not documented | 7 |
| L1PA7_dup1105 | Multi/ | Yes | PEP: 0303 | Redundant | LINE | L1PA\|B\|x | chr2: 51618536-51624774 | + | 52 | 6239 | NRXN1 | Distal | 358863 | EVE annotated | 8 |
| | Uniquely | | | | | | | | | | | | | | |
| L1PA2_dup398 | Multi/ | Yes | PEP: 0324, | Redundant | LINE | L1PA\|B\|x | chr2: 63062614-63068633 | + | 9.1 | 6020 | EHBP1 | Proximal | 0 | EVE annotated | 9 |
| | Uniquely | | PE | | | | | | | | | | | | |
| L1ME4a_dup4569 | Multi | Yes | PEP: 0214, | Redundant | LINE | Other L1 | chr2: 70131996-70132774 | − | 130 | 779 | MXD1 | Proximal | 0 | Not documented | 610 |
| | | | PE | | | | | | | | | | | | |
| L1HS_dup150 | Multi | Yes | PEP: 0145, | Redundant | LINE | L1PA\|B\|x | chr2: 81834791-81836329 | − | 3.6 | 1539 | CTNNA2 | Distal | 958887 | Not documented | 1 |
| | | | PE | | | | | | | | | | | | |
| L1HS_dup155 | Multi | Yes | PEP: 0324, | Redundant | LINE | L1PA\|B\|x | chr2: 86882362-86888391 | − | 2.7 | 6030 | RNF103-CHMP3 | Proximal | 0 | EVE annotated | 2 |
| | | | PE | | | | | | | | | | | | |
| L1HS_dup157 | Multi | Yes | PEP: 0210, | Redundant | LINE | L1PA\|B\|x | chr2: 89029231-89032287 | + | 2.3 | 3057 | RPIA | Proximal | 0 | EVE annotated | 3 |
| | | | PE | | | | | | | | | | | | |
| L1MC_dup1182 | Multi | Yes | PEP: 0125 | Redundant | LINE | Other L1 | chr2: 90280090-90280485 | + | 140 | 396 | CH17-132F21.1 | Distal | 177717 | Not documented | 4 |
| L1M4_dup1621 | Multi | Yes | PEP: 0125 | Redundant | LINE | Other L1 | chr2: 91754408-91754815 | − | 140 | 408 | RP11-685N3.1 | Distal | 1216012 | Not documented | 5 |
| L1M5_dup61233 | Multi | Yes | PEP: 0350 | Non | LINE | Other L1 | chr20: 26031358-26031842 | + | 120 | 485 | FAM182B | Distal | 182498 | Not documented | 6 |
| | | | | redundant | | | | | | | | | | | |
| L1MA4A_dup6060 | Multi/ | Yes | PEP: 0365 | Non | LINE | Other L1 | chr20: 39819111-39821807 | − | 89 | 2697 | ZHX3 | Proximal | 0 | Not documented | 7 |
| | Uniquely | | | redundant | | | | | | | | | | | |
| MIRb_dup216177 | Uniquely | Yes | PEP: 0081 | Redundant | SINE | MIR | chr20: 50173854-50174018 | + | 130 | 165 | NFATC2 | Proximal | 0 | Not documented | 8 |
| MLT1H_dup9158 | Multi | Yes | PEP: 0353 | Non | LTR | ERVL- | chr20: 628009-628491 | + | 100 | 483 | SRXN1 | Proximal | 0 | Not documented | 9 |
| | | | | redundant | | MaLR | | | | | | | | | |
| MIRb_dup211037 | Multi | Yes | PEP: 0222 | Non | SINE | MIR | chr20: 629090-629241 | − | 170 | 152 | SRXN1 | Proximal | 0 | Not documented | 620 |
| | | | | redundant | | | | | | | | | | | |
| L1HS_dup1490 | Multi | Yes | PEP: 0324, | Redundant | LINE | L1PA\|B\|x | chr20: 7096829-7102846 | − | 2.7 | 6018 | BMP2 | Distal | 335903 | EVE annotated | 1 |
| | | | PE | | | | | | | | | | | | |
| L1PA7_dup12693 | Uniquely | Yes | PEP: 0052 | Redundant | LINE | L1PA\|B\|x | chr21: 17596650-17603025 | + | 44 | 6376 | USP25 | Distal | 344274 | Not documented | 2 |
| L1PA2_dup4819 | Multi | Yes | PEP: 0145, | Redundant | LINE | L1PA\|B\|x | chr21: 27290680-27296704 | + | 5.5 | 6025 | APP | Proximal | 0 | EVE annotated | 3 |
| | | | PE | | | | | | | | | | | | |
| L1PA3_dup10425 | Multi | Yes | PEP: 0324, | Redundant | LINE | L1PA\|B\|x | chr21: 9656297-9662430 | − | 26 | 6134 | TPTE | Distal | 1243772 | EVE annotated | 4 |
| | | | PE | | | | | | | | | | | | |
| SATR1_dup508 | Multi | Yes | PEP: 0041 | Redundant | Other | Other | chr21: 9732221-9733136 | + | 85 | 916 | TPTE | Distal | 1173066 | Not documented | 5 |
| | | | | | | Repeats | | | | | | | | | |
| TAR1_dup146 | Multi | Yes | PEP: 0269 | Redundant | Other | Other | chr21: 9881896-9882569 | + | 77 | 674 | TPTE | Distal | 1023633 | Not documented | 6 |
| | | | | | | Repeats | | | | | | | | | |
| L1PA7_dup12670 | Multi | Yes | PEP: 0168, | Redundant | LINE | L1PA\|B\|x | chr21: 9976908-9982108 | − | 42 | 5201 | TPTE | Distal | 924094 | EVE annotated | 7 |
| | | | PE | | | | | | | | | | | | |
| HERVK9-int_dup632 | Multi | Yes | PEP: 0147 | Redundant | LTR | ERVK | chr21: 9989864-9992670 | − | 32 | 2807 | TPTE | Distal | 913532 | EVE annotated | 8 |
| CER_dup42 | Multi | Yes | PEP: 0266 | Redundant | Other | Other | chr22: 16506892-16608196 | − | 67 | 101305 | OR11H1 | Distal | 57088 | Not documented | 9 |
| | | | | | | Repeats | | | | | | | | | |
| CER_dup43 | Multi | Yes | PEP: 0069 | Redundant | Other | Other | chr22: 16608226-16626569 | + | 65 | 18344 | OR11H1 | Distal | 158422 | Not documented | 630 |
| | | | | | | Repeats | | | | | | | | | |
| L1PA5_dup11139 | Uniquely | Yes | PEP: 0116, | Redundant | LINE | L1PA\|B\|x | chr22: 28924936-28931063 | + | 30 | 6128 | TTC28 | Proximal | 0 | EVE annotated | 1 |
| | | | PE | | | | | | | | | | | | |
| L1HS_dup1524 | Multi | Yes | PEP: 0324, | Redundant | LINE | L1PA\|B\|x | chr22: 29059272-29065303 | + | 1.8 | 6032 | TTC28 | Proximal | 0 | EVE annotated | 7 |
| | | | PE | | | | | | | | | | | | |
| L1M2c_dup430 | Uniquely | Yes | PEP: 0217 | Non | LINE | Other L1 | chr22: 38767606-38771715 | − | 98 | 4110 | CSNK1E | Proximal | 0 | Not documented | 3 |
| | | | | redundant | | | | | | | | | | | |
| L1HS_dup1527 | Multi | Yes | PEP: 0324, | Redundant | LINE | L1PA\|B\|x | chr22: 49381574-49387604 | − | 1.8 | 6031 | FAM19A5 | Distal | 134851 | EVE annotated | 4 |
| | | | PE | | | | | | | | | | | | |
| L2_dup56034 | Multi | Yes | PEP: 0067 | Redundant | LINE | L2 | chr22: 51223639-51223803 | − | 120 | 165 | RABL2B | Proximal | 1549 | Not documented | 5 |
| L1HS_dup288 | Multi | Yes | PEP: 0324, | Redundant | LINE | L1PA\|B\|x | chr3: 108468248-108474272 | + | 2.7 | 6025 | RETNLB | Proximal | 0 | EVE annotated | 6 |
| | | | PE | | | | | | | | | | | | |
| L1MB1_dup1023 | Uniquely | Yes | PEP: 0258 | Redundant | LINE | Other L1 | chr3: 115639412-115641599 | − | 110 | 2188 | LSAMP | Proximal | 0 | Not documented | 7 |
| L1PA2_dup900 | Multi/ | Yes | PEP: 0324, | Redundant | LINE | L1PA\|B\|x | chr3: 115922233-115928273 | − | 12 | 6041 | LSAMP | Proximal | 0 | EVE annotated | 8 |
| | Uniquely | | PE | | | | | | | | | | | | |
| L1HS_dup296 | Multi | Yes | PEP: 0324, | Redundant | LINE | L1PA\|B\|x | chr3: 116078847-116084873 | + | 1.8 | 6027 | LSAMP | Proximal | 0 | EVE annotated | 9 |
| | | | PE | | | | | | | | | | | | |
| SVA_D_dup294 | Multi | Yes | PEP: 0284, | Redundant | Other | SVA | chr3: 116768855-116770341 | + | 16 | 1487 | LSAMP | Proximal | 0 | Not documented | 640 |
| | | | PE | | | | | | | | | | | | |
| L1HS_dup298 | Multi | Yes | PEP: 0324, | Redundant | LINE | L1PA\|B\|x | chr3: 120291869-120298033 | + | 10 | 6165 | NDUFB4 | Distal | 17124 | EVE annotated | 1 |
| | | | PE | | | | | | | | | | | | |
| AluSz_dup18468 | Multi | Yes | PEP: 0074 | Redundant | SINE | Alu | chr3: 120406667-120406937 | − | 44 | 271 | RABL3 | Proximal | 0 | Not documented | 2 |
| L1P2_dup323 | Uniquely | Yes | PEP: 0113, | Redundant | LINE | L1PA\|B\|x | chr3: 125715097-125720650 | + | 42 | 5554 | SLC41A3 | Distal | 4549 | Not documented | 3 |
| | | | PE | | | | | | | | | | | | |
| L1MC2_dup1267 | Uniquely | Yes | PEP: 0171 | Redundant | LINE | Other L1 | chr3: 125893173-125896600 | + | 74 | 3428 | ALDH1L1 | Proximal | 0 | EVE annotated | 4 |
| L1HS_dup306 | Multi | Yes | PEP: 0324, | Redundant | LINE | L1PA\|B\|x | chr3: 130347653-130352909 | + | 1.4 | 5257 | COL6A6 | Proximal | 0 | EVE annotated | 5 |
| | | | PE | | | | | | | | | | | | |
| L1M1_dup1725 | Uniquely | Yes | PEP: 0119 | Non | LINE | Other L1 | chr3: 139134334-139138647 | − | 61 | 4314 | COPB2 | Distal | 25761 | Not documented | 6 |
| | | | | redundant | | | | | | | | | | | |
| L1PA5_dup2212 | Multi | Yes | PEP: 0324, | Redundant | LINE | L1PA\|B\|x | chr3: 142193948-142200076 | − | 25 | 6129 | ATR | Proximal | 0 | EVE annotated | 7 |
| | | | PE | | | | | | | | | | | | |
| MLT1F1_dup677 | Multi | Yes | PEP: 0325 | Non | LTR | ERVL- | chr3: 147724158-147724663 | + | 99 | 506 | ZIC1 | Distal | 496079 | Not documented | 8 |
| | | | | redundant | | MaLR | | | | | | | | | |
| HSMAR1_dup117 | Multi | Yes | PEP: 0090 | Redundant | DNA | DNA | chr3: 14986580-14987797 | − | 44 | 1218 | NR2C2 | Proximal | 1295 | Not documented | 9 |
| L1PA5_dup2263 | Multi/ | Yes | PEP: 0303 | Redundant | LINE | L1PA\|B\|x | chr3: 153980395-153986513 | + | 32 | 6119 | DHX36 | Distal | 3823 | EVE annotated | 650 |
| | Uniquely | | | | | | | | | | | | | | |
| LTR12C_dup547 | Uniquely | Yes | PEP: 0212 | Non | LTR | ERV1 | chr3: 156458184-156459561 | + | 29 | 1378 | TIPARP | Distal | 33626 | Not documented | 1 |
| | | | | redundant | | | | | | | | | | | |
| L1PBa_dup493 | Uniquely | Yes | PEP: 0275 | Non | LINE | L1PA\|B\|x | chr3: 165164058-165167033 | + | 53 | 2976 | SLITRK3 | Distal | 249162 | Not documented | 2 |
| | | | | redundant | | | | | | | | | | | |
| AluSz_dup19789 | Multi | Yes | PEP: 0097 | Redundant | SINE | Alu | chr3: 169806672-169806972 | + | 60 | 301 | PHC3 | Proximal | 0 | Not documented | 3 |
| Tigger1_dup2738 | Multi/ | Yes | PEP: 0154 | Redundant | DNA | DNA | chr3: 173599487-173600791 | − | 68 | 1305 | NLGN1 | Proximal | 0 | Not documented | 4 |
| | Uniquely | | | | | | | | | | | | | | |
| L4_dup3783 | Multi | Yes | PEP: 0115 | Non | LINE | RTE | chr3: 173687002-173687725 | − | 170 | 724 | NLGN1 | Proximal | 0 | Not documented | 5 |
| | | | | redundant | | | | | | | | | | | |
| MamRep605_dup1076 | Uniquely | Yes | PEP: 0036 | Non | Other | Other | chr3: 173706880-173707391 | − | 140 | 512 | NLGN1 | Proximal | 0 | Not documented | 6 |
| | | | | redundant | | Repeats | | | | | | | | | |
| L2a_dup39168 | Uniquely | Yes | PEP: 0173 | Non | LINE | L2 | chr3: 174160395-174162124 | − | 120 | 1730 | NAALADL2 | Proximal | 0 | Not documented | 7 |
| | | | | redundant | | | | | | | | | | | |
| AluSp_dup10330 | Multi | Yes | PEP: 0340 | Redundant | SINE | Alu | chr3: 179042800-179043107 | − | 53 | 308 | ZNF639 | Proximal | 0 | Not documented | 8 |
| AluSz6_dup9770 | Multi | Yes | PEP: 0043 | Redundant | SINE | Alu | chr3: 183890240-183890543 | + | 55 | 304 | DVL3 | Proximal | 0 | Not documented | 9 |
| L1PA13_dup1706 | Uniquely | Yes | PEP: 0186 | Redundant | LINE | L1PA\|B\|x | chr3: 184816903-184819238 | + | 43 | 2336 | C3orf70 | Proximal | 0 | Not documented | 660 |
| SVA_D_dup334 | Multi | Yes | PEP: 0284, | Redundant | Other | SVA | chr3: 197328597-197330107 | − | 11 | 1511 | BDH1 | Distal | 28404 | Not documented | 1 |
| | | | PE | | | | | | | | | | | | |
| L1PA7_dup2008 | Uniquely | Yes | PEP: 0209 | Redundant | LINE | L1PA\|B\|x | chr3: 21596709-21603100 | − | 44 | 6392 | ZNF385D | Proximal | 0 | Not documented | 2 |
| L2a_dup31321 | Multi | Yes | PEP: 0354 | Non | LINE | L2 | chr3: 38538147-38538440 | + | 130 | 294 | EXOG | Proximal | 0 | Not documented | 3 |
| | | | | redundant | | | | | | | | | | | |
| L2a_dup29030 | Uniquely | Yes | PEP: 0165 | Non | LINE | L2 | chr3: 3913399-3915817 | + | 120 | 2419 | SUMF1 | Proximal | 0 | Not documented | 4 |
| | | | | redundant | | | | | | | | | | | |
| L1PA4_dup1769 | Uniquely | Yes | PEP: 0303 | Redundant | LINE | L1PA\|B\|x | chr3: 3951154-3956626 | + | 19 | 5473 | SUMF1 | Proximal | 0 | EVE annotated | 5 |
| Tigger1_dup2151 | Multi/ | Yes | PEP: 0182 | Non | DNA | DNA | chr3: 40580015-40581111 | + | 55 | 1097 | ZNF621 | Proximal | 0 | Not documented | 6 |
| | Uniquely | | | redundant | | | | | | | | | | | |
| L1PA2_dup774 | Multi/ | Yes | PEP: 0324, | Redundant | LINE | L1PA\|B\|x | chr3: 43106267-43112282 | + | 6.4 | 6016 | FAM198A | Distal | 4565 | EVE annotated | 7 |
| | Uniquely | | PE | | | | | | | | | | | | |
| L1P2_dup267 | Uniquely | Yes | PEP: 0244, | Redundant | LINE | L1PA\|B\|x | chr3: 8106444-8110425 | − | 36 | 3982 | GRM7 | Distal | 323230 | EVE annotated | 8 |
| | | | PE | | | | | | | | | | | | |
| L1HS_dup273 | Multi | Yes | PEP: 0145, | Redundant | LINE | L1PA\|B\|x | chr3: 83853136-83855348 | − | 2.7 | 2213 | CADM2 | Distal | 1152785 | EVE annotated | 9 |
| | | | PE | | | | | | | | | | | | |
| L1HS_dup274 | Multi | Yes | PEP: 0169, | Redundant | LINE | L1PA\|B\|x | chr3: 89509976-89516006 | − | 1.8 | 6031 | EPHA3 | Proximal | 0 | EVE annotated | 670 |
| | | | PE | | | | | | | | | | | | |
| Tigger1_dup2026 | Multi | Yes | PEP: 0079 | Non | DNA | DNA | chr3: 9433242-9433517 | − | 55 | 276 | THUMPD3 | Distal | 4768 | Not documented | 1 |
| | | | | redundant | | | | | | | | | | | |
| SVA_D_dup371 | Multi | Yes | PEP: 0284, | Redundant | Other | SVA | chr4: 113878170-113879804 | − | 10 | 1635 | ANK2 | Proximal | 0 | Not documented | 2 |
| | | | PE | | | | | | | | | | | | |
| L2a_dup48093 | Multi/ | Yes | PEP: 0114 | Non | LINE | L2 | chr4: 114369874-114370755 | − | 120 | 882 | CAMK2D | Proximal | 1434 | Not documented | 3 |
| | Uniquely | | | redundant | | | | | | | | | | | |
| L1PA2_dup1276 | Multi | Yes | PEP: 0324, | Redundant | LINE | L1PA\|B\|x | chr4: 114410295-114416323 | − | 12 | 6029 | CAMK2D | Proximal | 0 | EVE annotated | 4 |
| | | | PE | | | | | | | | | | | | |
| L1HS_dup447 | Multi | Yes | PEP: 0145, | Redundant | LINE | L1PA\|B\|x | chr4: 117125010-117126599 | − | 3.6 | 1590 | MTRNR2L13 | Distal | 93418 | Not documented | 5 |
| | | | PE | | | | | | | | | | | | |
| AluSz_dup23620 | Multi | Yes | PEP: 0008 | Redundant | SINE | Alu | chr4: 120218610-120218911 | − | 57 | 302 | C4orf3 | Proximal | 0 | Not documented | 6 |
| X9_LINE_dup23 | Multi | Yes | PEP: 0150, | Non | LINE | Other L1 | chr4: 1235081-1235197 | − | 110 | 117 | CTBP1 | Proximal | 0 | Not documented | 7 |
| | | | PE | redundant | | | | | | | | | | | |
| L1PA4_dup3230 | Uniquely | Yes | PEP: 0113 | Redundant | LINE | L1PA\|B\|x | chr4: 125533093-125539240 | − | 22 | 6148 | ANKRD50 | Distal | 45968 | EVE annotated | 8 |
| L1PA3_dup2903 | Uniquely | Yes | PEP: 0303 | Redundant | LINE | L1PA\|B\|x | chr4: 128597764-128603911 | + | 16 | 6148 | INTU | Proximal | 0 | EVE annotated | 9 |
| L1HS_dup469 | Multi | Yes | PEP: 0210, | Redundant | LINE | L1PA\|B\|x | chr4: 137214650-137220701 | − | 0.91 | 6052 | PCDH18 | Distal | 1219372 | EVE annotated | 680 |
| | | | PE | | | | | | | | | | | | |
| L1HS_dup470 | Multi | Yes | PEP: 0210, | Redundant | LINE | L1PA\|B\|x | chr4: 139468878-139473208 | + | 1.4 | 4331 | SLC7A11 | Distal | 305376 | EVE annotated | 1 |
| | | | PE | | | | | | | | | | | | |
| L1PA7_dup3717 | Multi/ | Yes | PEP: 0053, | Redundant | LINE | L1PA\|B\|x | chr4: 151192065-151198580 | + | 38 | 6516 | LRBA | Proximal | 0 | EVE annotated | 2 |
| | Uniquely | | PE | | | | | | | | | | | | |
| L1HS_dup354 | Multi | Yes | PEP: 0324, | Redundant | LINE | L1PA\|B\|x | chr4: 15843170-15849195 | + | 1.4 | 6026 | CD38 | Proximal | 0 | EVE annotated | 3 |
| | | | PE | | | | | | | | | | | | |
| L1HS_dup490 | Multi | Yes | PEP: 0324, | Redundant | LINE | L1PA\|B\|x | chr4: 167677047-167683059 | + | 1.8 | 6013 | SPOCK3 | Proximal | 0 | EVE annotated | 4 |
| | | | PE | | | | | | | | | | | | |
| L1PA16_dup4108 | Uniquely | Yes | PEP: 0187 | Non | LINE | L1PA\|B\|x | chr4: 177283792-177290564 | − | 65 | 6773 | SPCS3 | Distal | 30397 | Not documented | 5 |
| | | | | redundant | | | | | | | | | | | |
| L1M4c_dup1231 | Uniquely | Yes | PEP: 0205 | Redundant | LINE | Other L1 | chr4: 1966001-1967336 | + | 69 | 1336 | WHSC1 | Proximal | 0 | Not documented | 6 |
| L1HS_dup359 | Multi | Yes | PEP: 0210, | Redundant | LINE | L1PA\|B\|x | chr4: 21161014-21167044 | + | 1.4 | 6031 | KCNIP4 | Proximal | 0 | EVE annotated | 7 |
| | | | PE | | | | | | | | | | | | |
| AluSz6_dup10521 | Multi | Yes | PEP: 0092 | Redundant | SINE | Alu | chr4: 41960718-41961033 | − | 45 | 316 | TMEM33 | Proximal | 0 | Not documented | 8 |
| L1HS_dup383 | Multi | Yes | PEP: 0231 | Redundant | LINE | L1PA\|B\|x | chr4: 48736862-48738001 | + | 3.6 | 1140 | FRYL | Proximal | 0 | Not documented | 9 |
| L1P1_dup714 | Multi | Yes | PEP: 0324, | Redundant | LINE | L1PA\|B\|x | chr4: 49622935-49628634 | + | 26 | 5700 | CWH43 | Distal | 558838 | EVE annotated | 690 |
| | | | PE | | | | | | | | | | | | |
| AluSc_dup8059 | Multi | Yes | PEP: 0338 | Redundant | SINE | Alu | chr4: 52887543-52887839 | + | 35 | 297 | SGCB | Proximal | 0 | Not documented | 1 |
| L1PA4_dup2819 | Uniquely | Yes | PEP: 0303 | Redundant | LINE | L1PA\|B\|x | chr4: 53761344-53767458 | − | 23 | 6115 | SCFD2 | Proximal | 0 | EVE annotated | 2 |
| L1M5_dup15476 | Uniquely | Yes | PEP: 0134 | Redundant | LINE | Other L1 | chr4: 54900584-54902447 | − | 120 | 1864 | CHIC2 | Proximal | 0 | Not documented | 3 |
| L1PA3_dup2546 | Uniquely | Yes | PEP: 0113, | Redundant | LINE | L1PA\|B\|x | chr4: 57197421-57203548 | − | 16 | 6128 | AASDH | Proximal | 909 | EVE annotated | 4 |
| | | | PE | | | | | | | | | | | | |
| L1HS_dup388 | Multi | Yes | PEP: 0324, | Redundant | LINE | L1PA\|B\|x | chr4: 58428483-58434513 | − | 3.6 | 6031 | IGFBP7 | Distal | 451933 | EVE annotated | 5 |
| | | | PE | | | | | | | | | | | | |
| L1HS_dup400 | Multi | Yes | PEP: 0324, | Redundant | LINE | L1PA\|B\|x | chr4: 62805646-62811680 | − | 2.3 | 6035 | LPHN3 | Proximal | 0 | EVE annotated | 6 |
| | | | PE | | | | | | | | | | | | |
| MLT1H-int_dup171 | Multi | Yes | PEP: 0318 | Non | LTR | ERVL- | chr4: 6672272-6672596 | − | 130 | 325 | AC093323.1 | Distal | 21187 | Not documented | 7 |
| | | | | redundant | | MaLR | | | | | | | | | |
| LTR12C_dup611 | Multi | Yes | PEP: 0250 | Redundant | LTR | ERV1 | chr4: 6674268-6675474 | + | 29 | 1207 | AC093323.1 | Distal | 18309 | Not documented | 8 |
| L1PA5_dup2725 | Multi | Yes | PEP: 0210, | Redundant | LINE | L1PA\|B\|x | chr4: 70101875-70104864 | + | 29 | 2990 | UGT2B11 | Distal | 21427 | EVE annotated | 9 |
| | | | PE | | | | | | | | | | | | |
| L1PA5_dup2727 | Multi | Yes | PEP: 0100 | Redundant | LINE | L1PA\|B\|x | chr4: 70206700-70208894 | + | 36 | 2195 | UGT2B28 | Distal | 45933 | EVE annotated | 700 |
| L1HS_dup406 | Multi | Yes | PEP: 0210, | Redundant | LINE | L1PA\|B\|x | chr4: 71194624-71200024 | + | 1.8 | 5401 | CABS1 | Proximal | 660 | EVE annotated | 1 |
| | | | PE | | | | | | | | | | | | |
| L1PA8_dup1944 | Uniquely | Yes | PEP: 0303 | Redundant | LINE | L1PA\|B\|x | chr4: 72174145-72180662 | + | 44 | 6518 | SLC4A4 | Proximal | 0 | EVE annotated | 2 |
| L1PA3_dup2625 | Uniquely | Yes | PEP: 0113, | Redundant | LINE | L1PA\|B\|x | chr4: 72285547-72290720 | + | 14 | 5174 | SLC4A4 | Proximal | 0 | EVE annotated | 3 |
| | | | PE | | | | | | | | | | | | |
| L1HS_dup412 | Multi | Yes | PEP: 0324, | Redundant | LINE | L1PA\|B\|x | chr4: 80858870-80864900 | + | 1.4 | 6031 | ANTXR2 | Proximal | 0 | EVE annotated | 4 |
| | | | PE | | | | | | | | | | | | |
| L1PA2_dup1208 | Multi/ | Yes | PEP: 0324, | Redundant | LINE | L1PA\|B\|x | chr4: 86991544-86997572 | − | 10 | 6029 | MAPK10 | Proximal | 0 | EVE annotated | 5 |
| | Uniquely | | PE | | | | | | | | | | | | |
| L1HS_dup425 | Multi | Yes | PEP: 0324, | Redundant | LINE | L1PA\|B\|x | chr4: 88268276-88274298 | − | 1.4 | 6023 | HSD17B11 | Proximal | 0 | EVE annotated | 6 |
| | | | PE | | | | | | | | | | | | |
| L1HS_dup429 | Multi | Yes | PEP: 0324, | Redundant | LINE | L1PA\|B\|x | chr4: 91596878-91602908 | − | 1.8 | 6031 | CCSER1 | Proximal | 0 | EVE annotated | 7 |
| | | | PE | | | | | | | | | | | | |
| L1PB2_dup704 | Uniquely | Yes | PEP: 0358, | Redundant | LINE | L1PA\|B\|x | chr4: 95955442-95957284 | − | 49 | 1843 | BMPR1B | Proximal | 0 | Not documented | 8 |
| | | | PE | | | | | | | | | | | | |
| L1HS_dup436 | Multi | Yes | PEP: 0324, | Redundant | LINE | L1PA\|B\|x | chr4: 99513587-99519614 | − | 2.7 | 6028 | TSPAN5 | Proximal | 0 | EVE annotated | 9 |
| | | | PE | | | | | | | | | | | | |
| L1HS_dup562 | Multi | Yes | PEP: 0145, | Redundant | LINE | L1PA\|B\|x | chr5: 103854289-103860317 | + | 1.4 | 6029 | NUDT12 | Distal | 955796 | EVE annotated | 710 |
| | | | PE | | | | | | | | | | | | |
| SVA_F_dup311 | Multi | Yes | PEP: 0075, | Redundant | Other | SVA | chr5: 108678238-108678978 | + | 31 | 741 | PJA2 | Proximal | 0 | Not documented | 1 |
| | | | PE | | | | | | | | | | | | |
| AluSx_dup39137 | Multi/ | Yes | PEP: 0164, | Redundant | SINE | Alu | chr5: 112104738-112105047 | − | 45 | 310 | APC | Proximal | 0 | Not documented | 2 |
| | Uniquely | | PE | | | | | | | | | | | | |
| MER34A_dup551 | Multi | Yes | PEP: 0291, | Non | LTR | ERV1 | chr5: 127396766-127397217 | + | 120 | 452 | SLC12A2 | Distal | 22242 | Not documented | 3 |
| | | | PE | redundant | | | | | | | | | | | |
| AluSq2_dup15956 | Multi | Yes | PEP: 0340 | Redundant | SINE | Alu | chr5: 133737778-133738093 | − | 53 | 316 | CDKNZAIPNL | Proximal | 0 | Not documented | 4 |
| SVA_E_dup94 | Multi | Yes | PEP: 0075, | Redundant | Other | SVA | chr5: 137022578-137023848 | + | 28 | 1271 | KLHL3 | Proximal | 0 | Not documented | 5 |
| | | | PE | | | | | | | | | | | | |
| L2c_dup49860 | Multi | Yes | PEP: 0285 | Non | LINE | L2 | chr5: 140599064-140600044 | + | 170 | 981 | PCDHB13 | Distal | 2072 | Not documented | 6 |
| | | | | redundant | | | | | | | | | | | |
| AluSx4_dup1785 | Multi/ | Yes | PEP: 0074 | Redundant | SINE | Alu | chr5: 140860368-140860654 | + | 54 | 287 | PCDHGC3 | Proximal | 0 | Not documented | 7 |
| | Uniquely | | | | | | | | | | | | | | |
| L2a_dup60322 | Uniquely | Yes | PEP: 0065 | Non | LINE | L2 | chr5: 146093041-146094112 | − | 120 | 1072 | PPP2R2B | Proximal | 0 | Not documented | 8 |
| | | | | redundant | | | | | | | | | | | |
| L2b_dup33029 | Uniquely | Yes | PEP: 0246 | Non | LINE | L2 | chr5: 146431875-146432410 | − | 140 | 536 | PPP2R2B | Proximal | 0 | Not documented | 9 |
| | | | | redundant | | | | | | | | | | | |
| L1PA2_dup1750 | Multi | Yes | PEP: 0210, | Redundant | LINE | L1PA\|B\|x | chr5: 147095409-147101435 | − | 10 | 6027 | JAKMIP2 | Proximal | 0 | EVE annotated | 720 |
| | | | PE | | | | | | | | | | | | |
| MSTA_dup6844 | Uniquely | Yes | PEP: 0120 | Non | LTR | ERVL- | chr5: 147758228-147758609 | − | 72 | 382 | FBXO38 | Distal | 4890 | Not documented | 1 |
| | | | | redundant | | MaLR | | | | | | | | | |
| L1HS_dup591 | Multi | Yes | PEP: 0324, | Redundant | LINE | L1PA\|B\|x | chr5: 151456430-151462430 | + | 1.8 | 6001 | GLRA1 | Distal | 152028 | EVE annotated | 2 |
| | | | PE | | | | | | | | | | | | |
| L1HS_dup593 | Multi | Yes | PEP: 0324, | Redundant | LINE | L1PA\|B\|x | chr5: 152266015-152272033 | − | 2.3 | 6019 | NMUR2 | Distal | 453087 | EVE annotated | 3 |
| | | | PE | | | | | | | | | | | | |
| LTR5_Hs_dup206 | Multi | Yes | PEP: 0261 | Redundant | LTR | ERVK | chr5: 156084717-156085684 | − | 4.1 | 968 | SGCD | Proximal | 0 | EVE annotated | 4 |
| L1PA7_dup3988 | Multi | Yes | PEP: 0019, | Redundant | LINE | L1PA\|B\|x | chr5: 15870805-15876520 | + | 39 | 5716 | FBXL7 | Proximal | 0 | EVE annotated | 5 |
| | | | PE | | | | | | | | | | | | |
| L1HS_dup510 | Multi | Yes | PEP: 0324, | Redundant | LINE | L1PA\|B\|x | chr5: 15906625-15912659 | − | 1.4 | 6035 | FBXL7 | Proximal | 0 | EVE annotated | 6 |
| | | | PE | | | | | | | | | | | | |
| L1HS_dup605 | Multi | Yes | PEP: 0324, | Redundant | LINE | L1PA\|B\|x | chr5: 172829800-172835831 | − | 1.8 | 6032 | STC2 | Distal | 73295 | EVE annotated | 7 |
| | | | PE | | | | | | | | | | | | |
| L1HS_dup606 | Multi | Yes | PEP: 0324, | Redundant | LINE | L1PA\|B\|x | chr5: 177199247-177205275 | + | 1.4 | 6029 | FAM153A | Proximal | 0 | EVE annotated | 8 |
| | | | PE | | | | | | | | | | | | |
| L2a_dup63112 | Multi/ | Yes | PEP: 0009 | Non | LINE | L2 | chr5: 180690761-180690883 | + | 150 | 123 | TRIM52 | Distal | 2643 | Not documented | 9 |
| | Uniquely | | | redundant | | | | | | | | | | | |
| L1HS_dup499 | Multi | Yes | PEP: 0210, | Redundant | LINE | L1PA\|B\|x | chr5: 1968733-1971595 | + | 1.4 | 2863 | IRX4 | Distal | 81384 | EVE annotated | 730 |
| | | | PE | | | | | | | | | | | | |
| AluSx3_dup8132 | Multi | Yes | PEP: 0241 | Redundant | SINE | Alu | chr5: 36623676-36623992 | + | 50 | 317 | SLC1A3 | Proximal | 0 | Not documented | 1 |
| L1PA11_dup1278 | Uniquely | Yes | PEP: 0183, | Redundant | LINE | L1PA\|B\|x | chr5: 37102590-37104416 | − | 43 | 1827 | C5orf42 | Proximal | 1915 | Not documented | 2 |
| | | | PE | | | | | | | | | | | | |
| L1PA15-16_dup412 | Uniquely | Yes | PEP: 0303 | Redundant | LINE | L1PA\|B\|x | chr5: 38893346-38895459 | + | 67 | 2114 | OSMR | Proximal | 0 | Not documented | 3 |
| L2c_dup45680 | Multi | Yes | PEP: 0312 | Non | LINE | L2 | chr5: 41919101-41919322 | + | 170 | 222 | C5orf51 | Proximal | 0 | Not documented | 4 |
| | | | | redundant | | | | | | | | | | | |
| L1MB3_dup4843 | Uniquely | Yes | PEP: 0139 | Non | LINE | Other L1 | chr5: 42963151-42964083 | + | 79 | 933 | ANXA2R | Distal | 75253 | Not documented | 5 |
| | | | | redundant | | | | | | | | | | | |
| MSTB_dup2533 | Multi | Yes | PEP: 0018, | Non | LTR | ERVL- | chr5: 43575976-43576125 | + | 80 | 150 | PAIP1 | Distal | 18117 | Not documented | 6 |
| | | | PE | redundant | | MaLR | | | | | | | | | |
| MER39B_dup334 | Multi | Yes | PEP: 0105, | Non | LTR | ERV1 | chr5: 43583316-43583930 | − | 63 | 615 | NNT | Distal | 18865 | Not documented | 7 |
| | | | PE | redundant | | | | | | | | | | | |
| SVA_A_dup65 | Multi | Yes | PEP: 0200 | Redundant | Other | SVA | chr5: 63521560-63522505 | + | 30 | 946 | RNF180 | Proximal | 0 | Not documented | 8 |
| L1PA7_dup4230 | Uniquely | Yes | PEP: 0113 | Redundant | LINE | L1PA\|B\|x | chr5: 63538625-63545092 | + | 47 | 6468 | RNF180 | Proximal | 0 | EVE annotated | 9 |
| AluSz_dup26682 | Multi | Yes | PEP: 0008 | Redundant | SINE | Alu | chr5: 70953262-70953553 | − | 55 | 292 | MCCC2 | Proximal | 0 | Not documented | 740 |
| L1PB1_dup4274 | Multi | Yes | PEP: 0162, | Redundant | LINE | L1PA\|B\|x | chr5: 70979388-70985875 | + | 50 | 6488 | MCCC2 | Distal | 24858 | EVE annotated | 1 |
| | | | PE | | | | | | | | | | | | |
| AluSz_dup26698 | Multi | Yes | PEP: 0338 | Redundant | SINE | Alu | chr5: 71656499-71656813 | − | 58 | 315 | PTCD2 | Proximal | 448 | Not documented | 2 |
| L1HS_dup501 | Multi | Yes | PEP: 0145, | Redundant | LINE | L1PA\|B\|x | chr5: 7603929-7606244 | − | 1.4 | 2316 | ADCY2 | Proximal | 0 | EVE annotated | 3 |
| | | | PE | | | | | | | | | | | | |
| L1HS_dup552 | Multi | Yes | PEP: 0324, | Redundant | LINE | L1PA\|B\|x | chr5: 80911910-80917937 | + | 3.2 | 6028 | SSBP2 | Proximal | 0 | EVE annotated | 4 |
| | | | PE | | | | | | | | | | | | |
| AluSq_dup6064 | Multi | Yes | PEP: 0008 | Redundant | SINE | Alu | chr5: 98251615-98251915 | + | 66 | 301 | CHD1 | Proximal | 0 | Not documented | 5 |
| AluSp_dup14346 | Multi | Yes | PEP: 0319 | Redundant | SINE | Alu | chr5: 98251971-98252274 | + | 46 | 304 | CHD1 | Proximal | 0 | Not documented | 6 |
| SVA_D_dup528 | Multi | Yes | PEP: 0075, | Redundant | Other | SVA | chr6: 108274579-108275684 | + | 25 | 1106 | SEC63 | Proximal | 0 | Not documented | 7 |
| | | | PE | | | | | | | | | | | | |
| Tigger2_dup1140 | Uniquely | Yes | PEP: 0060 | Non | DNA | DNA | chr6: 109735944-109737403 | − | 52 | 1460 | PPIL6 | Proximal | 0 | Not documented | 8 |
| | | | | redundant | | | | | | | | | | | |
| Tigger1_dup5081 | Uniquely | Yes | PEP: 0179 | Non | DNA | DNA | chr6: 111725155-111725802 | + | 48 | 648 | REV3L | Proximal | 0 | Not documented | 9 |
| | | | | redundant | | | | | | | | | | | |
| L1MEc_dup7408 | Uniquely | Yes | PEP: 0098 | Non | LINE | Other L1 | chr6: 112424560-112426778 | + | 98 | 2219 | FAM229B | Proximal | 568 | Not documented | 750 |
| | | | | redundant | | | | | | | | | | | |
| L2b_dup38157 | Uniquely | Yes | PEP: 0337 | Non | LINE | L2 | chr6: 118787923-118788635 | − | 150 | 713 | CEP85L | Proximal | 0 | Not documented | 1 |
| | | | | redundant | | | | | | | | | | | |
| L1PB1_dup5495 | Uniquely | Yes | PEP: 0253 | Non | LINE | L1PA\|B\|x | chr6: 121553857-121556315 | − | 45 | 2459 | TBC1D32 | Proximal | 0 | Not documented | 2 |
| | | | | redundant | | | | | | | | | | | |
| L1HS_dup689 | Multi | Yes | PEP: 0324, | Redundant | LINE | L1PA\|B\|x | chr6: 129319531-129325561 | + | 1.8 | 6031 | LAMA2 | Proximal | 0 | EVE annotated | 3 |
| | | | PE | | | | | | | | | | | | |
| L1PB1_dup5540 | Uniquely | Yes | PEP: 0153, | Redundant | LINE | L1PA\|B\|x | chr6: 132670635-132676547 | − | 48 | 5913 | MOXD1 | Proximal | 0 | EVE annotated | 4 |
| | | | PE | | | | | | | | | | | | |
| L1HS_dup690 | Multi | Yes | PEP: 0324, | Redundant | LINE | L1PA\|B\|x | chr6: 133341856-133347885 | − | 1.8 | 6030 | RPS12 | Distal | 203154 | EVE annotated | 5 |
| | | | PE | | | | | | | | | | | | |
| L2a_dup70960 | Uniquely | Yes | PEP: 0326 | Non | LINE | L2 | chr6: 139240168-139241068 | + | 120 | 901 | REPS1 | Proximal | | Not documented | 6 |
| | | | | redundant | | | | | | | | | | | |
| L1PA11_dup1729 | Uniquely | Yes | PEP: 0022 | Non | LINE | L1PA\|B\|x | chr6: 146192082-146194338 | + | 43 | 2257 | SHPRH | Proximal | 0 | Not documented | 7 |
| | | | | redundant | | | | | | | | | | | |
| L1PA7_dup5716 | Uniquely | Yes | PEP: 0025, | Redundant | LINE | L1PA\|B\|x | chr6: 153431780-153438223 | + | 37 | 6444 | RGS17 | Proximal | 0 | Not documented | 8 |
| | | | PE | | | | | | | | | | | | |
| L1PREC2_dup3231 | Uniquely | Yes | PEP: 0276 | Redundant | LINE | L1PA\|B\|x | chr6: 159936245-159941247 | − | 41 | 5003 | SOD2 | Distal | 148843 | Not documented | 9 |
| SVA_D_dup547 | Multi | Yes | PEP: 0075, | Redundant | Other | SVA | chr6: 160081484-160082279 | + | 15 | 796 | SOD2 | Distal | 7811 | Not documented | 760 |
| | | | PE | | | | | | | | | | | | |
| L1PA5_dup4797 | Multi/ | Yes | PEP: 0324, | Redundant | LINE | L1PA\|B\|x | chr6: 160091647-160097787 | + | 28 | 6141 | SOD2 | Proximal | 0 | EVE annotated | 1 |
| | Uniquely | | PE | | | | | | | | | | | | |
| L2c_dup59892 | Multi | Yes | PEP: 0289 | Redundant | LINE | L2 | chr6: 164002612-164002775 | − | 140 | 164 | QKI | Distal | 2985 | Not documented | 2 |
| MLT1B_dup7324 | Multi/ | Yes | PEP: 0157 | Non | LTR | ERVL- | chr6: 165218359-165218763 | − | 89 | 405 | C6orf118 | Distal | 474391 | Not documented | 3 |
| | Uniquely | | | redundant | | MaLR | | | | | | | | | |
| L1HS_dup616 | Multi | Yes | PEP: 0324, | Redundant | LINE | L1PA\|B\|x | chr6: 24811907-24817934 | − | 1.4 | 6028 | FAM65B | Proximal | 0 | EVE annotated | 4 |
| | | | PE | | | | | | | | | | | | |
| L1ME4a_dup15806 | Multi | Yes | PEP: 0286 | Non | LINE | Other L1 | chr6: 24976284-24976602 | + | 150 | 319 | FAM65B | Proximal | 0 | Not documented | 5 |
| | | | | redundant | | | | | | | | | | | |
| LTR48B_dup407 | Multi | Yes | PEP: 0239 | Non | LTR | ERV1 | chr6: 27106003-27106594 | − | 110 | 592 | HIST1H2BK | Proximal | 0 | Not documented | 6 |
| | | | | redundant | | | | | | | | | | | |
| FRAM_dup2736 | Multi | Yes | PEP: 0272 | Redundant | SINE | Alu | chr6: 28090841-28091010 | + | 78 | 170 | ZSCAN16 | Proximal | 1329 | Not documented | 7 |
| SVA_C_dup103 | Multi | Yes | PEP: 0233, | Redundant | Other | SVA | chr6: 31034380-31035833 | − | 17 | 1454 | MUC22 | Distal | 31202 | Not documented | 8 |
| | | | PE | | | | | | | | | | | | |
| L1PA4_dup4558 | Multi | Yes | PEP: 0053, | Redundant | LINE | L1PA\|B\|x | chr6: 56447400-56451384 | − | 15 | 3985 | DST | Proximal | 0 | EVE annotated | 9 |
| | | | PE | | | | | | | | | | | | |
| L1PA3_dup4098 | Multi/ | Yes | PEP: 0344, | Redundant | LINE | L1PA\|B\|x | chr6: 56644523-56650666 | − | 19 | 6144 | DST | Proximal | 0 | EVE annotated | 770 |
| | Uniquely | | PE | | | | | | | | | | | | |
| SVA_D_dup510 | Multi | Yes | PEP: 0284, | Redundant | Other | SVA | chr6: 56688784-56690317 | + | 13 | 1534 | DST | Proximal | 0 | Not documented | 1 |
| | | | PE | | | | | | | | | | | | |
| L1PA7_dup5219 | Multi/ | Yes | PEP: 0033, | Redundant | LINE | L1PA\|B\|x | chr6: 72065065-72071490 | − | 39 | 6426 | OGFRL1 | Distal | 46413 | EVE annotated | 2 |
| | Uniquely | | PE | | | | | | | | | | | | |
| L1HS_dup643 | Multi | Yes | PEP: 0324, | Redundant | LINE | L1PA\|B\|x | chr6: 73698378-73704409 | − | 2.3 | 6032 | KCNQ5 | Proximal | 0 | EVE annotated | 3 |
| | | | PE | | | | | | | | | | | | |
| HERVK-int_dup100 | Multi | Yes | PEP: 0200 | Redundant | LTR | ERVK | chr6: 78427622-78435123 | − | 1.8 | 7502 | MEI4 | Proximal | 0 | EVE annotated | 4 |
| L1HS_dup654 | Multi | Yes | PEP: 0324, | Redundant | LINE | L1PA\|B\|x | chr6: 86708765-86714791 | − | 1.4 | 6027 | SYNCRIP | Distal | 355256 | EVE annotated | 5 |
| | | | PE | | | | | | | | | | | | |
| L1PA7_dup5409 | Uniquely | Yes | PEP: 0264 | Redundant | LINE | L1PA\|B\|x | chr6: 96919955-96925335 | − | 43 | 5381 | UFL1 | Distal | 44137 | EVE annotated | 6 |
| L1PA6_dup2525 | Uniquely | Yes | PEP: 0113 | Redundant | LINE | L1PA\|B\|x | chr6: 96942251-96948320 | − | 34 | 6070 | UFL1 | Distal | 21152 | EVE annotated | 7 |
| SVA_C_dup125 | Multi | Yes | PEP: 0255, | Redundant | Other | SVA | chr7: 100735044-100736635 | + | 14 | 1592 | TRIM56 | Proximal | 28 | Not documented | 8 |
| | | | PE | | | | | | | | | | | | |
| L1MA3_dup4175 | Uniquely | Yes | PEP: 0342, | Redundant | LINE | Other L1 | chr7: 102827203-102833752 | + | 51 | 6550 | NAPEPLD | Distal | 37197 | Not documented | 9 |
| | | | PE | | | | | | | | | | | | |
| LTR12C_dup1359 | Uniquely | Yes | PEP: 0021 | Redundant | LTR | ERV1 | chr7: 102914527-102915934 | − | 46 | 1408 | PMPCB | Distal | 21936 | Not documented | 780 |
| L1PA14_dup1475 | Uniquely | Yes | PEP: 0128 | Redundant | LINE | L1PA\|B\|x | chr7: 105867820-105869713 | − | 40 | 1894 | NAMPT | Distal | 19019 | Not documented | 1 |
| L1P1_dup1397 | Multi/ | Yes | PEP: 0053, | Redundant | LINE | L1PA\|B\|x | chr7: 105885063-105887369 | − | 4.5 | 2307 | NAMPT | Proximal | 1363 | EVE annotated | 2 |
| | Uniquely | | PE | | | | | | | | | | | | |
| L1PA5_dup5177 | Uniquely | Yes | PEP: 0113, | Redundant | LINE | L1PA\|B\|x | chr7: 106733958-106740073 | − | 31 | 6116 | PRKAR2B | Proximal | 0 | EVE annotated | 3 |
| | | | PE | | | | | | | | | | | | |
| L1P3_dup1516 | Multi | Yes | PEP: 0053 | Redundant | LINE | L1PA\|B\|x | chr7: 107854231-107855656 | − | 40 | 1426 | NRCAM | Proximal | 0 | Not documented | 4 |
| L1P3_dup1517 | Multi/ | Yes | PEP: 0228 | Non | LINE | L1PA\|B\|x | chr7: 107855959-107858840 | − | 42 | 2882 | NRCAM | Proximal | 0 | Not documented | 5 |
| | Uniquely | | | redundant | | | | | | | | | | | |
| L1PA6_dup2928 | Multi/ | Yes | PEP: 0145 | Redundant | LINE | L1PA\|B\|x | chr7: 107913193-107919341 | − | 36 | 6149 | NRCAM | Proximal | 0 | EVE annotated | 6 |
| | Uniquely | | | | | | | | | | | | | | |
| L1PA5_dup5180 | Multi/ | Yes | PEP: 0324, | Redundant | LINE | L1PA\|B\|x | chr7: 108028014-108034176 | − | 28 | 6163 | NRCAM | Proximal | 0 | EVE annotated | 7 |
| | Uniquely | | PE | | | | | | | | | | | | |
| L1HS_dup765 | Multi | Yes | PEP: 0231 | Redundant | LINE | L1PA\|B\|x | chr7: 109547573-109548698 | + | 1.4 | 1126 | IMMP2L | Distal | 754413 | EVE annotated | 8 |
| L1PA7_dup6230 | Uniquely | Yes | PEP: 0303 | Redundant | LINE | L1PA\|B\|x | chr7: 110383534-110389965 | + | 42 | 6432 | IMMP2L | Proximal | 0 | EVE annotated | 9 |
| L1HS_dup713 | Multi | Yes | PEP: 0210, | Redundant | LINE | L1PA\|B\|x | chr7: 110883572-110889602 | − | 1.8 | 6031 | IMMP2L | Proximal | 0 | EVE annotated | 790 |
| | | | PE | | | | | | | | | | | | |
| L1MA7_dup3664 | Uniquely | Yes | PEP: 0307, | Non | LINE | Other L1 | chr7: 110970744-110971756 | + | 72 | 1013 | IMMP2L | Proximal | 0 | Not documented | 1 |
| | | | PE | redundant | | | | | | | | | | | |
| L1HS_dup770 | Multi | Yes | PEP: 0324, | Redundant | LINE | L1PA\|B\|x | chr7: 113416178-113422207 | − | 1.8 | 6030 | PPP1R3A | Distal | 94626 | EVE annotated | 2 |
| | | | PE | | | | | | | | | | | | |
| Charlie1_dup899 | Multi/ | Yes | PEP: 0057 | Non | DNA | DNA | chr7: 119993734-119994655 | + | 97 | 922 | KCND2 | Proximal | 0 | Not documented | 3 |
| | Uniquely | | | redundant | | | | | | | | | | | |
| LTR62_dup96 | Multi | Yes | PEP: 0297 | Non | LTR | ERVL | chr7: 1201954-1202212 | + | 100 | 259 | ZFAND2A | Proximal | 1560 | Not documented | 4 |
| | | | | redundant | | | | | | | | | | | |
| L2a_dup78552 | Multi/ | Yes | PEP: 0035 | Non | LINE | L2 | chr7: 121529616-121530738 | + | 130 | 1123 | PTPRZ1 | Proximal | 0 | Not documented | 5 |
| | Uniquely | | | redundant | | | | | | | | | | | |
| L1PREC2_dup3595 | Uniquely | Yes | PEP: 0052 | Redundant | LINE | L1PA\|B\|x | chr7: 121746353-121747943 | + | 45 | 1591 | AASS | Proximal | 0 | Not documented | 6 |
| L1PA3_dup4963 | Uniquely | Yes | PEP: 0303 | Redundant | LINE | L1PA\|B\|x | chr7: 123085245-123091266 | − | 13 | 6022 | IQUB | Proximal | 1189 | EVE annotated | 7 |
| L1PA17_dup2146 | Uniquely | Yes | PEP: 0279 | Non | LINE | L1PA\|B\|x | chr7: 123802975-123808145 | + | 80 | 5171 | TMEM229A | Distal | 129453 | Not documented | 8 |
| | | | | redundant | | | | | | | | | | | |
| SVA_B_dup198 | Multi | Yes | PEP: 0026, | Redundant | Other | SVA | chr7: 128102917-128104338 | + | 21 | 1422 | HILPDA | Distal | 4446 | Not documented | 9 |
| | | | PE | | | | | | | | | | | | |
| SVA_D_dup608 | Multi | Yes | PEP: 0075, | Redundant | Other | SVA | chr7: 130276379-130277290 | + | 27 | 912 | COPG2 | Proximal | 0 | Not documented | 800 |
| | | | PE | | | | | | | | | | | | |
| L1PA8_dup3780 | Multi/ | Yes | PEP: 0053, | Redundant | LINE | L1PA\|B\|x | chr7: 131000001-131006360 | + | 44 | 6360 | MKLN1 | Proximal | 0 | EVE annotated | 1 |
| | Uniquely | | PE | | | | | | | | | | | | |
| L1PA5_dup5290 | Uniquely | Yes | PEP: 0252, | Redundant | LINE | L1PA\|B\|x | chr7: 134660754-134666906 | + | 32 | 6153 | AGBL3 | Distal | 4354 | EVE annotated | 2 |
| | | | PE | | | | | | | | | | | | |
| L1HS_dup786 | Multi | Yes | PEP: 0324, | Redundant | LINE | L1PA\|B\|x | chr7: 141620482-141626512 | − | 1.4 | 6031 | MGAM | Proximal | 0 | EVE annotated | 3 |
| | | | PE | | | | | | | | | | | | |
| MER57-int_dup524 | Uniquely | Yes | PEP: 0287 | Non | LTR | ERV1 | chr7: 146319-148890 | − | 46 | 2572 | FAM20C | Distal | 44080 | Not documented | 4 |
| | | | | redundant | | | | | | | | | | | |
| AluSz_dup39869 | Multi | Yes | PEP: 0008 | Redundant | SINE | Alu | chr7: 149783054-149783359 | − | 50 | 306 | ACTR3C | Distal | 157647 | Not documented | 5 |
| L1ME2_dup5972 | Uniquely | Yes | PEP: 0142 | Redundant | LINE | Other L1 | chr7: 156599606-156601503 | − | 110 | 1898 | LMBR1 | Proximal | 0 | Not documented | 6 |
| L1HS_dup725 | Multi | Yes | PEP: 0324, | Redundant | LINE | L1PA\|B\|x | chr7: 25081480-25087510 | − | 2.7 | 6031 | OSBPL3 | Distal | 60228 | EVE annotated | 7 |
| | | | PE | | | | | | | | | | | | |
| SVA_E_dup109 | Multi/ | Yes | PEP: 0075, | Redundant | Other | SVA | chr7: 2573126-2574918 | − | 13 | 1793 | BRAT1 | Distal | 2594 | Not documented | 8 |
| | Uniquely | | PE | | | | | | | | | | | | |
| SVA_A_dup94 | Multi/ | Yes | PEP: 0226, | Redundant | Other | SVA | chr7: 26215480-26217248 | − | 28 | 1769 | NFE2L3 | Proximal | 0 | Not documented | 9 |
| | Uniquely | | PE | | | | | | | | | | | | |
| AluJr_dup27455 | Multi/ | Yes | PEP: 0188 | Non | SINE | Alu | chr7: 28860225-28860514 | − | 78 | 290 | CREB5 | Proximal | 0 | Not documented | 810 |
| | Uniquely | | | redundant | | | | | | | | | | | |
| L1HS_dup727 | Multi | Yes | PEP: 0324, | Redundant | LINE | L1PA\|B\|x | chr7: 30478859-30484890 | + | 1.4 | 6032 | NOD1 | Proximal | 0 | EVE annotated | 1 |
| | | | PE | | | | | | | | | | | | |
| L1PA5_dup4915 | Uniquely | Yes | PEP: 0308, | Redundant | LINE | L1PA\|B\|x | chr7: 30577130-30583250 | + | 30 | 6121 | GGCT | Proximal | 0 | EVE annotated | 2 |
| | | | PE | | | | | | | | | | | | |
| L1HS_dup729 | Multi | Yes | PEP: 0210, | Redundant | LINE | L1PA\|B\|x | chr7: 32390207-32393113 | − | 1.4 | 2907 | PDE1C | Distal | 51267 | EVE annotated | 3 |
| | | | PE | | | | | | | | | | | | |
| SVA_B_dup189 | Multi | Yes | PEP: 0284, | Redundant | Other | SVA | chr7: 32792761-32794408 | + | 18 | 1648 | AVL9 | Proximal | 0 | Not documented | 4 |
| | | | PE | | | | | | | | | | | | |
| L1PA3_dup4695 | Multi | Yes | PEP: 0231 | Redundant | LINE | L1PA\|B\|x | chr7: 40021612-40022891 | − | 13 | 1280 | CDK13 | Proximal | 0 | Not documented | 5 |
| HERVK-int_dup103 | Multi | Yes | PEP: 0200 | Redundant | LTR | ERVK | chr7: 4631529-4639063 | − | 2.7 | 7535 | FOXK1 | Distal | 44326 | EVE annotated | 6 |
| L1HS_dup735 | Multi | Yes | PEP: 0210, | Redundant | LINE | L1PA\|B\|x | chr7: 49719865-49725896 | − | 1.4 | 6032 | VWC2 | Distal | 87362 | EVE annotated | 7 |
| | | | PE | | | | | | | | | | | | |
| L1MA10_dup2034 | Uniquely | Yes | PEP: 0364 | Redundant | LINE | Other L1 | chr7: 54482510-54484317 | + | 82 | 1808 | VSTM2A | Distal | 125702 | Not documented | 8 |
| MER33_dup3989 | Multi/ | Yes | PEP: 0369 | Non | DNA | DNA | chr7: 55113502-55113815 | + | 89 | 314 | EGFR | Proximal | 0 | Not documented | 9 |
| | Uniquely | | | redundant | | | | | | | | | | | |
| AluSg4_dup2844 | Multi | Yes | PEP: 0197 | Redundant | SINE | Alu | chr7: 55125807-55126102 | + | 40 | 296 | EGFR | Proximal | 0 | Not documented | 820 |
| L1MB3_dup6728 | Uniquely | Yes | PEP: 0296 | Non | LINE | Other L1 | chr7: 55215302-55215790 | − | 80 | 489 | EGFR | Proximal | 0 | Not documented | 1 |
| | | | | redundant | | | | | | | | | | | |
| AluSx1_dup39801 | Multi | Yes | PEP: 0074 | Redundant | SINE | Alu | chr7: 56155728-56156038 | − | 51 | 311 | PHKG1 | Proximal | 0 | Not documented | 2 |
| ALR/Alpha_dup299 | Multi | Yes | PEP: 0137, | Redundant | Other | Other | chr7: 57948163-57981351 | − | 72 | 33189 | ZNF716 | Distal | 414912 | Not documented | 3 |
| | | | PE | | | Repeats | | | | | | | | | |
| HERVH-int_dup2890 | Multi/ | Yes | PEP: 0305, | Redundant | LTR | ERV1 | chr7: 64139928-64144981 | + | 130 | 5054 | ZNF107 | Proximal | 0 | EVE annotated | 4 |
| | Uniquely | | PE | | | | | | | | | | | | |
| AluSz_dup36207 | Multi | Yes | PEP: 0092 | Redundant | SINE | Alu | chr7: 64436539-64436834 | + | 58 | 296 | ZNF117 | Proximal | 0 | Not documented | 5 |
| HERV3-int_dup100 | Multi/ | Yes | PEP: 0306, | Redundant | LTR | ERV1 | chr7: 64451294-64459721 | − | 67 | 8428 | ERV3-1 | Proximal | 0 | EVE annotated | 6 |
| | Uniquely | | PE | | | | | | | | | | | | |
| L1HS_dup744 | Multi/ | Yes | PEP: 0053, | Redundant | LINE | L1PA\|B\|x | chr7: 65751841-65757871 | − | 2.3 | 6031 | TPST1 | Proximal | 0 | EVE annotated | 7 |
| | Uniquely | | PE | | | | | | | | | | | | |
| L1M1_dup3888 | Multi | Yes | PEP: 0174 | Redundant | LINE | Other L1 | chr7: 65801311-65802286 | + | 110 | 976 | TPST1 | Proximal | 0 | Not documented | 8 |
| SVA_E_dup117 | Multi | Yes | PEP: 0075, | Redundant | Other | SVA | chr7: 65857742-65859109 | − | 35 | 1368 | TPST1 | Proximal | 0 | Not documented | 9 |
| | | | PE | | | | | | | | | | | | |
| MER58A_dup5583 | Uniquely | Yes | PEP: 0039 | Non | DNA | DNA | chr7: 69494714-69494874 | − | 120 | 161 | AUTS2 | Proximal | 0 | Not documented | 830 |
| | | | | redundant | | | | | | | | | | | |
| L1HS_dup745 | Multi | Yes | PEP: 0324, | Redundant | LINE | L1PA\|B\|x | chr7: 69662315-69668343 | + | 1.4 | 6029 | AUTS2 | Proximal | 0 | EVE annotated | 1 |
| | | | PE | | | | | | | | | | | | |
| MIRb_dup91306 | Uniquely | Yes | PEP: 0355 | Non | SINE | MIR | chr7: 7397959-7398195 | + | 120 | 237 | COL28A1 | Proximal | 0 | Not documented | 2 |
| | | | | redundant | | | | | | | | | | | |
| AluSx1_dup41259 | Multi | Yes | PEP: 0338 | Redundant | SINE | Alu | chr7: 74168749-74169041 | + | 51 | 293 | GTF21 | Proximal | 0 | Not documented | 3 |
| L1PA7_dup5783 | Multi/ | Yes | PEP: 0101, | Redundant | LINE | L1PA\|B\|x | chr7: 7427661-7434025 | − | 42 | 6365 | COL28A1 | Proximal | 0 | EVE annotated | 4 |
| | Uniquely | | PE | | | | | | | | | | | | |
| AluSx1_dup41372 | Multi | Yes | PEP: 0338 | Redundant | SINE | Alu | chr7: 74607086-74607378 | − | 51 | 293 | GTF2IRD2B | Distal | 41464 | Not documented | 5 |
| L1HS_dup714 | Multi | Yes | PEP: 0324, | Redundant | LINE | L1PA\|B\|x | chr7: 7504724-7510751 | + | 2.7 | 6028 | COL28A1 | Proximal | 0 | EVE annotated | 6 |
| | | | PE | | | | | | | | | | | | |
| L2c_dup62900 | Multi | Yes | PEP: 0199 | Non | LINE | L2 | chr7: 77313355-77313910 | + | 140 | 55€ | RSBN1L | Distal | 11851 | Not documented | 7 |
| | | | | redundant | | | | | | | | | | | |
| L1PA7_dup6009 | Uniquely | Yes | PEP: 0278 | Redundant | LINE | L1PA\|B\|x | chr7: 77898110-77904716 | − | 40 | 6607 | MAGI2 | Proximal | 0 | Not documented | 8 |
| L1PA5_dup5048 | Multi | Yes | PEP: 0145 | Redundant | LINE | L1PA\|B\|x | chr7: 78484584-78490675 | − | 32 | 6092 | MAGI2 | Proximal | 0 | EVE annotated | 9 |
| L1PA2_dup2210 | Multi | Yes | PEP: 0324, | Redundant | LINE | L1PA\|B\|x | chr7: 78859111-78865127 | − | 9.5 | 6017 | MAGI2 | Proximal | 0 | EVE annotated | 840 |
| | | | PE | | | | | | | | | | | | |
| L1PA17_dup1942 | Uniquely | Yes | PEP: 0370 | Non | LINE | L1PA\|B\|x | chr7: 8074858-8075524 | + | 160 | 667 | GLCCI1 | Proximal | 0 | Not documented | 1 |
| | | | | redundant | | | | | | | | | | | |
| L1PA7_dup5786 | Uniquely | Yes | PEP: 0303 | Redundant | LINE | L1PA\|B\|x | chr7: 8135955-8141898 | + | 45 | 5944 | GLCCI1 | Distal | 2054 | Not documented | 2 |
| HAL1_dup12404 | Uniquely | Yes | PEP: 0095 | Non | LINE | Other L1 | chr7: 81921336-81923456 | − | 130 | 2121 | CACNA2D1 | Proximal | 0 | Not documented | 3 |
| | | | | redundant | | | | | | | | | | | |
| L1PA2_dup2078 | Multi | Yes | PEP: 0324, | Redundant | LINE | L1PA\|B\|x | chr7: 83618642-83624658 | − | 13 | 6017 | SEMA3A | Proximal | 0 | EVE annotated | 4 |
| | | | PE | | | | | | | | | | | | |
| AluJb_dup56043 | Multi/ | Yes | PEP: 0314 | Non | SINE | Alu | chr7: 87028509-87028812 | + | 78 | 304 | CROT | Proximal | 0 | Not documented | 5 |
| | Uniquely | | | redundant | | | | | | | | | | | |
| L1PB4_dup3202 | Uniquely | Yes | PEP: 0159 | Non | LINE | L1PA\|B\|x | chr7: 88220859-88226583 | + | 89 | 5725 | ZNF804B | Distal | 162100 | Not documented | 6 |
| | | | | redundant | | | | | | | | | | | |
| L1PA7_dup6101 | Uniquely | Yes | PEP: 0303 | Redundant | LINE | L1PA\|B\|x | chr7: 90359190-90365596 | − | 45 | 6407 | CDK14 | Proximal | 0 | EVE annotated | 7 |
| L1PA4_dup5112 | Multi | Yes | PEP: 0324, | Redundant | LINE | L1PA\|B\|x | chr7: 90435806-90441945 | + | 25 | 6140 | CDK14 | Proximal | 0 | EVE annotated | |
| | | | PE | | | | | | | | | | | | |
| L1PA8_dup3441 | Uniquely | Yes | PEP: 0303 | Redundant | LINE | L1PA\|B\|x | chr7: 90700551-90706986 | + | 50 | 6436 | CDK14 | Proximal | 0 | EVE annotated | 9 |
| L1PA3_dup4854 | Uniquely | Yes | PEP: 0113, | Redundant | LINE | L1PA\|B\|x | chr7: 91813071-91819192 | − | 16 | 6122 | LRRD1 | Distal | 4227 | EVE annotated | 850 |
| | | | PE | | | | | | | | | | | | |
| L1PA13_dup3928 | Uniquely | Yes | PEP: 0352, | Redundant | LINE | L1PA\|B\|x | chr7: 95242427-95245758 | + | 59 | 3332 | PDK4 | Distal | 16625 | Not documented | 1 |
| | | | PE | | | | | | | | | | | | |
| L1MA2_dup2984 | Uniquely | Yes | PEP: 0211 | Redundant | LINE | Other L1 | chr7: 96255762-96260885 | − | 60 | 5124 | SHFM1 | Proximal | 0 | Not documented | 2 |
| L1HS_dup759 | Multi | Yes | PEP: 0324, | Redundant | LINE | L1PA\|B\|x | chr7: 96475963-96481992 | − | 1.4 | 6030 | SHFM1 | Distal | 136761 | EVE annotated | 3 |
| | | | PE | | | | | | | | | | | | |
| LTR12C_dup1354 | Multi | Yes | PEP: 0010 | Redundant | LTR | ERV1 | chr7: 97565059-97566447 | + | 32 | 1389 | OCM2 | Distal | 47550 | Not documented | 4 |
| L1PA4_dup5456 | Uniquely | Yes | PEP: 0113 | Redundant | LINE | L1PA\|B\|x | chr7: 99251709-99257824 | − | 24 | 6116 | CYP3A5 | Proximal | 0 | EVE annotated | 5 |
| HERVH-int_dup2926 | Uniquely | Yes | PEP: 0180 | Non | LTR | ERV1 | chr7: 99321692-99325902 | + | 92 | 4211 | CYP3A7 | Proximal | 0 | EVE annotated | 6 |
| | | | | redundant | | | | | | | | | | | |
| L1PA3_dup5574 | Multi | Yes | PEP: 0231, | Redundant | LINE | L1PA\|B\|x | chr8: 122530595-122531667 | − | 10 | 1073 | HAS2 | Distal | 92690 | Not documented | 7 |
| | | | PE | | | | | | | | | | | | |
| L1HS_dup848 | Multi | Yes | PEP: 0324, | Redundant | LINE | L1PA\|B\|x | chr8: 126595131-126601133 | + | 1.4 | 6003 | TRIB1 | Distal | 144485 | EVE annotated | 8 |
| | | | PE | | | | | | | | | | | | |
| L1HS_dup851 | Multi | Yes | PEP: 0324, | Redundant | LINE | L1PA\|B\|x | chr8: 129465236-129471266 | − | 1.4 | 6031 | TMEM75 | Distal | 504646 | EVE annotated | 9 |
| | | | PE | | | | | | | | | | | | |
| L1HS_dup855 | Multi | Yes | PEP: 0324, | Redundant | LINE | L1PA\|B\|x | chr8: 135082987-135089016 | − | 1.8 | 6030 | ZFAT | Distal | 401016 | EVE annotated | 860 |
| | | | PE | | | | | | | | | | | | |
| L1PA5_dup5960 | Uniquely | Yes | PEP: 0113 | Redundant | LINE | L1PA\|B\|x | chr8: 135679867-135684575 | + | 31 | 4709 | ZFAT | Proximal | 0 | EVE annotated | 1 |
| L1HS_dup803 | Multi | Yes | PEP: 0145, | Redundant | LINE | L1PA\|B\|x | chr8: 18454618-18455933 | + | 1.8 | 1316 | PSD3 | Proximal | 0 | Not documented | 2 |
| | | | PE | | | | | | | | | | | | |
| AluSx1_dup45754 | Multi/ | Yes | PEP: 0201 | Redundant | SINE | Alu | chr8: 28048091-28048375 | − | 38 | 285 | ELP3 | Proximal | 0 | Not documented | 3 |
| | Uniquely | | | | | | | | | | | | | | |
| L1MC3_dup6004 | Multi | Yes | PEP: 0084, | Redundant | LINE | Other L1 | chr8: 32898724-32900112 | − | 85 | 1389 | NRG1 | Distal | 276177 | Not documented | 4 |
| | | | PE | | | | | | | | | | | | |
| L1PA5_dup5526 | Uniquely | Yes | PEP: 0303 | Redundant | LINE | L1PA\|B\|x | chr8: 43038792-43044885 | − | 29 | 6094 | HGSNAT | Proximal | 0 | EVE annotated | 5 |
| SAR | Uniquely | Yes | PEP: 0109, | Redundant | Other | Other | chr8: 43092746-43097520 | + | 49 | 4775 | HGSNAT | Distal | 34749 | Not documented | 6 |
| | | | PE | | | Repeats | | | | | | | | | |
| L1HS_dup818 | Multi | Yes | PEP: 0231 | Redundant | LINE | L1PA\|B\|x | chr8: 48244565-48245610 | − | 0.91 | 1046 | SPIDR | Proximal | 0 | Not documented | 7 |
| L1PA2_dup2457 | Multi | Yes | PEP: 0324, | Redundant | LINE | L1PA\|B\|x | chr8: 59827250-59833276 | + | 3.6 | 6027 | TOX | Proximal | 0 | EVE annotated | 8 |
| | | | PE | | | | | | | | | | | | |
| L1PA3_dup5302 | Uniquely | Yes | PEP: 0113, | Redundant | LINE | L1PA\|B\|x | chr8: 63713193-63719375 | + | 20 | 6183 | NKAIN3 | Proximal | 0 | EVE annotated | 9 |
| | | | PE | | | | | | | | | | | | |
| LTR5_Hs_dup281 | Multi | Yes | PEP: 0261 | Redundant | LTR | ERVK | chr8: 7355397-7356364 | − | 4.5 | 968 | DEFB107B | Proximal | 0 | EVE annotated | 870 |
| HERVK-int_dup114 | Multi | Yes | PEP: 0200 | Redundant | LTR | ERVK | chr8: 7356365-7363899 | − | 2.7 | 7535 | DEFB107B | Proximal | 0 | EVE annotated | 1 |
| L1HS_dup795 | Multi | Yes | PEP: 0324, | Redundant | LINE | L1PA\|B\|x | chr8: 73787793-73793823 | − | 1.4 | 6031 | KCNB2 | Proximal | 0 | EVE annotated | 2 |
| | | | PE | | | | | | | | | | | | |
| L1PA6_dup3134 | Multi/ | Yes | PEP: 0219, | Redundant | LINE | L1PA\|B\|x | chr8: 73968585-73974141 | + | 30 | 5557 | SBSPON | Distal | 2635 | Not documented | 3 |
| | Uniquely | | PE | | | | | | | | | | | | |
| L1HS_dup826 | Multi | Yes | PEP: 0231 | Redundant | LINE | L1PA\|B\|x | chr8: 77337395-77338429 | − | 1.4 | 1035 | ZFHX4 | Distal | 255026 | Not documented | 4 |
| HERVK-int_dup117 | Multi | Yes | PEP: 0200 | Redundant | LTR | ERVK | chr8: 8055726-8063197 | + | 70 | 7472 | LRLE1 | Distal | 9396 | EVE annotated | 5 |
| L1ME2_dup6351 | Multi/ | Yes | PEP: 0051 | Redundant | LINE | Other L1 | chr8: 82354600-82355036 | + | 110 | 437 | PMP2 | Proximal | 0 | Not documented | 6 |
| | Uniquely | | | | | | | | | | | | | | |
| Charlie15a_dup1641 | Multi | Yes | PEP: 0259 | Non | DNA | DNA | chr8: 87572503-87572689 | − | 130 | 187 | CPNE3 | Proximal | 0 | Not documented | 7 |
| | | | | redundant | | | | | | | | | | | |
| L1M2_dup4322 | Multi | Yes | PEP: 0076 | Non | LINE | Other L1 | chr8: 90758293-90760495 | + | 100 | 2203 | RIPK2 | Distal | 9481 | Not documented | 8 |
| | | | | redundant | | | | | | | | | | | |
| L1M6_dup3686 | Multi/ | Yes | PEP: 0071 | Non | LINE | Other L1 | chr8: 92081092-92081837 | − | 120 | 746 | OTUD6B | Proximal | 588 | Not documented | 9 |
| | Uniquely | | | redundant | | | | | | | | | | | |
| L1PA3_dup5481 | Uniquely | Yes | PEP: 0303 | Redundant | LINE | L1PA\|B\|x | chr8: 99596326-99602350 | − | 13 | 6025 | STK3 | Proximal | 0 | EVE annotated | 880 |
| L1PA3_dup6018 | Multi | Yes | PEP: 0145, | Redundant | LINE | L1PA\|B\|x | chr9: 106478667-106480752 | − | 13 | 2086 | SMC2 | Distal | 375790 | EVE annotated | 1 |
| | | | PE | | | | | | | | | | | | |
| L1ME4a_dup23477 | Multi | Yes | PEP: 0346 | Non | LINE | Other L1 | chr9: 111702230-111702341 | − | 110 | 112 | FAM206A | Proximal | 0 | Not documented | 2 |
| | | | | redundant | | | | | | | | | | | |
| L1PA4_dup6699 | Uniquely | Yes | PEP: 0349, | Redundant | LINE | L1PA\|B\|x | chr9: 112991699-112998191 | − | 22 | 6493 | TXN | Distal | 7901 | EVE annotated | 3 |
| | | | PE | | | | | | | | | | | | |
| Charlie5_dup1370 | Multi | Yes | PEP: 0265 | Non | DNA | DNA | chr9: 114313982-114316040 | − | 80 | 2059 | PTGR1 | Proximal | 0 | Not documented | 4 |
| | | | | redundant | | | | | | | | | | | |
| FRAM_dup4210 | Multi | Yes | PEP: 0047 | Redundant | SINE | Alu | chr9: 116169844-116170003 | + | 63 | 160 | POLE3 | Proximal | 0 | Not documented | 5 |
| AluY_dup60542 | Multi | Yes | PEP: 0338 | Redundant | SINE | AIL | chr9: 117849969-117850281 | − | 36 | 313 | TNC | Proximal | 0 | Not documented | 6 |
| L1PA6_dup3275 | Uniquely | Yes | PEP: 0113 | Redundant | LINE | L1PA\|B\|x | chr9: 123861305-123866811 | + | 27 | 5507 | CNTRL | Proximal | 0 | EVE annotated | 7 |
| LTR5_Hs_dup327 | Multi | Yes | PEP: 0261 | Redundant | LTR | ERVK | chr9: 124191384-124192351 | + | 5 | 968 | STOM | Distal | 58854 | Not documented | 8 |
| L1PA4_dup6744 | Multi | Yes | PEP: 0324, | Redundant | LINE | L1PA\|B\|x | chr9: 125521300-125524151 | + | 28 | 2852 | OR1L6 | Distal | 8239 | Not documented | 9 |
| | | | PE | | | | | | | | | | | | |
| SVA_D_dup714 | Multi | Yes | PEP: 0075, | Redundant | Other | SVA | chr9: 125629748-125631014 | + | 35 | 1267 | RC3H2 | Proximal | 0 | Not documented | 890 |
| | | | PE | | | | | | | | | | | | |
| L1HS_dup866 | Multi | Yes | PEP: 0231 | Redundant | LINE | L1PA\|B\|x | chr9: 1338002-1338982 | − | 0.91 | 981 | DMRT2 | Distal | 280451 | Not documented | 1 |
| L1HS_dup920 | Multi | Yes | PEP: 0145, | Redundant | LINE | L1PA\|B\|x | chr9: 141078377-141080926 | − | 3.2 | 2550 | CACNA1B | Distal | 59302 | EVE annotated | 2 |
| | | | PE | | | | | | | | | | | | |
| L1PA3_dup5659 | Multi/ | Yes | PEP: 0145, | Redundant | LINE | L1PA\|B\|x | chr9: 4186005-4189898 | − | 16 | 3894 | GLIS3 | Proximal | 0 | EVE annotated | 3 |
| | Uniquely | | PE | | | | | | | | | | | | |
| SVA_F_dup497 | Multi | Yes | PEP: 0075, | Redundant | Other | SVA | chr9: 42128134-42128791 | + | 6.4 | 658 | ANKRD20A2 | Distal | 239513 | Not documented | 4 |
| | | | PE | | | | | | | | | | | | |
| L1PA7_dup7120 | Multi/ | Yes | PEP: 0156, | Redundant | LINE | L1PA\|B\|x | chr9: 4248930-4254064 | − | 44 | 5135 | GLIS3 | Proximal | 0 | EVE annotated | 5 |
| | Uniquely | | PE | | | | | | | | | | | | |
| SST1_dup72 | Multi | Yes | PEP: 0347 | Redundant | Other | Other | chr9: 44989880-44990691 | + | 110 | 812 | FAM27C | Proximal | 0 | Not documented | 6 |
| | | | | | | Repeats | | | | | | | | | |
| L1HS_dup883 | Multi | Yes | PEP: 0324, | Redundant | LINE | L1PA\|B\|x | chr9: 46439644-46445703 | − | 1.8 | 6060 | FAM27D1 | Distal | 48089 | Not documented | 7 |
| | | | PE | | | | | | | | | | | | |
| SVA_F_dup498 | Multi | Yes | PEP: 0075, | Redundant | Other | SVA | chr9: 46578247-46578904 | − | 6.4 | 658 | FAM27D1 | Distal | 186692 | Not documented | 8 |
| | | | PE | | | | | | | | | | | | |
| Tigger1_dup6601 | Uniquely | Yes | PEP: 0293 | Redundant | DNA | DNA | chr9: 4725912-4728263 | − | 50 | 2352 | AK3 | Proximal | 0 | Not documented | 9 |
| L1PA6_dup3365 | Multi | Yes | PEP: 0112 | Redundant | LINE | L1PA\|B\|x | chr9: 66478268-66484289 | − | 44 | 6022 | SPATA31A7 | Distal | 968659 | EVE annotated | 900 |
| ALR/Alpha_dup555 | Multi | Yes | PEP: 0227, | Redundant | Other | Other | chr9: 66767879-66826625 | + | 59 | 58747 | FAM27E3 | Distal | 958320 | Not documented | 1 |
| | | | PE | | | Repeats | | | | | | | | | |
| ALR/Alpha_dup545 | Multi | Yes | PEP: 0148 | Redundant | Other | Other | chr9: 66839600-66853530 | + | 72 | 13931 | FAM27E3 | Distal | 931415 | Not documented | 2 |
| | | | | | | Repeats | | | | | | | | | |
| ALR/Alpha_dup546 | Multi | Yes | PEP: 0336 | Redundant | Other | Other | chr9: 66970956-66992580 | − | 72 | 21625 | FAM27E3 | Distal | 792365 | Not documented | 3 |
| | | | | | | Repeats | | | | | | | | | |
| SST1_dup105 | Multi | Yes | PEP: 0347 | Redundant | Other | Other | chr9: 67793734-67794545 | − | 110 | 812 | FAM27B | Proximal | 0 | Not documented | 4 |
| | | | | | | Repeats | | | | | | | | | |
| L1PA6_dup3370 | Multi | Yes | PEP: 0053, | Redundant | LINE | L1PA\|B\|x | chr9: 68385162-68388929 | + | 44 | 3768 | RP11-195B21.3 | Distal | 397165 | EVE annotated | 5 |
| | | | PE | | | | | | | | | | | | |
| L1MA9_dup8907 | Multi | Yes | PEP: 0160 | Redundant | LINE | Other L1 | chr9: 68701109-68703344 | − | 98 | 2236 | FOXD4L6 | Distal | 496137 | Not documented | 6 |
| ALR/Alpha_dup562 | Multi | Yes | PEP: 0336 | Redundant | Other | Other | chr9: 69689765-69711386 | + | 68 | 21622 | AL445665.1 | Distal | 29408 | Not documented | 7 |
| | | | | | | Repeats | | | | | | | | | |
| ALR/Alpha_dup547 | Multi/ | Yes | PEP: 0037, | Redundant | Other | Other | chr9: 69948086-70000000 | + | 62 | 51915 | FOXD4L5 | Distal | 175708 | Not documented | 8 |
| | Uniquely | | PE | | | Repeats | | | | | | | | | |
| ALR/Alpha_dup563 | Multi | Yes | PEP: 0031, | Redundant | Other | Other | chr9: 70000002-70010538 | + | 58 | 10537 | FOXD4L5 | Distal | 165170 | Not documented | 9 |
| | | | PE | | | Repeats | | | | | | | | | |
| L1PA8_dup4485 | Multi/ | Yes | PEP: 0168, | Redundant | LINE | L1PA\|B\|x | chr9: 72794790-72800921 | − | 48 | 6132 | MAMDC2 | Proximal | 0 | EVE annotated | 910 |
| | Uniquely | | PE | | | | | | | | | | | | |
| L1MB7_dup10948 | Uniquely | Yes | PEP: 0206, | Non | LINE | Other L1 | chr9: 72803820-72806017 | − | 100 | 2198 | MAMDC2 | Proximal | 0 | Not documented | 1 |
| | | | PE | redundant | | | | | | | | | | | |
| L1PA2_dup2760 | Multi/ | Yes | PEP: 0169, | Redundant | LINE | L1PA\|B\|x | chr9: 72813973-72819997 | − | 8.2 | 6025 | MAMDC2 | Proximal | 0 | EVE annotated | 2 |
| | Uniquely | | PE | | | | | | | | | | | | |
| L1PA5_dup6270 | Multi/ | Yes | PEP: 0219, | Redundant | LINE | L1PA\|B\|x | chr9: 72821546-72827671 | − | 32 | 6126 | MAMDC2 | Proximal | 0 | EVE annotated | 3 |
| | Uniquely | | PE | | | | | | | | | | | | |
| L2a_dup91612 | Uniquely | Yes | PEP: 0170 | Redundant | LINE | L2 | chr9: 72836708-72837363 | − | 130 | 656 | MAMDC2 | Proximal | 0 | Not documented | 4 |
| AluSc8_dup10464 | Multi | Yes | PEP: 0196 | Redundant | SINE | Alu | chr9: 78609329-78609637 | − | 32 | 309 | PCSK5 | Proximal | 0 | Not documented | 5 |
| L2c_dup77461 | Multi/ | Yes | PEP: 0223 | Non | LINE | L2 | chr9: 96209512-96209644 | + | 140 | 133 | FAM120AOS | Proximal | 0 | Not documented | 6 |
| | Uniquely | | | redundant | | | | | | | | | | | |
| L1PA5_dup6342 | Multi | Yes | PEP: 0219, | Redundant | LINE | L1PA\|B\|x | chr9: 96979026-96985164 | + | 28 | 6139 | ZNF169 | Distal | 36430 | EVE annotated | 7 |
| | | | PE | | | | | | | | | | | | |
| L1HS_dup904 | Multi | Yes | PEP: 0324, | Redundant | LINE | L1PA\|B\|x | chr9: 98459868-98465900 | + | 1.4 | 6033 | DKFZP434H0512 | Distal | 68706 | EVE annotated | 8 |
| | | | PE | | | | | | | | | | | | |
| L1PA2_dup3131 | Multi | Yes | PEP: 0053, | Redundant | LINE | L1PA\|B\|x | chrX: 108297821-108302024 | + | 9.5 | 4204 | GUCY2F | Distal | 314112 | EVE annotated | 9 |
| | | | PE | | | | | | | | | | | | |
| L1PA8_dup5041 | Multi | Yes | PEP: 0146, | Redundant | LINE | L1PA\|B\|x | chrX: 108447417-108452584 | − | 62 | 5168 | GUCY2F | Distal | 163552 | Not documented | 920 |
| | | | PE | | | | | | | | | | | | |
| L2_dup34098 | Multi | Yes | PEP: 0267 | Non | LINE | L2 | chrX: 108461301-108463314 | − | 170 | 2014 | GUCY2F | Distal | 152822 | Not documented | 1 |
| | | | | redundant | | | | | | | | | | | |
| Harlequin-int_dup331 | Multi | Yes | PEP: 0135 | Redundant | LTR | ERV1 | chrX: 115033232-115040112 | − | 42 | 6881 | RP1-241P17.4 | Distal | 79564 | EVE annotated | 2 |
| L1PA7_dup8551 | Uniquely | Yes | PEP: 0303 | Redundant | LINE | L1PA\|B\|x | chrX: 117072906-117078207 | − | 39 | 5302 | KLHL13 | Proximal | 0 | EVE annotated | 3 |
| L1HS_dup923 | Multi | Yes | PEP: 0324, | Redundant | LINE | L1PA\|B\|x | chrX: 11725369-11731399 | + | 1.4 | 6031 | ARHGAP6 | Distal | 41549 | EVE annotated | 4 |
| | | | PE | | | | | | | | | | | | |
| L1HS_dup1014 | Multi | Yes | PEP: 0324, | Redundant | LINE | L1PA\|B\|x | chrX: 118569432-118575456 | − | 1.4 | 6025 | SLC25A43 | Proximal | 0 | EVE annotated | 5 |
| | | | PE | | | | | | | | | | | | |
| L1HS_dup924 | Multi | Yes | PEP: 0210, | Redundant | LINE | L1PA\|B\|x | chrX: 11953208-11959433 | − | 4.5 | 6226 | MSL3 | Distal | 159339 | EVE annotated | 6 |
| | | | PE | | | | | | | | | | | | |
| L1PB1_dup8747 | Uniquely | Yes | PEP: 0366 | Redundant | LINE | L1PA\|B\|x | chrX: 128384209-128389887 | − | 44 | 5679 | SMARCA1 | Distal | 190594 | Not documented | 7 |
| L1HS_dup1037 | Multi | Yes | PEP: 0324, | Redundant | LINE | L1PA\|B\|x | chrX: 146735253-146741285 | + | 1.8 | 6033 | FMR1 | Distal | 252185 | EVE annotated | 8 |
| | | | PE | | | | | | | | | | | | |
| AluSp_dup25151 | Multi | Yes | PEP: 0345 | Redundant | SINE | Alu | chrX: 38186030-38186327 | + | 25 | 298 | RPGR | Proximal | 0 | Not documented | 9 |
| L1P3_dup1956 | Uniquely | Yes | PEP: 0303 | Redundant | LINE | L1PA\|B\|x | chrX: 49154125-49156946 | − | 45 | 2822 | PPP1R3F | Proximal | 0 | Not documented | 930 |
| L1PA15_dup4778 | Uniquely | Yes | PEP: 0299 | Non | LINE | L1PA\|B\|x | chrX: 56164229-56167209 | + | 70 | 2981 | AL353698.1 | Distal | 62216 | Not documented | 1 |
| | | | | redundant | | | | | | | | | | | |
| L1PA6_dup3590 | Multi | Yes | PEP: 0363, | Redundant | LINE | L1PA\|B\|x | chrX: 56515967-56522017 | − | 39 | 6051 | UBQLN2 | Distal | 68010 | EVE annotated | 2 |
| | | | PE | | | | | | | | | | | | |
| HERVH48-int_dup69 | Multi | Yes | PEP: 0127 | Non | LTR | ERV1 | chrX: 57246896-57250706 | + | 17 | 3811 | FAAH2 | Distal | 62434 | EVE annotated | 3 |
| | | | | redundant | | | | | | | | | | | |
| L1PA13_dup5216 | Uniquely | Yes | PEP: 0117, | Non | LINE | L1PA\|B\|x | chrX: 64933942-64935947 | − | 42 | 2006 | MSN | Proximal | 0 | Not documented | 4 |
| | | | PE | redundant | | | | | | | | | | | |
| L1PA5_dup6871 | Uniquely | Yes | PEP: 0113, | Redundant | LINE | L1PA\|B\|x | chrX: 73253779-73259910 | − | 28 | 6132 | ZCCHC13 | Distal | 264116 | EVE annotated | 5 |
| | | | PE | | | | | | | | | | | | |
| L1PA7_dup8064 | Uniquely | Yes | PEP: 0113, | Redundant | LINE | L1PA\|B\|x | chrX: 73260446-73266814 | − | 43 | 6369 | ZCCHC13 | Distal | 257212 | EVE annotated | 6 |
| | | | PE | | | | | | | | | | | | |
| L1PREC2_dup4604 | Uniquely | Yes | PEP: 0257 | Non | LINE | L1PA\|B\|x | chrX: 74951171-74955557 | − | 88 | 4387 | MAGEE2 | Distal | 47267 | Not documented | 7 |
| | | | | redundant | | | | | | | | | | | |
| L1PA7_dup8084 | Uniquely | Yes | PEP: 0218 | Non | LINE | L1PA\|B\|x | chrX: 75033811-75040159 | + | 50 | 6349 | MAGEE2 | Distal | 28733 | EVE annotated | 8 |
| | | | | redundant | | | | | | | | | | | |
| HERVL18-int_dup353 | Uniquely | Yes | PEP: 0323 | Non | LTR | ERVL | chrX: 76017214-76023243 | + | 67 | 6030 | MAGEE1 | Distal | 365471 | EVE annotated | 9 |
| | | | | redundant | | | | | | | | | | | |
| L1PA14_dup1949 | Uniquely | Yes | PEP: 0317 | Non | LINE | L1PA\|B\|x | chrX: 80979302-80982925 | + | 91 | 3624 | SH3BGRL | Distal | 425257 | Not documented | 940 |
| | | | | redundant | | | | | | | | | | | |
| L1HS_dup979 | Multi | Yes | PEP: 0324, | Redundant | LINE | L1PA\|B\|x | chrX: 81096653-81102683 | + | 2.3 | 6031 | SH3BGRL | Distal | 542608 | EVE annotated | 1 |
| | | | PE | | | | | | | | | | | | |
| L1PA15_dup5004 | Uniquely | Yes | PEP: 0073 | Non | LINE | L1PA\|B\|x | chrX: 82481963-82487154 | − | 99 | 5192 | POU3F4 | Distal | 276116 | Not documented | 2 |
| | | | | redundant | | | | | | | | | | | |
| L1M1_dup4817 | Uniquely | Yes | PEP: 0211 | Redundant | LINE | Other L1 | chrX: 82702381-82707439 | − | 72 | 5059 | POU3F4 | Distal | 55831 | Not documented | 3 |
| L1M1_dup5626 | Uniquely | Yes | PEP: 0192 | Redundant | LINE | Other L1 | chrX: 86802848-86806557 | + | 73 | 3710 | KLHL4 | Proximal | 0 | Not documented | 4 |
| SVA_D_dup775 | Multi | Yes | PEP: 0075, | Redundant | Other | SVA | chrX: 99978130-99979868 | + | 20 | 1739 | SYTL4 | Proximal | 0 | Not documented | 5 |
| | | | PE | | | | | | | | | | | | |
| ALR/Alpha_dup665 | Multi | Yes | PEP: 0336 | Redundant | Other | Other | chrY: 10080737-10093376 | − | 75 | 12640 | FAM197Y1 | Distal | 696045 | Not documented | 6 |
| | | | | | | Repeats | | | | | | | | | |
| L1HS_dup1055 | Multi | Yes | PEP: 0324, | Redundant | LINE | L1PA\|B\|x | chrY: 5474210-5480240 | − | 2.3 | 6031 | PCDH11Y | Proximal | 0 | EVE annotated | 7 |
| | | | PE | | | | | | | | | | | | |
| L1PA3_dup7163 | Multi | Yes | PEP: 0169, | Redundant | LINE | L1PA\|B\|x | chrY: 9969663-9971179 | − | 18 | 1517 | FAM197Y1 | Distal | 584971 | Not documented | 8 |
| | | | PE | | | | | | | | | | | | |
| AluSq2_dup2383 | Uniquely | No | — | — | SINE | Alu | chr1: 100437444-100437756 | − | 39 | 313 | SLC35A3 | Proximal | 0 | Not documented | 9 |
| AluSz_dup4285 | Uniquely | No | — | — | SINE | Alu | chr1: 100437888-100438191 | − | 45 | 304 | SLC35A3 | Proximal | 0 | Not documented | 950 |
| MER11A_dup25 | Uniquely | No | — | — | LTR | ERVK | chr1: 100729324-100730419 | + | 22 | 1096 | RTCA | Proximal | 1345 | Not documented | 1 |
| L1MB2_dup268 | Uniquely | No | — | — | LINE | Other L1 | chr1: 101353797-101354285 | + | 77 | 489 | EXTL2 | Proximal | 0 | Not documented | 2 |
| AluSq2_dup2403 | Multi | No | — | — | SINE | Alu | chr1: 101443294-101443609 | − | 55 | 316 | SLC30A7 | Proximal | 0 | Not documented | 3 |
| MIR3_dup4855 | Multi | No | — | — | SINE | MIR | chr1: 101444005-101444198 | − | 140 | 194 | SLC30A7 | Proximal | 0 | Not documented | 4 |
| THE1D_dup387 | Multi | No | — | — | LTR | ERVL- | chr1: 101455572-101455915 | − | 47 | 344 | DPH5 | Proximal | 0 | Not documented | 5 |
| | | | | | | MaLR | | | | | | | | | |
| LTR6A_dup7 | Multi | No | — | — | LTR | ERV1 | chr1: 102252741-102252770 | + | 15 | 30 | OLFM3 | Distal | 15361 | Not documented | 6 |
| FAM_dup16 | Multi | No | — | — | SINE | Alu | chr1: 10331227-10331376 | − | 58 | 150 | KIF1B | Proximal | 0 | Not documented | 7 |
| Tigger1_dup432 | Uniquely | No | — | — | DNA | DNA | chr1: 103522254-103524702 | − | 68 | 2449 | COL11A1 | Proximal | 0 | Not documented | 8 |
| MIRc_dup288 | Multi | No | — | — | SINE | MIR | chr1: 10358774-10358862 | − | 100 | 89 | KIF1B | Proximal | 0 | Not documented | 9 |
| AluYk11_dup9 | Multi | No | — | — | SINE | Alu | chr1: 10358932-10358993 | + | 37 | 62 | KIF1B | Proximal | 0 | Not documented | 960 |
| AluSx_dup966 | Multi | No | — | — | SINE | Alu | chr1: 10367358-10367667 | − | 53 | 310 | KIF1B | Proximal | 0 | Not documented | 1 |
| L2b_dup406 | Uniquely | No | — | — | LINE | L2 | chr1: 10371571-10372991 | + | 140 | 1421 | KIF1B | Proximal | 0 | Not documented | 2 |
| AluSx_dup981 | Multi | No | — | — | SINE | Alu | chr1: 10440484-10440777 | + | 45 | 294 | KIF1B | Proximal | 0 | Not documented | 3 |
| MIRb_dup609 | Multi | No | — | — | SINE | MIR | chr1: 10491100-10491219 | + | 140 | 120 | APITD1 | Proximal | 0 | Not documented | 4 |
| AluY_dup682 | Multi/ | No | — | — | SINE | Alu | chr1: 10520965-10521264 | − | 29 | 300 | DFFA | Proximal | 0 | Not documented | 5 |
| | Uniquely | | | | | | | | | | | | | | |
| AluSz_dup4434 | Multi | No | — | — | SINE | Alu | chr1: 109474613-109474905 | + | 51 | 293 | CLCC1 | Proximal | 0 | Not documented | 6 |
| MER5A_dup1187 | Multi/ | No | — | — | DNA | DNA | chr1: 109505048-109505116 | − | 99 | 69 | CLCC1 | Proximal | 0 | Not documented | 7 |
| | Uniquely | | | | | | | | | | | | | | |
| AluSz_dup4440 | Uniquely | No | — | — | SINE | Alu | chr1: 109505210-109505508 | + | 65 | 299 | CLCC1 | Proximal | 0 | Not documented | 8 |
| AluY_dup5129 | Multi/ | No | — | — | SINE | Alu | chr1: 109605629-109605927 | − | 14 | 299 | TAF13 | Proximal | 0 | Not documented | 9 |
| | Uniquely | | | | | | | | | | | | | | |
| AluSz6_dup2122 | Multi | No | — | — | SINE | Alu | chr1: 109606075-109606363 | − | 45 | 289 | TAF13 | Proximal | 0 | Not documented | 970 |
| MIRb_dup14129 | Multi | No | — | — | SINE | MIR | chr1: 109824039-109824175 | − | 120 | 137 | PSRC1 | Proximal | 0 | Not documented | 1 |
| MIRc_dup5840 | Multi | No | — | — | SINE | MIR | chr1: 109854537-109854636 | + | 150 | 100 | SORT1 | Proximal | 0 | Not documented | 2 |
| MLT2B2_dup95 | Uniquely | No | — | — | LTR | ERVL | chr1: 110207649-110208171 | + | 84 | 523 | GSTM4 | Proximal | 0 | Not documented | 3 |
| L1MC4a_dup908 | Multi/ | No | — | — | LINE | Other L1 | chr1: 110279109-110279365 | − | 170 | 257 | GSTM3 | Proximal | 0 | Not documented | 4 |
| | Uniquely | | | | | | | | | | | | | | |
| FLAM_A_dup742 | Multi/ | No | — | — | SINE | Alu | chr1: 110547260-110547384 | + | 95 | 125 | AHCYL1 | Proximal | 0 | Not documented | 5 |
| | Uniquely | | | | | | | | | | | | | | |
| MER 94B_dup31 | Multi/ | No | — | — | DNA | DNA | chr1: 110547638-110547737 | − | 94 | 100 | AHCYL1 | Proximal | 0 | Not documented | 6 |
| | Uniquely | | | | | | | | | | | | | | |
| AluSz6_dup2152 | Uniquely | No | — | — | SINE | Alu | chr1: 110563598-110563888 | + | 50 | 291 | AHCYL1 | Proximal | 0 | Not documented | 7 |
| MER5B_dup722 | Uniquely | No | — | — | DNA | DNA | chr1: 110563952-110564085 | − | 110 | 134 | AHCYL1 | Proximal | 0 | Not documented | 8 |
| L2c_dup8383 | Uniquely | No | — | — | LINE | L2 | chr1: 110604793-110605020 | + | 180 | 228 | ALX3 | Proximal | 0 | Not documented | 9 |
| Helitron2Na_Mam_{—} | Multi | No | — | — | Other | Other | chr1: 112003809-112004031 | + | 140 | 223 | ATP5F1 | Proximal | 0 | Not documented | 980 |
| dup17 | | | | | | Repeats | | | | | | | | | |
| MIRb_dup14385 | Uniquely | No | — | — | SINE | MIR | chr1: 112265506-112265704 | − | 130 | 199 | FAM212B | Proximal | 0 | Not documented | 1 |
| AluSx1_dup4762 | Multi/ | No | — | — | SINE | Alu | chr1: 112316032-112316342 | − | 54 | 311 | KCND3 | Proximal | 0 | Not documented | 2 |
| | Uniquely | | | | | | | | | | | | | | |
| MLT1A0_dup777 | Uniquely | No | — | — | LTR | ERVL- | chr1: 113153031-113153377 | − | 75 | 347 | ST7L | Proximal | 0 | Not documented | 3 |
| | | | | | | MaLR | | | | | | | | | |
| L2b_dup6263 | Multi | No | — | — | LINE | L2 | chr1: 113229119-113229680 | + | 140 | 562 | MOV10 | Proximal | 0 | Not documented | 4 |
| L1M1_dup311 | Uniquely | No | — | — | LINE | Other L1 | chr1: 114256401-114257995 | + | 57 | 1595 | PHTF1 | Proximal | 0 | Not documented | 5 |
| AluJb_dup7772 | Uniquely | No | — | — | SINE | Alu | chr1: 114257996-114258300 | + | 70 | 305 | PHTF1 | Proximal | 0 | Not documented | 6 |
| MIR_dup9819 | Multi | No | — | — | SINE | MIR | chr1: 115110014-115110264 | + | 120 | 251 | BCAS2 | Proximal | 0 | Not documented | 7 |
| AluSx3_dup1434 | Multi | No | — | — | SINE | Alu | chr1: 115248251-115248409 | − | 46 | 159 | NRAS | Proximal | 0 | Not documented | 8 |
| L3_dup2391 | Multi | No | — | — | LINE | CR1 | chr1: 116932866-116932914 | + | 81 | 49 | ATP1A1 | Proximal | 0 | Not documented | 9 |
| L2a_dup9377 | Uniquely | No | — | — | LINE | L2 | chr1: 117651831-117652786 | − | 130 | 956 | TRIM45 | Proximal | 897 | Not documented | 990 |
| L2c_dup9026 | Uniquely | No | — | — | LINE | L2 | chr1: 118423911-118424233 | − | 140 | 323 | GDAP2 | Proximal | 0 | Not documented | 1 |
| MIR3_dup5346 | Multi | No | — | — | SINE | MIR | chr1: 118502533-118502587 | − | 150 | 55 | WDR3 | Proximal | 0 | Not documented | 2 |
| AluSg_dup2030 | Uniquely | No | — | — | SINE | Alu | chr1: 119305589-119305908 | + | 53 | 320 | TBX15 | Distal | 119762 | Not documented | 3 |
| L2c_dup9163 | Multi | No | — | — | LINE | L2 | chr1: 120519146-120519788 | + | 140 | 643 | NOTCH2 | Proximal | 0 | Not documented | 4 |
| L1MB8_dup523 | Multi/ | No | — | — | LINE | Other L1 | chr1: 120531879-120533113 | + | 78 | 1235 | NOTCH2 | Proximal | 0 | Not documented | 5 |
| | Uniquely | | | | | | | | | | | | | | |
| MIR3_dup5433 | Multi/ | No | — | — | SINE | MIR | chr1: 120533196-120533341 | − | 150 | 146 | NOTCH2 | Proximal | 0 | Not documented | 6 |
| | Uniquely | | | | | | | | | | | | | | |
| AluSx1_dup5013 | Multi | No | — | — | SINE | Alu | chr1: 120534168-120534479 | + | 51 | 312 | NOTCH2 | Proximal | 0 | Not documented | 7 |
| L2b_dup6565 | Multi | No | — | — | LINE | L2 | chr1: 120534812-120535152 | − | 140 | 341 | NOTCH2 | Proximal | 0 | Not documented | 8 |
| AluSp_dup394 | Multi | No | — | — | SINE | Alu | chr1: 13919039-13919344 | − | 27 | 306 | PDPN | Proximal | 0 | Not documented | 9 |
| L1MB7_dup114 | Multi | No | — | — | LINE | Other L1 | chr1: 13919345-13919554 | − | 80 | 210 | PDPN | Proximal | 0 | Not documented | 1000 |
| AluSc_dup236 | Multi | No | — | — | SINE | Alu | chr1: 13943969-13944165 | − | 46 | 197 | PDPN | Proximal | 0 | Not documented | 1 |
| CER | Multi | No | — | — | Other | Other | chr1: 142653294-142657245 | − | 47 | 3952 | PPIAL4G | Distal | 1109900 | Not documented | 2 |
| | | | | | | Repeats | | | | | | | | | |
| CER_dup4 | Multi | No | — | — | Other | Other | chr1: 143434273-143438931 | + | 47 | 4659 | PPIAL4G | Distal | 328214 | Not documented | 3 |
| | | | | | | Repeats | | | | | | | | | |
| MER66C_dup33 | Multi | No | — | — | LTR | ERV1 | chr1: 143717471-143718011 | − | 88 | 541 | PPIAL4G | Distal | 49134 | Not documented | 4 |
| MER66-int_dup49 | Multi | No | — | — | LTR | ERV1 | chr1: 143718012-143718360 | − | 63 | 349 | PPIAL4G | Distal | 48785 | Not documented | 5 |
| L1MC4_dup1132 | Multi | No | — | — | LINE | Other L1 | chr1: 144829702-144830140 | − | 150 | 439 | NBPF9 | Proximal | 0 | Not documented | 6 |
| MIR3_dup5503 | Multi | No | — | — | SINE | MIR | chr1: 144984359-144984465 | − | 110 | 107 | PDE4DIP | Proximal | 0 | Not documented | 7 |
| AluJb_dup8156 | Multi | No | — | — | SINE | Alu | chr1: 145004877-145004999 | + | 70 | 123 | PDE4DIP | Proximal | 0 | Not documented | 8 |
| AluSp_dup2655 | Multi | No | — | — | SINE | Alu | chr1: 145005000-145005267 | + | 49 | 268 | PDE4DIP | Proximal | 0 | Not documented | 9 |
| AluSg_dup2069 | Multi | No | — | — | SINE | Alu | chr1: 145137496-145137781 | + | 46 | 286 | PDE4DIP | Distal | 61311 | Not documented | 1010 |
| AluSz_dup4839 | Multi | No | — | — | SINE | Alu | chr1: 145150328-145150658 | − | 51 | 331 | NOTCH2NL | Distal | 58462 | Not documented | 1 |
| AluSx1_dup5096 | Multi | No | — | — | SINE | Alu | chr1: 145286830-145287141 | − | 52 | 312 | NOTCH2NL | Proximal | 0 | Not documented | 2 |
| L1MB7_dup987 | Multi | No | — | — | LINE | Other L1 | chr1: 145287999-145289032 | − | 79 | 1034 | NOTCH2NL | Proximal | 0 | Not documented | 3 |
| L1MB7_dup988 | Multi | No | — | — | LINE | Other L1 | chr1: 145289021-145289266 | + | 98 | 246 | NOTCH2NL | Proximal | 0 | Not documented | 4 |
| AluJr_dup3603 | Multi | No | — | — | SINE | Alu | chr1: 145289363-145289667 | + | 70 | 305 | NOTCH2NL | Proximal | 0 | Not documented | 5 |
| MIR_dup10359 | Multi | No | — | — | SINE | MIR | chr1: 145289835-145289953 | + | 110 | 119 | NBPF10 | Proximal | 0 | Not documented | 6 |
| MER5A_dup1350 | Multi/ | No | — | — | DNA | DNA | chr1: 145289991-145290073 | + | 110 | 83 | NBPF10 | Proximal | 0 | Not documented | 7 |
| | Uniquely | | | | | | | | | | | | | | |
| L1MC4_dup1139 | Multi | No | — | — | LINE | Other L1 | chr1: 145369415-145369590 | + | 170 | 176 | NBPF10 | Proximal | 0 | Not documented | 8 |
| L1MC4_dup1140 | Multi | No | — | — | LINE | Other L1 | chr1: 145369602-145370040 | − | 150 | 439 | NBPF10 | Proximal | 0 | Not documented | 9 |
| MLT2F_dup82 | Multi | No | — | — | LTR | ERVL | chr1: 145384245-145384419 | − | 140 | 175 | NBPF10 | Distal | 13943 | Not documented | 1020 |
| AluSg7_dup414 | Multi | No | — | — | SINE | Alu | chr1: 145458500-145458791 | − | 51 | 292 | POLR3GL | Proximal | | Not documented | 1 |
| AluJb_dup8187 | Multi | No | — | — | SINE | Alu | chr1: 145495896-145496109 | + | 72 | 214 | LIX1L | Proximal | 0 | Not documented | 2 |
| AluSz6_dup2338 | Multi | No | — | — | SINE | Alu | chr1: 145499905-145500000 | − | 33 | 96 | LIX1L | Proximal | 0 | Not documented | 3 |
| AluSx_dup7382 | Multi | No | — | — | SINE | Alu | chr1: 145500001-145500203 | − | 43 | 203 | LIX1L | Proximal | 0 | Not documented | 4 |
| AluY_dup5684 | Multi | No | — | — | SINE | Alu | chr1: 145500214-145500489 | − | 30 | 276 | LIX1L | Proximal | | Not documented | 5 |
| AluY_dup5685 | Multi | No | — | — | SINE | Alu | chr1: 145500501-145500802 | − | 16 | 302 | LIX1L | Proximal | 0 | Not documented | 6 |
| AluSz6_dup2339 | Multi | No | — | — | SINE | Alu | chr1: 145512872-145513145 | − | 60 | 274 | RBM8A | Proximal | 0 | Not documented | 7 |
| L1PA15_dup22 | Uniquely | No | — | — | LINE | L1PA\|B\|x | chr1: 14551485-14553544 | + | 55 | 2060 | KAZN | Distal | 371657 | Not documented | 8 |
| L1MC4_dup1145 | Multi | No | — | — | LINE | Other L1 | chr1: 146032809-146033247 | + | 140 | 439 | NBPF11 | Proximal | 0 | Not documented | 9 |
| L1MC4_dup1146 | Multi | No | — | — | LINE | Other L1 | chr1: 146033259-146033434 | − | 170 | 176 | NBPF11 | Proximal | | Not documented | 1030 |
| L1MC4_dup1147 | Multi | No | — | — | LINE | Other L1 | chr1: 146466852-146467027 | + | 170 | 176 | NBPF12 | Proximal | | Not documented | 1 |
| L1MC4_dup1148 | Multi | No | — | — | LINE | Other L1 | chr1: 146467039-146467477 | − | 150 | 439 | NBPF12 | Proximal | | Not documented | 2 |
| L2b_dup6674 | Multi/ | No | — | — | LINE | L2 | chr1: 147079473-147080358 | − | 130 | 886 | BCL9 | Proximal | | Not documented | 3 |
| | Uniquely | | | | | | | | | | | | | | |
| MIR_dup10454 | Multi/ | No | — | — | SINE | MIR | chr1: 147080640-147080861 | + | 110 | 222 | BCL9 | Proximal | | Not documented | 4 |
| | Uniquely | | | | | | | | | | | | | | |
| L1MC4_dup1163 | Multi | No | — | — | LINE | Other L1 | chr1: 147574590-147575028 | + | 140 | 439 | NBPF24 | Proximal | 0 | Not documented | 5 |
| L1MC4_dup1164 | Multi | No | — | — | LINE | Other L1 | chr1: 147575040-147575215 | − | 170 | 176 | NBPF24 | Proximal | 0 | Not documented | 6 |
| MER66C_dup35 | Multi | No | — | — | LTR | ERV1 | chr1: 147904980-147905520 | − | 88 | 541 | PPIAL4A | Distal | 49116 | Not documented | 7 |
| MER66-int_dup54 | Multi | No | — | — | LTR | ERV1 | chr1: 147905521-147905869 | − | 63 | 349 | PPIAL4A | Distal | 48767 | Not documented | 8 |
| L1MC4_dup1168 | Multi | No | — | — | LINE | Other L1 | chr1: 148003192-148003630 | + | 150 | 439 | NBPF14 | Proximal | 13 | Not documented | 9 |
| L1MC4_dup1169 | Multi | No | — | — | LINE | Other L1 | chr1: 148003642-148003817 | − | 160 | 176 | NBPF14 | Proximal | 0 | Not documented | 1040 |
| L1MC4_dup1171 | Multi | No | — | — | LINE | Other L1 | chr1: 148250516-148250957 | + | 150 | 442 | NBPF20 | Proximal | 0 | Not documented | 1 |
| L1MC4_dup1172 | Multi | No | — | — | LINE | Other L1 | chr1: 148251044-148251144 | − | 150 | 101 | NBPF20 | Proximal | 0 | Not documented | 2 |
| AluJb_dup8341 | Multi | No | — | — | SINE | Alu | chr1: 148558146-148558443 | − | 72 | 298 | NBPF15 | Proximal | 0 | Not documented | 3 |
| L1MC4_dup1173 | Multi | No | — | — | LINE | Other L1 | chr1: 148595371-148595546 | + | 170 | 176 | NBPF15 | Proximal | 0 | Not documented | 4 |
| L1MC4_dup1174 | Multi | No | — | — | LINE | Other L1 | chr1: 148595558-148595996 | − | 150 | 439 | NBPF15 | Proximal | 0 | Not documented | 5 |
| L1MC4_dup1177 | Multi | No | — | — | LINE | Other L1 | chr1: 148757415-148757590 | + | 170 | 176 | NBPF16 | Proximal | 0 | Not documented | 6 |
| L1MC4_dup1178 | Multi | No | — | — | LINE | Other L1 | chr1: 148757602-148758040 | − | 150 | 439 | NBPF16 | Proximal | 0 | Not documented | 7 |
| TAR1_dup5 | Multi | No | — | — | Other | Other | chr1: 148927800-148928362 | − | 74 | 563 | NBPF16 | Distal | 169490 | Not documented | 8 |
| | | | | | | Repeats | | | | | | | | | |
| L1MEc_dup988 | Multi | No | — | — | LINE | Other L1 | chr1: 148936741-148938004 | + | 89 | 1264 | NBPF16 | Distal | 178431 | Not documented | 9 |
| MLT1J2_dup325 | Multi | No | — | — | LTR | ERVL- | chr1: 148951232-148951367 | + | 140 | 136 | NBPF16 | Distal | 192922 | Not documented | 1050 |
| | | | | | | MaLR | | | | | | | | | |
| LTR4_dup6 | Multi | No | — | — | LTR | ERV1 | chr1: 149214757-149215159 | − | 95 | 403 | HIST2H3PS2 | Distal | 184973 | Not documented | 1 |
| Charlie23a_dup82 | Multi | No | — | — | DNA | DNA | chr1: 149855935-149856163 | − | 110 | 229 | HIST2H2BE | Proximal | 0 | Not documented | 2 |
| MIRc_dup6637 | Multi | No | — | — | SINE | MIR | chr1: 149856309-149856433 | + | 160 | 125 | HIST2H2BE | Proximal | 0 | Not documented | 3 |
| MER3_dup488 | Uniquely | No | — | — | DNA | DNA | chr1: 150312988-150313077 | + | 140 | 90 | PRPF3 | Proximal | 0 | Not documented | 4 |
| AluSc8_dup1079 | Multi | No | — | — | SINE | Alu | chr1: 150479764-150480068 | + | 34 | 305 | TARS2 | Proximal | 0 | Not documented | 5 |
| MIRb_dup15563 | Multi | No | — | — | SINE | MIR | chr1: 150597273-150597450 | − | 130 | 178 | ENSA | Proximal | 0 | Not documented | 6 |
| AluSz_dup5111 | Uniquely | No | — | — | SINE | Alu | chr1: 151171807-151172107 | + | 53 | 301 | PIP5K1A | Proximal | 0 | Not documented | 7 |
| L3_dup2615 | Multi | No | — | — | LINE | CR1 | chr1: 151373177-151373244 | − | 120 | 68 | PSMB4 | Proximal | 0 | Not documented | 8 |
| AluJr4_dup1025 | Multi | No | — | — | SINE | Alu | chr1: 151667887-151668196 | − | 59 | 310 | SNX27 | Proximal | 0 | Not documented | 9 |
| AluSz_dup5157 | Multi | No | — | — | SINE | Alu | chr1: 151669118-151669425 | − | 47 | 308 | SNX27 | Proximal | 0 | Not documented | 1060 |
| AluSg_dup2235 | Multi | No | — | — | SINE | Alu | chr1: 153609849-153610141 | + | 39 | 293 | CHTOP | Proximal | 0 | Not documented | 1 |
| MIRb_dup15879 | Multi/ | No | — | — | SINE | MIR | chr1: 154916551-154916718 | − | 150 | 168 | PBXIP1 | Proximal | 0 | Not documented | 2 |
| | Uniquely | | | | | | | | | | | | | | |
| HAL1_dup7 | Multi | No | — | — | LINE | Other L1 | chr1: 1549173-1549465 | + | 160 | 293 | MIB2 | Proximal | 1331 | Not documented | 3 |
| MIRc_dup6826 | Multi/ | No | — | — | SINE | MIR | chr1: 154935130-154935225 | + | 130 | 96 | PYGO2 | Proximal | 0 | Not documented | 4 |
| | Uniquely | | | | | | | | | | | | | | |
| MER65D_dup11 | Multi | No | — | — | LTR | ERV1 | chr1: 1549546-1550009 | + | 150 | 464 | MIB2 | Proximal | 787 | Not documented | 5 |
| AluSg_dup40 | Multi | No | — | — | SINE | Alu | chr1: 1550115-1550424 | + | 51 | 310 | MIB2 | Proximal | 372 | Not documented | 6 |
| L2c_dup9821 | Multi | No | — | — | LINE | L2 | chr1: 155175200-155175275 | + | 120 | 76 | THBS3 | Proximal | 0 | Not documented | 7 |
| MIRb_dup15921 | Multi | No | — | — | SINE | MIR | chr1: 155584675-155584858 | − | 130 | 184 | MSTO1 | Proximal | 0 | Not documented | 8 |
| HERVK-int_dup15 | Multi | No | — | — | LTR | ERVK | chr1: 155599135-155604668 | − | 3.6 | 5534 | MSTO1 | Proximal | 0 | EVE annotated | 9 |
| AluSq2_dup3062 | Multi | No | — | — | SINE | Alu | chr1: 155851514-155851819 | − | 48 | 306 | SYT11 | Proximal | 0 | Not documented | 1070 |
| MIR3_dup5829 | Multi | No | — | — | SINE | MIR | chr1: 155852942-155852973 | − | 100 | 32 | SYT11 | Proximal | 0 | Not documented | 1 |
| AluJb_dup9036 | Multi | No | — | — | SINE | Alu | chr1: 155853043-155853327 | + | 65 | 285 | SYT11 | Proximal | 0 | Not documented | 2 |
| AluSz_dup5421 | Multi/ | No | — | — | SINE | Alu | chr1: 156374430-156374721 | − | 48 | 292 | C1orf61 | Proximal | 0 | Not documented | 3 |
| | Uniquely | | | | | | | | | | | | | | |
| L3b_dup331 | Multi/ | No | — | — | LINE | CR1 | chr1: 156376864-156377001 | + | 150 | 138 | C1orf61 | Proximal | 0 | Not documented | 4 |
| | Uniquely | | | | | | | | | | | | | | |
| MIR3_dup5861 | Multi/ | No | — | — | SINE | MIR | chr1: 156383997-156384142 | + | 120 | 146 | C1orf61 | Proximal | 0 | Not documented | 5 |
| | Uniquely | | | | | | | | | | | | | | |
| L3_dup2777 | Multi/ | No | — | — | LINE | CR1 | chr1: 160184145-160184202 | − | 110 | 58 | PEA15 | Proximal | 0 | Not documented | 6 |
| | Uniquely | | | | | | | | | | | | | | |
| MER113A_dup8 | Multi/ | No | — | — | DNA | DNA | chr1: 16112873-16113080 | − | 95 | 208 | FBLIM1 | Proximal | 0 | Not documented | 7 |
| | Uniquely | | | | | | | | | | | | | | |
| AluSc8_dup1213 | Uniquely | No | — | — | SINE | Alu | chr1: 161396886-161397190 | − | 30 | 305 | C1orf192 | Distal | 59223 | Not documented | 8 |
| AluYa5_dup206 | Multi/ | No | — | — | SINE | Alu | chr1: 162259255-162259564 | − | 31 | 310 | NOS1AP | Proximal | 0 | Not documented | 9 |
| | Uniquely | | | | | | | | | | | | | | |
| SVA_A_dup11 | Multi | No | — | — | Other | SVA | chr1: 162427364-162427708 | + | 8.2 | 345 | UHMK1 | Distal | 39334 | Not documented | 1080 |
| AluSz_dup5640 | Multi/ | No | — | — | SINE | Alu | chr1: 162536421-162536717 | − | 52 | 297 | UAP1 | Proximal | 0 | Not documented | 1 |
| | Uniquely | | | | | | | | | | | | | | |
| L2c_dup10303 | Multi | No | — | — | LINE | L2 | chr1: 162537072-162537193 | + | 150 | 122 | UAP1 | Proximal | 0 | Not documented | 2 |
| AluJb_dup9400 | Multi | No | — | — | SINE | Alu | chr1: 162547227-162547405 | − | 77 | 179 | UAP1 | Proximal | 0 | Not documented | 3 |
| AluSg_dup2453 | Multi | No | — | — | SINE | Alu | chr1: 162547406-162547698 | − | 48 | 293 | UAP1 | Proximal | 0 | Not documented | 4 |
| AluJb_dup9401 | Multi | No | — | — | SINE | Alu | chr1: 162547699-162547820 | − | 77 | 122 | UAP1 | Proximal | 0 | Not documented | 5 |
| L1MEg1_dup37 | Multi | No | — | — | LINE | Other L1 | chr1: 162547822-162548265 | − | 120 | 444 | UAP1 | Proximal | 0 | Not documented | 6 |
| AluJb_dup9411 | Multi | No | — | — | SINE | Alu | chr1: 162782183-162782469 | + | 65 | 287 | HSD17B7 | Proximal | 0 | Not documented | 7 |
| L2c_dup10459 | Uniquely | No | — | — | LINE | L2 | chr1: 164664557-164664964 | + | 160 | 408 | PBX1 | Proximal | 0 | Not documented | 8 |
| L1MD1_dup33 | Multi/ | No | — | — | LINE | Other L1 | chr1: 16798444-16800584 | − | 96 | 2141 | NECAP2 | Distal | 11872 | Not documented | 9 |
| | Uniquely | | | | | | | | | | | | | | |
| L2c_dup10853 | Uniquely | No | — | — | LINE | L2 | chr1: 169352393-169352975 | + | 150 | 583 | BLZF1 | Proximal | 0 | Not documented | 1090 |
| L2a_dup1104 | Multi/ | No | — | — | LINE | L2 | chr1: 16935252-16935392 | − | 130 | 141 | NBPF1 | Proximal | 0 | Not documented | 1 |
| | Uniquely | | | | | | | | | | | | | | |
| L1M5_dup329 | Multi | No | — | — | LINE | Other L1 | chr1: 16944983-16945142 | + | 160 | 160 | NBPF1 | Distal | 4927 | Not documented | 2 |
| AluSx_dup1703 | Multi | No | — | — | SINE | Alu | chr1: 16961526-16961832 | − | 53 | 307 | NBPF1 | Distal | 21470 | Not documented | 3 |
| AluSg_dup2536 | Multi/ | No | — | — | SINE | Alu | chr1: 170635282-170635581 | + | 36 | 300 | PRRX1 | Proximal | 0 | Not documented | 4 |
| | Uniquely | | | | | | | | | | | | | | |
| L2_dup3436 | Uniquely | No | — | — | LINE | L2 | chr1: 170642614-170643085 | + | 150 | 472 | PRRX1 | Proximal | 0 | Not documented | 5 |
| MIRb_dup17226 | Multi/ | No | — | — | SINE | MIR | chr1: 170650250-170650437 | − | 160 | 188 | PRRX1 | Proximal | 0 | Not documented | 6 |
| | Uniquely | | | | | | | | | | | | | | |
| LFSINE_Vert_dup52 | Multi | No | — | — | SINE | SINE | chr1: 170655174-170655263 | + | 88 | 90 | PRRX1 | Proximal | 0 | Not documented | 7 |
| AluJo_dup4402 | Multi | No | — | — | SINE | Alu | chr1: 173833126-173833236 | + | 78 | 111 | ZBTB37 | Distal | 3985 | Not documented | 8 |
| AluSx_dup9051 | Multi | No | — | — | SINE | Alu | chr1: 173905495-173905680 | + | 44 | 186 | RC3H1 | Proximal | 0 | Not documented | 9 |
| L2_dup3560 | Multi/ | No | — | — | LINE | L2 | chr1: 174982259-174982811 | + | 160 | 553 | MRPS14 | Proximal | 0 | Not documented | 1100 |
| | Uniquely | | | | | | | | | | | | | | |
| L2b_dup7644 | Multi | No | — | — | LINE | L2 | chr1: 175127427-175127490 | − | 110 | 64 | KIAA0040 | Proximal | 0 | Not documented | 1 |
| Charlie21a_dup54 | Multi | No | — | — | DNA | DNA | chr1: 179810301-179810618 | − | 120 | 318 | TOR1AIP2 | Proximal | 0 | Not documented | 2 |
| AluJb_dup10132 | Multi | No | — | — | SINE | Alu | chr1: 179810619-179810765 | + | 74 | 147 | TOR1AIP2 | Proximal | 0 | Not documented | 3 |
| Charlie21a_dup55 | Multi | No | — | — | DNA | DNA | chr1: 179810766-179810947 | − | 110 | 182 | TOR1AIP2 | Proximal | 0 | Not documented | 4 |
| AluSp_dup3422 | Multi/ | No | — | — | SINE | Alu | chr1: 179811054-179811350 | + | 41 | 297 | TOR1AIP2 | Proximal | 0 | Not documented | 5 |
| | Uniquely | | | | | | | | | | | | | | |
| Charlie21a_dup57 | Multi | No | — | — | DNA | DNA | chr1: 179811351-179811458 | − | 130 | 108 | TOR1AIP2 | Proximal | 0 | Not documented | 6 |
| AluY_dup7152 | Multi/ | No | — | — | SINE | Alu | chr1: 179811898-179812205 | + | 32 | 308 | TOR1AIP2 | Proximal | 0 | Not documented | 7 |
| | Uniquely | | | | | | | | | | | | | | |
| AluSz6_dup2938 | Multi | No | — | — | SINE | Alu | chr1: 179812359-179812670 | + | 61 | 312 | TOR1AIP2 | Proximal | 0 | Not documented | 8 |
| AluSq2_dup3456 | Multi | No | — | — | SINE | Alu | chr1: 179888160-179888412 | + | 43 | 253 | TOR1AIP1 | Proximal | 0 | Not documented | 9 |
| AluY_dup7199 | Multi | No | — | — | SINE | Alu | chr1: 180866853-180867161 | − | 34 | 309 | XPR1 | Distal | 7467 | Not documented | 1110 |
| L1MC3_dup556 | Uniquely | No | — | — | LINE | Other L1 | chr1: 182842573-182843481 | + | 96 | 909 | DHX9 | Proximal | 0 | Not documented | 1 |
| MER58A_dup641 | Multi/ | No | — | — | DNA | DNA | chr1: 184042850-184043018 | − | 71 | 169 | TSEN 15 | Proximal | 0 | Not documented | 2 |
| | Uniquely | | | | | | | | | | | | | | |
| MLT1B_dup850 | Multi/ | No | — | — | LTR | ERVL- | chr1: 184064559-184065022 | + | 95 | 464 | TSEN15 | Distal | 21214 | Not documented | 3 |
| | Uniquely | | | | | MaLR | | | | | | | | | |
| L1MA3_dup438 | Uniquely | No | — | — | LINE | Other L1 | chr1: 184892038-184894185 | − | 51 | 2148 | FAM129A | Proximal | 0 | Not documented | 4 |
| AluJr_dup4676 | Multi/ | No | — | — | SINE | Alu | chr1: 186388563-186388876 | + | 93 | 314 | C1orf27 | Proximal | 0 | Not documented | 5 |
| | Uniquely | | | | | | | | | | | | | | |
| L1ME3F_dup322 | Multi | No | — | — | LINE | Other L1 | chr1: 186389698-186390715 | + | 130 | 1018 | C1orf27 | Proximal | 0 | Not documented | 6 |
| AluYa5_dup242 | Multi | No | — | — | SINE | Alu | chr1: 187132806-187133116 | + | 2.7 | 311 | PLA2G4A | Distal | 174694 | Not documented | 7 |
| AluJb_dup10597 | Multi | No | — | — | SINE | Alu | chr1: 193057151-193057441 | − | 78 | 291 | TROVE2 | Proximal | 0 | Not documented | 8 |
| AluSc5_dup410 | Multi | No | — | — | SINE | Alu | chr1: 193058933-193059233 | − | 36 | 301 | TROVE2 | Proximal | 0 | Not documented | 9 |
| Kangalc_dup50 | Multi | No | — | — | DNA | DNA | chr1: 193199577-193199889 | + | 100 | 313 | CDC73 | Proximal | 0 | Not documented | 1120 |
| AluSg_dup2795 | Uniquely | No | — | — | SINE | Alu | chr1: 194376637-194376963 | + | 51 | 327 | CDC73 | Distal | 1153607 | Not documented | 1 |
| AluSc8_dup239 | Multi | No | — | — | SINE | Alu | chr1: 19585475-19585774 | + | 51 | 300 | MRTO4 | Proximal | 0 | Not documented | 2 |
| Tigger1_dup750 | Multi/ | No | — | — | DNA | DNA | chr1: 200755810-200757241 | + | 59 | 1432 | CAMSAP2 | Proximal | 0 | Not documented | 3 |
| | Uniquely | | | | | | | | | | | | | | |
| AluSz_dup6657 | Uniquely | No | — | — | SINE | Alu | chr1: 201831304-201831594 | + | 49 | 291 | IPO9 | Proximal | 0 | Not documented | 4 |
| MIRb_dup19369 | Multi | No | — | — | SINE | MIR | chr1: 202100439-202100555 | + | 110 | 117 | GPR37L1 | Proximal | 0 | Not documented | 5 |
| L1ME3B_dup476 | Uniquely | No | — | — | LINE | Other L1 | chr1: 203145828-203146537 | + | 130 | 710 | MYBPH | Proximal | 888 | Not documented | 6 |
| L3_dup3627 | Multi/ | No | — | — | LINE | CR1 | chr1: 203147496-203147658 | + | 160 | 163 | CHI3L1 | Proximal | 402 | Not documented | 7 |
| | Uniquely | | | | | | | | | | | | | | |
| MIRb_dup19475 | Multi/ | No | — | — | SINE | MIR | chr1: 203149262-203149337 | − | 110 | 76 | CHI3L1 | Proximal | 0 | Not documented | 8 |
| | Uniquely | | | | | | | | | | | | | | |
| MIRb_dup19476 | Multi/ | No | — | — | SINE | MIR | chr1: 203150139-203150228 | + | 120 | 90 | CHI3L1 | Proximal | 0 | Not documented | 9 |
| | Uniquely | | | | | | | | | | | | | | |
| MIRb_dup19477 | Multi/ | No | — | — | SINE | MIR | chr1: 203153071-203153277 | + | 120 | 207 | CHI3L1 | Proximal | 0 | Not documented | 1130 |
| | Uniquely | | | | | | | | | | | | | | |
| MIR3_dup7484 | Multi | No | — | — | SINE | MIR | chr1: 203766281-203766401 | + | 110 | 121 | ZBED6 | Proximal | 0 | Not documented | 1 |
| AluJo_dup5072 | Uniquely | No | — | — | SINE | Alu | chr1: 204502896-204503211 | − | 76 | 316 | MDM4 | Proximal | 0 | Not documented | 2 |
| AluJb_dup11187 | Uniquely | No | — | — | SINE | Alu | chr1: 204503618-204503919 | − | 78 | 302 | MDM4 | Proximal | 0 | Not documented | 3 |
| AluY_dup8009 | Multi | No | — | — | SINE | Alu | chr1: 204504283-204504584 | − | 36 | 302 | MDM4 | Proximal | 0 | Not documented | 4 |
| MER5B_dup1247 | Multi | No | — | — | DNA | DNA | chr1: 205737400-205737532 | − | 150 | 133 | RAB7L1 | Proximal | 0 | Not documented | 5 |
| AluSq2_dup3870 | Multi | No | — | — | SINE | Alu | chr1: 205737654-205737961 | − | 49 | 308 | RAB7L1 | Proximal | 0 | Not documented | 6 |
| MER5B_dup1248 | Multi | No | — | — | DNA | DNA | chr1: 205737997-205738047 | − | 110 | 51 | RAB7L1 | Proximal | 0 | Not documented | 7 |
| AluSz6_dup3299 | Multi | No | — | — | SINE | Alu | chr1: 205738555-205738856 | − | 57 | 302 | RAB7L1 | Proximal | 0 | Not documented | 8 |
| L3_dup3706 | Multi/ | No | — | — | LINE | CR1 | chr1: 205758780-205758828 | + | 100 | 49 | SLC41A1 | Proximal | 0 | Not documented | 9 |
| | Uniquely | | | | | | | | | | | | | | |
| L2a_dup13651 | Multi/ | No | — | — | LINE | L2 | chr1: 205759389-205759498 | + | 120 | 110 | SLC41A1 | Proximal | 0 | Not documented | 1140 |
| | Uniquely | | | | | | | | | | | | | | |
| L3b_dup591 | Uniquely | No | — | — | LINE | CR1 | chr1: 208196071-208196214 | + | 170 | 144 | PLXNA2 | Proximal | 0 | Not documented | 1 |
| AluSc8_dup253 | Multi | No | — | — | SINE | Alu | chr1: 21069875-21070183 | + | 57 | 309 | HP1BP3 | Proximal | 0 | Not documented | 2 |
| AluSx_dup2021 | Multi/ | No | — | — | SINE | Alu | chr1: 21070279-21070559 | + | 41 | 281 | HP1BP3 | Proximal | 0 | Not documented | 3 |
| | Uniquely | | | | | | | | | | | | | | |
| Tigger3b_dup19 | Uniquely | No | — | — | DNA | DNA | chr1: 21101499-21102429 | + | 75 | 931 | HP1BP3 | Proximal | 0 | Not documented | 4 |
| L1ME4a_dup2854 | Multi | No | — | — | LINE | Other L1 | chr1: 212619600-212619696 | + | 100 | 97 | NENF | Proximal | 0 | Not documented | 5 |
| MIRc_dup9314 | Multi | No | — | — | SINE | MIR | chr1: 212988640-212988716 | + | 130 | 77 | TATDN3 | Proximal | 0 | Not documented | 6 |
| AluSp_dup3913 | Multi | No | — | — | SINE | Alu | chr1: 212988871-212989159 | − | 31 | 289 | TATDN3 | Proximal | 0 | Not documented | 7 |
| FRAM_dup89 | Uniquely | No | — | — | SINE | Alu | chr1: 21439506-21439659 | + | 74 | 154 | EIF4G3 | Proximal | 0 | Not documented | 8 |
| AluJb_dup11681 | Uniquely | No | — | — | SINE | Alu | chr1: 214529295-214529600 | − | 67 | 306 | PTPN14 | Proximal | 0 | Not documented | 9 |
| AluSx1_dup1312 | Multi/ | No | — | — | SINE | Alu | chr1: 21545079-21545383 | − | 40 | 305 | ECE1 | Proximal | 0 | Not documented | 1150 |
| | Uniquely | | | | | | | | | | | | | | |
| L2c_dup13877 | Uniquely | No | — | — | LINE | L2 | chr1: 217037057-217037166 | + | 140 | 110 | ESRRG | Proximal | 0 | Not documented | 1 |
| L1MC4_dup213 | Multi | No | — | — | LINE | Other L1 | chr1: 21749756-21750197 | + | 150 | 442 | NBPF3 | Distal | 16425 | Not documented | 2 |
| L1MC4_dup214 | Multi | No | — | — | LINE | Other L1 | chr1: 21750268-21750382 | − | 140 | 115 | NBPF3 | Distal | 16240 | Not documented | 3 |
| L1MC4_dup217 | Multi | No | — | — | LINE | Other L1 | chr1: 21810796-21811237 | − | 150 | 442 | NBPF3 | Proximal | 0 | Not documented | 4 |
| AluSx4_dup447 | Uniquely | No | — | — | SINE | Alu | chr1: 218534198-218534494 | − | 49 | 297 | TGFB2 | Proximal | 0 | Not documented | 5 |
| AluSx1_dup7648 | Uniquely | No | — | — | SINE | Alu | chr1: 218588755-218589066 | + | 38 | 312 | TGFB2 | Proximal | 0 | Not documented | 6 |
| AluY_dup8511 | Multi | No | — | — | SINE | Alu | chr1: 219372952-219373178 | − | 28 | 227 | LYPLAL1 | Proximal | 0 | Not documented | 7 |
| L1MB1_dup347 | Uniquely | No | — | — | LINE | Other L1 | chr1: 220802680-220803743 | − | 70 | 1064 | MARK1 | Proximal | 0 | Not documented | 8 |
| L1PA10_dup383 | Uniquely | No | — | — | LINE | L1PA\|B\|x | chr1: 220814955-220821404 | + | 45 | 6450 | MARK1 | Proximal | 0 | Not documented | 9 |
| L5_dup71 | Multi | No | — | — | LINE | RTE | chr1: 222907339-222907421 | − | 82 | 83 | BROX | Proximal | 0 | Not documented | 1160 |
| MIR_dup15020 | Multi | No | — | — | SINE | MIR | chr1: 222907573-222907676 | − | 120 | 104 | BROX | Proximal | 0 | Not documented | 1 |
| AluSx_dup10986 | Multi/ | No | — | — | SINE | Alu | chr1: 223945555-223945860 | − | 50 | 306 | CAPN2 | Proximal | 0 | Not documented | 2 |
| | Uniquely | | | | | | | | | | | | | | |
| AluJr_dup5419 | Multi/ | No | — | — | SINE | Alu | chr1: 223946392-223946687 | − | 66 | 296 | CAPN2 | Proximal | 0 | Not documented | 3 |
| | Uniquely | | | | | | | | | | | | | | |
| AluJr_dup5420 | Multi | No | — | — | SINE | Alu | chr1: 223946785-223946839 | − | 99 | 55 | CAPN2 | Proximal | 0 | Not documented | 4 |
| AluSp_dup4068 | Uniquely | No | — | — | SINE | Alu | chr1: 224356032-224356326 | − | 43 | 295 | FBXO28 | Distal | 6284 | Not documented | 5 |
| AluSx_dup11043 | Multi | No | — | — | SINE | Alu | chr1: 224380475-224380793 | + | 50 | 319 | DEGS1 | Proximal | 0 | Not documented | 6 |
| MIRc_dup9799 | Multi | No | — | — | SINE | MIR | chr1: 225836788-225836922 | − | 100 | 135 | ENAH | Proximal | 0 | Not documented | 7 |
| AluSc8_dup1593 | Multi | No | — | — | SINE | Alu | chr1: 225838271-225838580 | + | 35 | 310 | ENAH | Proximal | 0 | Not documented | 8 |
| AluJo_dup5542 | Multi/ | No | — | — | SINE | Alu | chr1: 225974548-225974834 | − | 78 | 287 | SRP9 | Proximal | 0 | Not documented | 9 |
| | Uniquely | | | | | | | | | | | | | | |
| AluSx1_dup7873 | Multi | No | — | — | SINE | Alu | chr1: 225974955-225975248 | + | 43 | 294 | SRP9 | Proximal | 0 | Not documented | 1170 |
| MamRep434_dup171 | Multi | No | — | — | DNA | DNA | chr1: 226820238-226820561 | − | 130 | 324 | ITPKB | Proximal | 0 | Not documented | 1 |
| L2_dup4754 | Uniquely | No | — | — | LINE | L2 | chr1: 227191874-227192341 | + | 150 | 468 | CDC42BPA | Proximal | 0 | Not documented | 2 |
| L1MB4_dup524 | Uniquely | No | — | — | LINE | Other L1 | chr1: 227293355-227295109 | − | 99 | 1755 | CDC42BPA | Proximal | 0 | Not documented | 3 |
| L1MA2_dup448 | Uniquely | No | — | — | LINE | Other L1 | chr1: 227435928-227437530 | + | 64 | 1603 | CDC42BPA | Proximal | 0 | Not documented | 4 |
| X3_LINE_dup59 | Uniquely | No | — | — | LINE | RTE-BovB | chr1: 227494088-227494223 | + | 160 | 136 | CDC42BPA | Proximal | 0 | Not documented | 5 |
| MER31-int_dup2 | Multi | No | — | — | LTR | ERV1 | chr1: 227779-228217 | + | 99 | 439 | AL627309.1 | Distal | 88401 | Not documented | 6 |
| MER5A_dup2286 | Multi/ | No | — | — | DNA | DNA | chr1: 228296166-228296251 | − | 130 | 86 | MRPL55 | Proximal | 0 | Not documented | 7 |
| | Uniquely | | | | | | | | | | | | | | |
| MIR3_dup8441 | Multi | No | — | — | SINE | MIR | chr1: 229577273-229577383 | − | 120 | 111 | NUP133 | Proximal | 0 | Not documented | 8 |
| L1MC1_dup1013 | Multi | No | — | — | LINE | Other L1 | chr1: 230315964-230317304 | − | 79 | 1341 | GALNT2 | Proximal | 0 | Not documented | 9 |
| AluSz6_dup3723 | Multi | No | — | — | SINE | Alu | chr1: 231501186-231501406 | + | 64 | 221 | EGLN1 | Proximal | 0 | Not documented | 1180 |
| AluSg_dup3319 | Multi | No | — | — | SINE | Alu | chr1: 231701190-231701495 | + | 50 | 306 | TSNAX | Proximal | 0 | Not documented | 1 |
| L2a_dup87 | Multi | No | — | — | LINE | L2 | chr1: 2324663-2324938 | − | 160 | 276 | RER1 | Proximal | 0 | Not documented | 2 |
| MER 131_dup42 | Multi | No | — | — | SINE | SINE | chr1: 234741371-234741443 | − | 100 | 73 | IRF2BP2 | Proximal | 0 | Not documented | 3 |
| MIR3_dup8588 | Multi | No | — | — | SINE | MIR | chr1: 235273856-235273983 | − | 160 | 128 | TOMM20 | Proximal | 0 | Not documented | 4 |
| L1ME3C_dup850 | Multi | No | — | — | LINE | Other L1 | chr1: 235451661-235452048 | − | 150 | 388 | ARID4B | Proximal | 0 | Not documented | 5 |
| L1MC_dup734 | Multi | No | — | — | LINE | Other L1 | chr1: 235452320-235452444 | + | 120 | 125 | ARID4B | Proximal | 0 | Not documented | 6 |
| L1MC4a_dup1782 | Multi | No | — | — | LINE | Other L1 | chr1: 235452707-235452758 | + | 100 | 52 | ARID4B | Proximal | 0 | Not documented | 7 |
| AluJb_dup12701 | Multi | No | — | — | SINE | Alu | chr1: 235452759-235453056 | + | 81 | 298 | ARID4B | Proximal | 0 | Not documented | 8 |
| L1PB4_dup413 | Uniquely | No | — | — | LINE | L1PA\|B\|x | chr1: 235495391-235495852 | − | 82 | 462 | GGPS1 | Proximal | 0 | Not documented | 9 |
| AluY_dup9186 | Uniquely | No | — | — | SINE | Alu | chr1: 235506589-235506873 | + | 18 | 285 | GGPS1 | Proximal | 0 | Not documented | 1190 |
| MIR3_dup8592 | Multi | No | — | — | SINE | MIR | chr1: 235610844-235610932 | − | 87 | 89 | TBCE | Proximal | 0 | Not documented | 1 |
| AluSg_dup3385 | Multi | No | — | — | SINE | Alu | chr1: 235611246-235611555 | + | 37 | 310 | TBCE | Proximal | 0 | Not documented | 2 |
| MIR_dup15667 | Multi | No | — | — | SINE | MIR | chr1: 235714126-235714208 | + | 110 | 83 | GNG4 | Proximal | 0 | Not documented | 3 |
| AluSx3_dup2369 | Multi/ | No | — | — | SINE | Alu | chr1: 235714562-235714872 | + | 42 | 311 | GNG4 | Proximal | 0 | Not documented | 4 |
| | Uniquely | | | | | | | | | | | | | | |
| MER112_dup21 | Multi | No | — | — | DNA | DNA | chr1: 23647185-23647332 | + | 110 | 148 | HNRNPR | Proximal | 0 | Not documented | 5 |
| AluSp_dup685 | Multi/ | No | — | — | SINE | Alu | chr1: 23647379-23647670 | + | 31 | 292 | HNRNPR | Proximal | 0 | Not documented | 6 |
| | Uniquely | | | | | | | | | | | | | | |
| MamRep4096_dup6 | Multi/ | No | — | — | DNA | DNA | chr1: 23698046-23698432 | − | 110 | 387 | C1orf213 | Proximal | | Not documented | 7 |
| | Uniquely | | | | | | | | | | | | | | |
| MamRep1894_dup2 | Multi/ | No | — | — | DNA | DNA | chr1: 23755632-23755749 | + | 150 | 118 | ASAP3 | Proximal | 0 | Not documented | 8 |
| | Uniquely | | | | | | | | | | | | | | |
| L2b_dup1328 | Multi | No | — | — | LINE | L2 | chr1: 23755832-23755927 | + | 170 | 96 | ASAP3 | Proximal | 0 | Not documented | 9 |
| MIRc_dup1241 | Multi/ | No | — | — | SINE | MIR | chr1: 23885270-23885338 | + | 87 | 69 | IDE | Proximal | 0 | Not documented | 1200 |
| | Uniquely | | | | | | | | | | | | | | |
| L1M4b_dup400 | Uniquely | No | — | — | LINE | Other L1 | chr1: 240390155-240391321 | + | 85 | 1167 | FMN2 | Proximal | 0 | Not documented | 1 |
| MIRc_dup10291 | Multi | No | — | — | SINE | MIR | chr1: 241667256-241667372 | + | 130 | 117 | FH | Proximal | 0 | Not documented | 2 |
| AluSx_dup12061 | Uniquely | No | — | — | SINE | Alu | chr1: 242158939-242159233 | + | 49 | 295 | MAP1LC3C | Proximal | 0 | Not documented | 3 |
| CR1_Mam_dup13 | Multi | No | — | — | LINE | CR1 | chr1: 24294042-24294379 | − | 140 | 338 | SRSF10 | Proximal | 0 | Not documented | 4 |
| AluSg_dup594 | Multi | No | — | — | SINE | Alu | chr1: 24296854-24297148 | − | 34 | 295 | SRSF10 | Proximal | 0 | Not documented | 5 |
| L1PA5_dup724 | Uniquely | No | — | — | LINE | L1PA\|B\|x | chr1: 243970350-243976492 | + | 25 | 6143 | AKT3 | Proximal | 0 | EVE annotated | 6 |
| AluSx_dup12227 | Multi | No | — | — | SINE | Alu | chr1: 245007779-245008081 | + | 44 | 303 | COX20 | Proximal | 0 | Not documented | 7 |
| MER2_dup690 | Multi | No | — | — | DNA | DNA | chr1: 245008225-245008483 | − | 95 | 259 | COX20 | Proximal | 0 | Not documented | 8 |
| AluJo_dup6206 | Uniquely | No | — | — | SINE | Alu | chr1: 245285770-245286064 | − | 65 | 295 | EFCAB2 | Proximal | 0 | Not documented | 9 |
| MER1B_dup396 | Uniquely | No | — | — | DNA | DNA | chr1: 246243459-246243848 | + | 59 | 390 | SMYD3 | Proximal | 0 | Not documented | 1210 |
| L1PBa_dup124 | Uniquely | No | — | — | LINE | L1PA\|B\|x | chr1: 247214582-247216653 | − | 52 | 2072 | ZNF670 | Proximal | 0 | Not documented | 1 |
| L1PA14_dup233 | Uniquely | No | — | — | LINE | L1PA\|B\|x | chr1: 247325271-247325749 | + | 55 | 479 | ZNF124 | Proximal | 0 | Not documented | 2 |
| AluSx3_dup2511 | Multi | No | — | — | SINE | Alu | chr1: 247461629-247461916 | − | 87 | 288 | ZNF496 | Proximal | 0 | Not documented | 3 |
| MLT1C_dup1274 | Multi | No | — | — | LTR | ERVL- | chr1: 247462420-247462819 | + | 83 | 400 | ZNF496 | Proximal | 0 | Not documented | 4 |
| | | | | | | MaLR | | | | | | | | | |
| HERVP71A-int_dup29 | Uniquely | No | — | — | LTR | ERV1 | chr1: 247520740-247523416 | + | 41 | 2677 | ZNF496 | Distal | 25593 | Not documented | 5 |
| MER31-int_dup175 | Multi | No | — | — | LTR | ERV1 | chr1: 249231334-249231780 | − | 99 | 447 | PGBD2 | Distal | 17190 | Not documented | 6 |
| AluSc_dup390 | Multi | No | — | — | SINE | Alu | chr1: 25073745-25074050 | + | 31 | 30€ | CLIC4 | Proximal | 0 | Not documented | 7 |
| L2b_dup1427 | Uniquely | No | — | — | LINE | L2 | chr1: 25088921-25089414 | − | 130 | 494 | CLIC4 | Proximal | 0 | Not documented | 8 |
| AluSz6_dup633 | Multi | No | — | — | SINE | Alu | chr1: 25092983-25093296 | − | 62 | 314 | CLIC4 | Proximal | 0 | Not documented | 9 |
| MER30_dup44 | Multi | No | — | — | DNA | DNA | chr1: 25093427-25093665 | − | 48 | 239 | CLIC4 | Proximal | 0 | Not documented | 1220 |
| AluJb_dup2481 | Multi/ | No | — | — | SINE | Alu | chr1: 25105679-25105977 | + | 69 | 299 | CLIC4 | Proximal | 0 | Not documented | 1 |
| | Uniquely | | | | | | | | | | | | | | |
| L2_dup411 | Multi/ | No | — | — | LINE | L2 | chr1: 25106177-25106497 | + | 160 | 321 | CLIC4 | Proximal | 0 | Not documented | 2 |
| | Uniquely | | | | | | | | | | | | | | |
| MIR_dup2340 | Multi/ | No | — | — | SINE | MIR | chr1: 25106589-25106817 | − | 120 | 229 | CLIC4 | Proximal | 0 | Not documented | 3 |
| | Uniquely | | | | | | | | | | | | | | |
| FRAM_dup118 | Multi | No | — | — | SINE | Alu | chr1: 25570551-25570607 | − | 16 | 57 | C1orf63 | Proximal | 0 | Not documented | 4 |
| AluJb_dup2514 | Multi | No | — | — | SINE | Alu | chr1: 25571188-25571451 | − | 70 | 264 | C1orf63 | Proximal | 0 | Not documented | 5 |
| MIRb_dup3603 | Multi | No | — | — | SINE | MIR | chr1: 26112112-26112249 | + | 130 | 138 | MAN1C1 | Proximal | 0 | Not documented | 6 |
| AluSx_dup2556 | Multi | No | — | — | SINE | Alu | chr1: 26143705-26144005 | − | 47 | 301 | RP1-317E23.6 | Proximal | 0 | Not documented | 7 |
| MIRb_dup3608 | Multi/ | No | — | — | SINE | MIR | chr1: 26144043-26144201 | − | 100 | 159 | RP1-317E23.6 | Proximal | 0 | Not documented | 8 |
| | Uniquely | | | | | | | | | | | | | | |
| L4_dup98 | Multi | No | — | — | LINE | RTE | chr1: 26802146-26802211 | + | 140 | 66 | HMGN2 | Proximal | 0 | Not documented | 9 |
| MIR3_dup1473 | Multi/ | No | — | — | SINE | MIR | chr1: 27272949-27273036 | + | 98 | 88 | NUDC | Proximal | 0 | Not documented | 1230 |
| | Uniquely | | | | | | | | | | | | | | |
| AluSx_dup2745 | Multi | No | — | — | SINE | Alu | chr1: 27273061-27273361 | + | 47 | 301 | NUDC | Proximal | 0 | Not documented | 1 |
| FAM_dup67 | Multi/ | No | — | — | SINE | Alu | chr1: 27992660-27992823 | + | 69 | 164 | IFIE | Proximal | 0 | Not documented | 2 |
| | Uniquely | | | | | | | | | | | | | | |
| LTR29_dup7 | Multi | No | — | — | LTR | ERV1 | chr1: 28148961-28149017 | − | 88 | 57 | STX12 | Proximal | 0 | Not documented | 3 |
| AluJo_dup1223 | Multi | No | — | — | SINE | Alu | chr1: 28150445-28150575 | + | 70 | 131 | STX12 | Proximal | 0 | Not documented | 4 |
| LTR16D1_dup7 | Multi | No | — | — | LTR | ERVL | chr1: 28562714-28562777 | − | 87 | 64 | ATPIF1 | Proximal | 0 | Not documented | 5 |
| MIR3_dup1581 | Multi | No | — | — | SINE | MIR | chr1: 28563768-28563825 | − | 110 | 58 | ATPIF1 | Proximal | 0 | Not documented | 6 |
| AluSx_dup3037 | Multi | No | — | — | SINE | Alu | chr1: 28835504-28835578 | − | 42 | 75 | RCC1 | Proximal | 0 | Not documented | 7 |
| MIRb_dup4921 | Multi/ | No | — | — | SINE | MIR | chr1: 32262035-32262195 | − | 120 | 161 | SPOCD1 | Proximal | 0 | Not documented | 8 |
| | Uniquely | | | | | | | | | | | | | | |
| MER117_dup67 | Multi | No | — | — | DNA | DNA | chr1: 32662457-32662521 | − | 110 | 65 | TXLNA | Proximal | 0 | Not documented | 9 |
| AluSp_dup1101 | Multi | No | — | — | SINE | Alu | chr1: 32696813-32697110 | + | 53 | 298 | EIF31 | Proximal | 0 | Not documented | 1240 |
| AluY_dup2188 | Multi | No | — | — | SINE | Alu | chr1: 33086720-33087026 | + | 41 | 307 | ZBTB8OS | Proximal | 0 | Not documented | 1 |
| AluSx_dup3484 | Multi | No | — | — | SINE | Alu | chr1: 33147876-33148053 | + | 71 | 178 | SYNC | Proximal | 0 | Not documented | 2 |
| MIRb_dup5117 | Multi/ | No | — | — | SINE | MIR | chr1: 33497147-33497367 | + | 100 | 221 | AK2 | Proximal | 0 | Not documented | 3 |
| | Uniquely | | | | | | | | | | | | | | |
| MIRb_dup5505 | Multi | No | — | — | SINE | MIR | chr1: 35314664-35314828 | − | 120 | 165 | SMIM12 | Proximal | 0 | Not documented | 4 |
| L2c_dup2037 | Multi | No | — | — | LINE | L2 | chr1: 35314798-35315147 | − | 140 | 350 | SMIM12 | Proximal | 0 | Not documented | 5 |
| AluY_dup2305 | Multi | No | — | — | SINE | Alu | chr1: 35315302-35315614 | + | 28 | 313 | SMIM12 | Proximal | 0 | Not documented | 6 |
| AluJb_dup3690 | Multi | No | — | — | SINE | Alu | chr1: 36067653-36067955 | + | 70 | 303 | PSMB2 | Proximal | 0 | Not documented | 7 |
| MIR3_dup2089 | Multi | No | — | — | SINE | MIR | chr1: 36179615-36179701 | − | 110 | 87 | C1orf216 | Proximal | 0 | Not documented | 8 |
| MLT1L_dup116 | Multi | No | — | — | LTR | ERVL- | chr1: 36392879-36393269 | − | 120 | 391 | AG01 | Proximal | 0 | Not documented | 9 |
| | | | | | | MaLR | | | | | | | | | |
| MIRb_dup5588 | Multi/ | No | — | — | SINE | MIR | chr1: 36393363-36393480 | − | 120 | 118 | AGO1 | Proximal | 0 | Not documented | 1250 |
| | Uniquely | | | | | | | | | | | | | | |
| AluSg_dup72 | Multi | No | — | — | SINE | Alu | chr1: 3654142-3654439 | + | 41 | 298 | TP73 | Proximal | 1378 | Not documented | 1 |
| MIR_dup3659 | Multi | No | — | — | SINE | MIR | chr1: 36805887-36805963 | − | 62 | 77 | STK40 | Proximal | 0 | Not documented | 2 |
| AluSz6_dup1003 | Uniquely | No | — | — | SINE | Alu | chr1: 36915156-36915466 | + | 41 | 311 | OSCP1 | Proximal | 0 | Not documented | 3 |
| Tigger3d | Multi | No | — | — | DNA | DNA | chr1: 3696703-3696997 | − | 110 | 295 | LRRC47 | Proximal | 0 | Not documented | 4 |
| AluYc_dup11 | Multi | No | — | — | SINE | Alu | chr1: 3697223-3697269 | + | 39 | 47 | LRRC47 | Proximal | 0 | Not documented | 5 |
| AluSc_dup41 | Multi | No | — | — | SINE | Alu | chr1: 3697270-3697561 | + | 48 | 292 | LRRC47 | Proximal | 0 | Not documented | 6 |
| L3_dup614 | Uniquely | No | — | — | LINE | CR1 | chr1: 38022852-38022989 | + | 120 | 138 | DNALI1 | Proximal | 0 | Not documented | 7 |
| L2a_dup3054 | Multi/ | No | — | — | LINE | L2 | chr1: 38023518-38024318 | + | 120 | 801 | DNALI1 | Proximal | 0 | Not documented | 8 |
| | Uniquely | | | | | | | | | | | | | | |
| AluSq2_dup95 | Multi | No | — | — | SINE | Alu | chr1: 3805978-3806288 | + | 41 | 311 | C1orf174 | Proximal | 0 | Not documented | 9 |
| FLAM_C_dup546 | Multi | No | — | — | SINE | Alu | chr1: 38147616-38147738 | + | 89 | 123 | C1orf109 | Proximal | 0 | Not documented | 1260 |
| AluSx1_dup2544 | Multi/ | No | — | — | SINE | Alu | chr1: 38155688-38155956 | − | 20 | 269 | C1orf109 | Proximal | 0 | Not documented | 1 |
| | Uniquely | | | | | | | | | | | | | | |
| L1M5_dup721 | Multi | No | — | — | LINE | Other L1 | chr1: 38268463-38268683 | + | 150 | 221 | YRDC | Proximal | 0 | Not documented | 2 |
| FLAM_C_dup554 | Multi | No | — | — | SINE | Alu | chr1: 38269041-38269176 | − | 77 | 136 | YRDC | Proximal | 0 | Not documented | 3 |
| AluJo_dup1639 | Multi | No | — | — | SINE | Alu | chr1: 38423062-38423302 | − | 77 | 241 | SF3A3 | Proximal | 0 | Not documented | 4 |
| AluJr4_dup347 | Multi | No | — | — | SINE | Alu | chr1: 38489519-38489809 | − | 75 | 291 | UTP11L | Proximal | 0 | Not documented | 5 |
| AluYb8_dup38 | Multi | No | — | — | SINE | Alu | chr1: 38490067-38490378 | − | 2.7 | 312 | UTP11L | Proximal | 0 | Not documented | 6 |
| AluSx1_dup2616 | Multi/ | No | — | — | SINE | Alu | chr1: 39470696-39470995 | + | 40 | 300 | AKIRIN1 | Proximal | 0 | Not documented | 7 |
| | Uniquely | | | | | | | | | | | | | | |
| AluSp_dup1306 | Uniquely | No | — | — | SINE | Alu | chr1: 39506687-39506981 | − | 49 | 295 | NDUFS5 | Distal | 6380 | Not documented | 8 |
| AluYc_dup186 | Multi | No | — | — | SINE | Alu | chr1: 39574179-39574285 | − | 34 | 107 | MACF1 | Proximal | 0 | Not documented | 9 |
| MIRb_dup6134 | Multi | No | — | — | SINE | MIR | chr1: 39574725-39574903 | + | 130 | 179 | MACF1 | Proximal | 0 | Not documented | 1270 |
| AluSx3_dup716 | Multi | No | — | — | SINE | Alu | chr1: 39574936-39575246 | − | 57 | 311 | MACF1 | Proximal | 0 | Not documented | 1 |
| MIRb_dup6135 | Multi | No | — | — | SINE | MIR | chr1: 39575336-39575423 | − | 120 | 88 | MACF1 | Proximal | 0 | Not documented | 2 |
| AluJb_dup4016 | Multi/ | No | — | — | SINE | Alu | chr1: 39576886-39577038 | − | 110 | 153 | MACF1 | Proximal | 0 | Not documented | 3 |
| | Uniquely | | | | | | | | | | | | | | |
| MIR_dup3998 | Multi | No | — | — | SINE | MIR | chr1: 39590377-39590627 | − | 120 | 251 | MACF1 | Proximal | 0 | Not documented | 4 |
| AluSq2_dup1371 | Multi | No | — | — | SINE | Alu | chr1: 39756338-39756646 | − | 40 | 309 | MACF1 | Proximal | 0 | Not documented | 5 |
| AluSx1_dup2638 | Multi | No | — | — | SINE | Alu | chr1: 39756652-39756947 | − | 38 | 296 | MACF1 | Proximal | 0 | Not documented | 6 |
| L2a_dup3211 | Uniquely | No | — | — | LINE | L2 | chr1: 39785630-39786020 | + | 140 | 391 | MACF1 | Proximal | 0 | Not documented | 7 |
| FRAM_dup229 | Multi | No | — | — | SINE | Alu | chr1: 40345185-40345264 | + | 70 | 80 | TRIT1 | Proximal | 0 | Not documented | 8 |
| AluSq2_dup1394 | Multi/ | No | — | — | SINE | Alu | chr1: 40345265-40345566 | + | 51 | 302 | TRIT1 | Proximal | 0 | Not documented | 9 |
| | Uniquely | | | | | | | | | | | | | | |
| L1HS_dup7 | Multi | No | — | — | LINE | L1PA\|B\|x | chr1: 41673424-41674113 | + | 6.8 | 690 | SCMH1 | Proximal | 0 | Not documented | 1280 |
| L1PA4_dup103 | Uniquely | No | — | — | LINE | L1PA\|B\|x | chr1: 42699709-42701220 | − | 35 | 1512 | FOXJ3 | Proximal | 0 | EVE annotated | 1 |
| L2_dup906 | Uniquely | No | — | — | LINE | L2 | chr1: 43826912-43827388 | + | 150 | 477 | CDC20 | Proximal | 0 | Not documented | 2 |
| L1MB7_dup445 | Uniquely | No | — | — | LINE | Other L1 | chr1: 43827946-43828237 | + | 90 | 292 | CDC20 | Proximal | | Not documented | 3 |
| MIRb_dup6733 | Multi | No | — | — | SINE | MIR | chr1: 43850403-43850629 | − | 85 | 227 | MED8 | Proximal | 0 | Not documented | 4 |
| MER20_dup314 | Multi | No | — | — | DNA | DNA | chr1: 44438573-44438781 | − | 63 | 209 | DPH2 | Proximal | 0 | Not documented | 5 |
| MER3_dup210 | Multi | No | — | — | DNA | DNA | chr1: 44438794-44438978 | − | 66 | 185 | DPH2 | Proximal | 0 | Not documented | 6 |
| MIR3_dup2544 | Multi | No | — | — | SINE | MIR | chr1: 44456382-44456470 | + | 120 | 89 | B4GALT2 | Proximal | 0 | Not documented | 7 |
| AluJb_dup4632 | Uniquely | No | — | — | SINE | Alu | chr1: 45959843-45960153 | + | 72 | 311 | CCDC163P | Proximal | 0 | Not documented | 8 |
| AluY_dup3019 | Multi/ | No | — | — | SINE | Alu | chr1: 46077528-46077844 | − | 30 | 317 | NASP | Proximal | 0 | Not documented | 9 |
| | Uniquely | | | | | | | | | | | | | | |
| SVA_F_dup27 | Multi | No | — | — | Other | SVA | chr1: 46159588-46159704 | + | 68 | 117 | TMEM69 | Proximal | 0 | Not documented | 1290 |
| L1PB1_dup116 | Uniquely | No | — | — | LINE | L1PA\|B\|x | chr1: 50013744-50018503 | − | 60 | 4760 | AGBL4 | Proximal | 0 | EVE annotated | 1 |
| L1PA15_dup64 | Uniquely | No | — | — | LINE | L1PA\|B\|x | chr1: 51273296-51275645 | + | 83 | 2350 | FAF1 | Proximal | 0 | Not documented | 2 |
| L1MEc_dup389 | Uniquely | No | — | — | LINE | Other L1 | chr1: 52972117-52973217 | − | 100 | 1101 | ZCCHC11 | Proximal | 0 | Not documented | 3 |
| AluSz_dup3110 | Multi | No | — | — | SINE | Alu | chr1: 53679319-53679619 | + | 44 | 301 | CPT2 | Proximal | 0 | Not documented | 4 |
| L2c_dup3981 | Multi | No | — | — | LINE | L2 | chr1: 54320524-54320755 | − | 150 | 232 | YIPF1 | Proximal | 0 | Not documented | 5 |
| LTR33_dup1 | Uniquely | No | — | — | LTR | ERVL | chr1: 54394701-54395178 | + | 130 | 478 | HSPB11 | Proximal | 0 | Not documented | 6 |
| MIRc_dup3539 | Multi/ | No | — | — | SINE | MIR | chr1: 57025451-57025555 | + | 100 | 105 | PPAP2B | Proximal | 0 | Not documented | 7 |
| | Uniquely | | | | | | | | | | | | | | |
| L2b_dup3969 | Uniquely | No | — | — | LINE | L2 | chr1: 57025832-57025923 | + | 150 | 92 | PPAP2B | Proximal | | Not documented | 8 |
| L1HS_dup13 | Multi | No | — | — | LINE | L1PA\|B\|x | chr1: 58580619-58581671 | + | 3.2 | 1053 | DAB1 | Proximal | 0 | Not documented | 9 |
| L1M4_dup3 | Multi | No | — | — | LINE | Other L1 | chr1: 586903-587477 | + | 120 | 575 | OR4F16 | Distal | 33583 | Not documented | 1300 |
| L1ME1_dup681 | Uniquely | No | — | — | LINE | Other L1 | chr1: 61095249-61096758 | − | 98 | 1510 | NFIA | Distal | 234174 | Not documented | 1 |
| L1MEc_dup458 | Uniquely | No | — | — | LINE | Other L1 | chr1: 61096809-61097817 | − | 130 | 1009 | NFIA | Distal | 233115 | Not documented | 2 |
| MER89-int_dup7 | Uniquely | No | — | — | LTR | ERV1 | chr1: 61249232-61250904 | − | 110 | 1673 | NFIA | Distal | 80028 | Not documented | 3 |
| L1M2_dup109 | Uniquely | No | — | — | LINE | Other L1 | chr1: 61272316-61274076 | − | 97 | 1761 | NFIA | Distal | 56856 | Not documented | 4 |
| L1MA2_dup105 | Uniquely | No | — | — | LINE | Other L1 | chr1: 61291657-61292443 | − | 49 | 787 | NFIA | Distal | 38489 | Not documented | 5 |
| AluSq2_dup1865 | Uniquely | No | — | — | SINE | Alu | chr1: 61578983-61579293 | + | 59 | 311 | NFIA | Proximal | 0 | Not documented | 6 |
| AluSx1_dup3579 | Multi | No | — | — | SINE | Alu | chr1: 61583574-61583886 | + | 48 | 313 | NFIA | Proximal | 0 | Not documented | 7 |
| L3_dup1300 | Uniquely | No | — | — | LINE | CR1 | chr1: 61672589-61672738 | + | 160 | 150 | NFIA | Proximal | 0 | Not documented | 8 |
| Eulor5A | Uniquely | No | — | — | DNA | DNA | chr1: 61691834-61691945 | − | 170 | 112 | NFIA | Proximal | 0 | Not documented | 9 |
| L1PB1_dup152 | Uniquely | No | — | — | LINE | L1PA\|B\|x | chr1: 62009409-62013564 | − | 45 | 4156 | NFIA | Distal | 80945 | EVE annotated | 1310 |
| L2c_dup5247 | Uniquely | No | — | — | LINE | L2 | chr1: 63913064-63913324 | − | 150 | 261 | ITGB3BP | Proximal | 0 | Not documented | 1 |
| MIRb_dup10687 | Multi/ | No | — | — | SINE | MIR | chr1: 65694618-65694856 | − | 160 | 239 | AK4 | Proximal | 0 | Not documented | 2 |
| | Uniquely | | | | | | | | | | | | | | |
| AluJr_dup2494 | Multi/ | No | — | — | SINE | Alu | chr1: 65694952-65695230 | + | 91 | 279 | AK4 | Proximal | 0 | Not documented | 3 |
| | Uniquely | | | | | | | | | | | | | | |
| MIRb_dup10688 | Multi | No | — | — | SINE | MIR | chr1: 65696179-65696235 | − | 120 | 57 | AK4 | Proximal | 0 | Not documented | 4 |
| X6B_LINE_dup2 | Multi | No | — | — | LINE | CR1 | chr1: 65697106-65697146 | − | 80 | 41 | AK4 | Proximal | 0 | Not documented | 5 |
| MER5A1_dup346 | Multi | No | — | — | DNA | DNA | chr1: 65898008-65898156 | + | 98 | 149 | LEPROT | Proximal | 0 | Not documented | 6 |
| MIRc_dup4318 | Multi | No | — | — | SINE | MIR | chr1: 65898204-65898278 | + | 140 | 75 | LEPROT | Proximal | 0 | Not documented | 7 |
| L1MA7_dup125 | Multi | No | — | — | LINE | Other L1 | chr1: 65898354-65898633 | + | 70 | 280 | LEPROT | Proximal | 0 | Not documented | 8 |
| MIR3_dup4012 | Multi/ | No | — | — | SINE | MIR | chr1: 68167660-68167830 | − | 120 | 171 | GNG12 | Proximal | 0 | Not documented | 9 |
| | Uniquely | | | | | | | | | | | | | | |
| MER20B_dup86 | Multi/ | No | — | — | DNA | DNA | chr1: 68564237-68564733 | − | 95 | 497 | WLS | Proximal | 0 | Not documented | 1320 |
| | Uniquely | | | | | | | | | | | | | | |
| L2c_dup5663 | Uniquely | No | — | — | LINE | L2 | chr1: 68657605-68657822 | + | 150 | 218 | WLS | Proximal | 0 | Not documented | 1 |
| MER103C_dup13 | Multi | No | — | — | DNA | DNA | chr1: 6880241-6880269 | − | 31 | 29 | CAMTA1 | Proximal | 0 | Not documented | 2 |
| AluSz_dup3600 | Uniquely | No | — | — | SINE | Alu | chr1: 68832773-68833078 | + | 64 | 306 | RPE65 | Distal | 61428 | Not documented | 3 |
| MER41B_dup66 | Multi/ | No | — | — | LTR | ERV1 | chr1: 70832131-70832544 | − | 44 | 414 | HHLA3 | Proximal | 0 | Not documented | 4 |
| | Uniquely | | | | | | | | | | | | | | |
| LTR7_dup46 | Multi/ | No | — | — | LTR | ERV1 | chr1: 70833312-70833744 | + | 55 | 433 | HHLA3 | Proximal | 0 | Not documented | 5 |
| | Uniquely | | | | | | | | | | | | | | |
| Plat_L3_dup94 | Multi/ | No | — | — | LINE | CR1 | chr1: 71531296-71531491 | + | 160 | 196 | ZRANB2 | Proximal | 0 | Not documented | 6 |
| | Uniquely | | | | | | | | | | | | | | |
| FRAM_dup339 | Multi | No | — | — | SINE | Alu | chr1: 71534481-71534635 | − | 91 | 155 | ZRANB2 | Proximal | 0 | Not documented | 7 |
| L1HS_dup27 | Multi | No | — | — | LINE | L1PA\|B\|x | chr1: 74984566-74985255 | − | 2.7 | 690 | FPGT-TNNI3K | Proximal | 0 | Not documented | 8 |
| L1PB2_dup59 | Uniquely | No | — | — | LINE | L1PA\|B\|x | chr1: 75748613-75753599 | − | 49 | 4987 | SLC44A5 | Proximal | 0 | Not documented | 9 |
| L1PA16_dup223 | Uniquely | No | — | — | LINE | L1PA\|B\|x | chr1: 76068667-76070775 | − | 53 | 2109 | SLC44A5 | Proximal | 0 | Not documented | 1330 |
| L1MA9_dup217 | Uniquely | No | — | — | LINE | Other L1 | chr1: 78073622-78078745 | + | 70 | 5124 | ZZZ3 | Proximal | 0 | Not documented | 1 |
| AluSx1_dup4008 | Multi | No | — | — | SINE | Alu | chr1: 78162486-78162775 | + | 39 | 290 | USP33 | Proximal | 0 | Not documented | 2 |
| HAL1b_dup110 | Uniquely | No | — | — | LINE | Other L1 | chr1: 79102018-79102430 | + | 130 | 413 | IFI44L | Proximal | 0 | Not documented | 3 |
| L2c_dup6422 | Multi | No | — | — | LINE | L2 | chr1: 79107759-79107933 | + | 150 | 175 | IFI44L | Proximal | 0 | Not documented | 4 |
| MIRb_dup11984 | Multi | No | — | — | SINE | MIR | chr1: 79107912-79107953 | + | 110 | 42 | IFI44L | Proximal | 0 | Not documented | 5 |
| LTR26_dup32 | Multi | No | — | — | LTR | ERV1 | chr1: 79109041-79109628 | − | 130 | 588 | IFI44L | Proximal | 0 | Not documented | 6 |
| LTR23_dup23 | Multi | No | — | — | LTR | ERV1 | chr1: 79110638-79111069 | + | 71 | 432 | IFI44L | Proximal | 0 | Not documented | 7 |
| MLT1J_dup452 | Multi | No | — | — | LTR | ERVL- | chr1: 79121448-79121562 | − | 120 | 115 | IFI44 | Proximal | 0 | Not documented | 8 |
| | | | | | | MaLR | | | | | | | | | |
| L1PA15_dup132 | Multi | No | — | — | LINE | L1PA\|B\|x | chr1: 83601482-83605836 | − | 66 | 4355 | TTLL7 | Distal | 724876 | Not documented | 9 |
| AluSx1_dup4115 | Multi | No | — | — | SINE | Alu | chr1: 83645619-83645943 | + | 53 | 325 | TTLL7 | Distal | 684769 | Not documented | 1340 |
| MIRb_dup12470 | Multi | No | — | — | SINE | MIR | chr1: 85717573-85717787 | + | 130 | 215 | C1orf52 | Proximal | 0 | Not documented | 1 |
| AluJr_dup2794 | Multi | No | — | — | SINE | Alu | chr1: 86119168-86119440 | + | 87 | 273 | ZNHIT6 | Proximal | 0 | Not documented | 2 |
| AluSz_dup3951 | Multi | No | — | — | SINE | Alu | chr1: 86852048-86852370 | − | 56 | 323 | ODF2L | Proximal | 0 | Not documented | 3 |
| MIRb_dup12602 | Uniquely | No | — | — | SINE | MIR | chr1: 87210790-87211019 | + | 150 | 230 | SH3GLB1 | Proximal | 0 | Not documented | 4 |
| AluSx_dup6134 | Uniquely | No | — | — | SINE | Alu | chr1: 87212270-87212565 | + | 52 | 296 | SH3GLB1 | Proximal | 0 | Not documented | 5 |
| L1ME4a_dup1456 | Multi | No | — | — | LINE | Other L1 | chr1: 87213558-87214032 | − | 100 | 475 | SH3GLB1 | Proximal | 0 | Not documented | 6 |
| L1MC2_dup154 | Uniquely | No | — | — | LINE | Other L1 | chr1: 87425355-87426807 | + | 74 | 1453 | HS2ST1 | Proximal | 0 | Not documented | 7 |
| MIRc_dup5135 | Multi | No | — | — | SINE | MIR | chr1: 87571536-87571789 | + | 70 | 254 | RP5-105215.2 | Proximal | 0 | Not documented | 8 |
| MIR_dup8129 | Multi | No | — | — | SINE | MIR | chr1: 89401472-89401611 | − | 120 | 140 | CCBL2 | Proximal | 0 | Not documented | 9 |
| L2_dup2069 | Uniquely | No | — | — | LINE | L2 | chr1: 89511538-89512187 | − | 140 | 650 | GBP1 | Distal | 5816 | Not documented | 1350 |
| MER58A_dup404 | Multi/ | No | — | — | DNA | DNA | chr1: 89523962-89524176 | − | 100 | 215 | GBP1 | Proximal | 0 | Not documented | 1 |
| | Uniquely | | | | | | | | | | | | | | |
| L4_dup19 | Multi | No | — | — | LINE | RTE | chr1: 8954345-8954410 | + | 140 | 66 | ENO1 | Distal | 15038 | Not documented | 2 |
| MSTA_dup519 | Uniquely | No | — | — | LTR | ERVL- | chr1: 91254907-91255249 | − | 52 | 343 | BARHL2 | Distal | 72114 | Not documented | 3 |
| | | | | | | MaLR | | | | | | | | | |
| L3_dup1895 | Multi | No | — | — | LINE | CR1 | chr1: 91599982-91600040 | − | 120 | 59 | ZNF644 | Distal | 112154 | Not documented | 4 |
| Tigger7_dup90 | Multi | No | — | — | DNA | DNA | chr1: 91751235-91751659 | + | 73 | 425 | HFM1 | Proximal | 0 | Not documented | 5 |
| MLT1B_dup548 | Multi | No | — | — | LTR | ERVL- | chr1: 91760820-91761193 | − | 69 | 374 | HFM1 | Proximal | 0 | Not documented | 6 |
| | | | | | | MaLR | | | | | | | | | |
| L1MA9_dup303 | Multi | No | — | — | LINE | Other L1 | chr1: 91822026-91823659 | + | 83 | 1634 | HFM1 | Proximal | 0 | Not documented | 7 |
| L1HS_dup39 | Multi | No | — | — | LINE | L1PA\|B\|x | chr1: 91853148-91853486 | + | 5.5 | 339 | HFM1 | Proximal | 0 | Not documented | 8 |
| ERVL-B4-int_dup8 | Uniquely | No | — | — | LTR | ERVL | chr1: 9357527-9358428 | + | 72 | 902 | SPSB1 | Proximal | 0 | Not documented | 9 |
| L2b_dup5634 | Multi/ | No | — | — | LINE | L2 | chr1: 93804558-93804875 | + | 160 | 318 | DR1 | Distal | 6571 | Not documented | 1360 |
| | Uniquely | | | | | | | | | | | | | | |
| AluSg_dup1749 | Multi | No | — | — | SINE | Alu | chr1: 94353030-94353321 | − | 30 | 292 | GCLM | Proximal | 0 | Not documented | 1 |
| AluSg7_dup353 | Multi/ | No | — | — | SINE | Alu | chr1: 94995348-94995653 | + | 39 | 30€ | F3 | Proximal | 0 | Not documented | 2 |
| | Uniquely | | | | | | | | | | | | | | |
| AluSz_dup4190 | Uniquely | No | — | — | SINE | Alu | chr1: 94996846-94997156 | − | 61 | 311 | F3 | Proximal | 0 | Not documented | 3 |
| MIR3_dup4679 | Uniquely | No | — | — | SINE | MIR | chr1: 94998363-94998542 | − | 140 | 180 | F3 | Proximal | 0 | Not documented | 4 |
| AluSx1_dup4432 | Multi | No | — | — | SINE | Alu | chr1: 94999408-94999722 | − | 50 | 315 | F3 | Proximal | 0 | Not documented | 5 |
| Tigger2_dup106 | Multi | No | — | — | DNA | DNA | chr1: 94999723-94999975 | + | 56 | 253 | F3 | Proximal | 0 | Not documented | 6 |
| L1M5_dup1914 | Multi | No | — | — | LINE | Other L1 | chr1: 95368070-95368150 | − | 100 | 81 | CNN3 | Proximal | 0 | Not documented | 7 |
| L2c_dup7507 | Uniquely | No | — | — | LINE | L2 | chr1: 95378141-95378228 | + | 95 | 88 | CNN3 | Proximal | 0 | Not documented | 8 |
| L3_dup1961 | Uniquely | No | — | — | LINE | CR1 | chr1: 95379034-95379387 | + | 130 | 354 | CNN3 | Proximal | 0 | Not documented | 9 |
| L3_dup2023 | Multi | No | — | — | LINE | CR1 | chr1: 98012273-98012357 | − | 120 | 85 | DPYD | Proximal | 0 | Not documented | 1370 |
| HERVH-int_dup4175 | Multi | No | — | — | LTR | ERV1 | chr10: 102141063-102141511 | + | 93 | 449 | SCD | Distal | 16473 | Not documented | 1 |
| HERVH-int_dup4177 | Uniquely | No | — | — | LTR | ERV1 | chr10: 102143311-102144762 | + | 58 | 1452 | SCD | Distal | 18721 | EVE annotated | 2 |
| LTR7B_dup537 | Multi | No | — | — | LTR | ERV1 | chr10: 102147801-102148155 | + | 27 | 355 | SCD | Distal | 23211 | Not documented | 3 |
| L2b_dup59840 | Multi | No | — | — | LINE | L2 | chr10: 102741112-102741167 | + | 110 | 56 | SEMA4G | Proximal | 0 | Not documented | 4 |
| AluSg4_dup4385 | Multi | No | — | — | SINE | Alu | chr10: 104622811-104623121 | + | 20 | 311 | C10orf32 | Proximal | 0 | Not documented | 5 |
| AluJb_dup78536 | Uniquely | No | — | — | SINE | Alu | chr10: 11100761-11101045 | − | 100 | 285 | CELF2 | Proximal | 0 | Not documented | 6 |
| MIR_dup104161 | Uniquely | No | — | — | SINE | MIR | chr10: 11101046-11101151 | − | 130 | 106 | CELF2 | Proximal | 0 | Not documented | 7 |
| AluSx1_dup63931 | Multi/ | No | — | — | SINE | Alu | chr10: 115673602-115673909 | − | 50 | 308 | NHLRC2 | Proximal | 0 | Not documented | 8 |
| | Uniquely | | | | | | | | | | | | | | |
| AluSq2_dup32699 | Multi/ | No | — | — | SINE | Alu | chr10: 115673923-115674225 | − | 52 | 303 | NHLRC2 | Proximal | 0 | Not documented | 9 |
| | Uniquely | | | | | | | | | | | | | | |
| MIRb_dup141237 | Uniquely | No | — | — | SINE | MIR | chr10: 116238734-116238993 | + | 140 | 260 | ABLIM1 | Proximal | 0 | Not documented | 1380 |
| L1MEc_dup12600 | Uniquely | No | — | — | LINE | Other L1 | chr10: 127530517-127531332 | + | 97 | 816 | BCCIP | Proximal | 0 | Not documented | 1 |
| L1MB1_dup4168 | Uniquely | No | — | — | LINE | Other L1 | chr10: 129797329-129797503 | + | 91 | 175 | PTPRE | Proximal | 0 | Not documented | 2 |
| AluSz_dup53793 | Uniquely | No | — | — | SINE | Alu | chr10: 14603781-14604084 | − | 50 | 304 | FAM107B | Proximal | 0 | Not documented | |
| AluJb_dup78822 | Uniquely | No | — | — | SINE | Alu | chr10: 15144194-15144484 | − | 80 | 291 | RPP38 | Proximal | 0 | Not documented | 4 |
| MIRb_dup133330 | Multi | No | — | — | SINE | MIR | chr10: 17277426-17277624 | − | 140 | 199 | VIM | Proximal | 0 | Not documented | 5 |
| AluSp_dup27432 | Multi | No | — | — | SINE | Alu | chr10: 28811915-28812209 | − | 48 | 295 | WAC | Distal | 9214 | Not documented | |
| AluSq2_dup31103 | Multi | No | — | — | SINE | Alu | chr10: 31616024-31616338 | − | 55 | 315 | ZEB1 | Proximal | 0 | Not documented | 7 |
| MIR_dup105214 | Multi | No | — | — | SINE | MIR | chr10: 31617191-31617370 | + | 160 | 180 | ZEB1 | Proximal | 0 | Not documented | 8 |
| L1ME2_dup8012 | Multi | No | — | — | LINE | Other L1 | chr10: 31617956-31619126 | − | 91 | 1171 | ZEB1 | Proximal | 0 | Not documented | 9 |
| L1ME3E_dup3215 | Multi | No | — | — | LINE | Other L1 | chr10: 31622396-31623965 | + | 130 | 1570 | ZEB1 | Proximal | 0 | Not documented | 1390 |
| AluJr_dup43656 | Uniquely | No | — | — | SINE | Alu | chr10: 34598208-34598505 | + | 75 | 298 | PARD3 | Proximal | 0 | Not documented | 1 |
| L1MB2_dup5294 | Uniquely | No | — | — | LINE | Other L1 | chr10: 43039347-43041562 | + | 120 | 2216 | BMS1 | Distal | 236688 | Not documented | 2 |
| AluSx_dup79046 | Uniquely | No | — | — | SINE | Alu | chr10: 43949485-43949798 | − | 55 | 314 | ZNF487 | Proximal | 0 | Not documented | 3 |
| MIR_dup105609 | Multi/ | No | — | — | SINE | MIR | chr10: 45472527-45472642 | − | 85 | 116 | C10orf10 | Proximal | 0 | Not documented | 4 |
| | Uniquely | | | | | | | | | | | | | | |
| L4_dup11133 | Multi | No | — | — | LINE | RTE | chr10: 46118047-46118112 | + | 140 | 66 | ZFAND4 | Proximal | 0 | Not documented | 5 |
| MER39B_dup785 | Multi/ | No | — | — | LTR | ERV1 | chr10: 60933055-60933689 | − | 65 | 635 | PHYHIPL | Distal | 2662 | Not documented | 6 |
| | Uniquely | | | | | | | | | | | | | | |
| LTR81B_dup816 | Multi/ | No | — | — | LTR | Gypsy | chr10: 60933826-60934359 | − | 130 | 534 | PHYHIPL | Proximal | 1992 | Not documented | 7 |
| | Uniquely | | | | | | | | | | | | | | |
| L2a_dup105980 | Multi/ | No | — | — | LINE | L2 | chr10: 60935539-60935637 | + | 120 | 99 | PHYHIPL | Proximal | 714 | Not documented | 8 |
| | Uniquely | | | | | | | | | | | | | | |
| AluY_dup69916 | Uniquely | No | — | — | SINE | Alu | chr10: 69524853-69525156 | + | 14 | 304 | DNAJC12 | Distal | 31272 | Not documented | 9 |
| MER113_dup1853 | Uniquely | No | — | — | DNA | DNA | chr10: 71392988-71393213 | + | 130 | 226 | C10orf35 | Proximal | 0 | Not documented | 1400 |
| AluJo_dup40880 | Uniquely | No | — | — | SINE | Alu | chr10: 73772125-73772233 | + | 54 | 109 | CHST3 | Proximal | 0 | Not documented | 1 |
| AluY_dup70265 | Multi | No | — | — | SINE | Alu | chr10: 75009554-75009686 | + | 60 | 133 | MRPS16 | Proximal | 0 | Not documented | 2 |
| AluY_dup70266 | Multi | No | — | — | SINE | Alu | chr10: 75009687-75009992 | + | 25 | 306 | MRPS16 | Proximal | 0 | Not documented | 3 |
| L2b_dup58748 | Uniquely | No | — | — | LINE | L2 | chr10: 75012649-75012865 | − | 150 | 217 | MRPS16 | Proximal | 199 | Not documented | 4 |
| LTR37B_dup1328 | Multi | No | — | — | LTR | ERV1 | chr10: 79132632-79133047 | + | 75 | 416 | KCNMA1 | Proximal | 0 | Not documented | 5 |
| AluSx3_dup17200 | Uniquely | No | — | — | SINE | Alu | chr10: 80077197-80077501 | + | 45 | 305 | RPS24 | Distal | 260628 | Not documented | 6 |
| AluSx1_dup62704 | Multi | No | — | — | SINE | Alu | chr10: 82192115-82192412 | + | 56 | 298 | FAM213A | Proximal | 0 | Not documented | 7 |
| MLT1B_dup11733 | Uniquely | No | — | — | LTR | ERVL- | chr10: 84120387-84120858 | − | 87 | 472 | NRG3 | Proximal | 0 | Not documented | 8 |
| | | | | | | MaLR | | | | | | | | | |
| L1PA8A_dup1792 | Uniquely | No | — | — | LINE | L1PA\|B\|x | chr10: 84192231-84195525 | − | 56 | 3295 | NRG3 | Proximal | 0 | EVE annotated | 9 |
| L1MC4_dup18687 | Multi | No | — | — | LINE | Other L1 | chr10: 88565518-88566319 | − | 110 | 802 | BMPR1A | Proximal | 0 | Not documented | 1410 |
| MLT1l_dup7161 | Uniquely | No | — | — | LTR | ERVL- | chr10: 88575501-88575880 | + | 130 | 380 | BMPR1A | Proximal | 0 | Not documented | 1 |
| | | | | | | MaLR | | | | | | | | | |
| HAL1_dup17776 | Uniquely | No | — | — | LINE | Other L1 | chr10: 88576191-88576652 | + | 150 | 462 | BMPR1A | Proximal | 0 | Not documented | 2 |
| Tigger14a_dup865 | Multi | No | — | — | DNA | DNA | chr10: 89513129-89513227 | − | 98 | 99 | ATAD1 | Proximal | 0 | Not documented | 3 |
| MSTB-int_dup585 | Uniquely | No | — | — | LTR | ERVL- | chr10: 95769208-95770797 | − | 79 | 1590 | PLCE1 | Proximal | 0 | Not documented | 4 |
| | | | | | | MaLR | | | | | | | | | |
| MER58B_dup4274 | Multi/ | No | — | — | DNA | DNA | chr10: 96087973-96088299 | − | 72 | 327 | NOC3L | Proximal | 0 | Not documented | 5 |
| | Uniquely | | | | | | | | | | | | | | |
| AluJr_dup45230 | Uniquely | No | — | — | SINE | Alu | chr10: 96366105-96366398 | − | 100 | 294 | HELLS | Proximal | 0 | Not documented | 6 |
| HAL1_dup17869 | Uniquely | No | — | — | LINE | Other L1 | chr10: 96366494-96366897 | − | 140 | 404 | HELLS | Proximal | 0 | Not documented | 7 |
| AluSx1_dup63182 | Multi | No | — | — | SINE | Alu | chr10: 97150388-97150703 | − | 43 | 316 | SORBS1 | Proximal | 0 | Not documented | 8 |
| L3_dup29679 | Uniquely | No | — | — | LINE | CR1 | chr10: 97237832-97238179 | + | 150 | 348 | SORBS1 | Proximal | 0 | Not documented | 9 |
| L3_dup29681 | Uniquely | No | — | — | LINE | CR1 | chr10: 97268330-97268459 | + | 150 | 130 | SORBS1 | Proximal | 0 | Not documented | 1420 |
| AluSx1_dup63190 | Uniquely | No | — | — | SINE | Alu | chr10: 97286900-97287187 | + | 54 | 288 | SORBS1 | Proximal | 0 | Not documented | 11 |
| MIR3_dup57601 | Uniquely | No | — | — | SINE | MIR | chr10: 97287440-97287543 | + | 180 | 104 | SORBS1 | Proximal | 0 | Not documented | 12 |
| L2b_dup59586 | Uniquely | No | — | — | LINE | L2 | chr10: 97287806-97287879 | − | 150 | 74 | SORBS1 | Proximal | 0 | Not documented | 13 |
| AluSx_dup81460 | Uniquely | No | — | — | SINE | Alu | chr10: 97288394-97288705 | + | 34 | 312 | SORBS1 | Proximal | 0 | Not documented | 14 |
| L1PA15-16_dup967 | Uniquely | No | — | — | LINE | L1PA\|B\|x | chr11: 10097452-10098673 | + | 150 | 1222 | SBF2 | Proximal | 0 | Not documented | 1425 |
| THE1A-int_dup1079 | Uniquely | No | — | — | LTR | ERVL- | chr11: 101997392-101998938 | + | 40 | 1547 | YAP1 | Proximal | 0 | Not documented | 26 |
| | | | | | | MaLR | | | | | | | | | |
| L3b_dup4697 | Multi | No | — | — | LINE | CR1 | chr11: 10534181-10534226 | − | 100 | 46 | RNF141 | Proximal | 0 | Not documented | 27 |
| MIRc_dup66831 | Multi | No | — | — | SINE | MIR | chr11: 10534612-10534661 | − | 100 | 50 | RNF141 | Proximal | 0 | Not documented | 28 |
| AluSx1_dup64991 | Multi | No | — | — | SINE | Alu | chr11: 10535225-10535521 | − | 50 | 297 | RNF141 | Proximal | 0 | Not documented | 29 |
| MER20_dup10710 | Multi | No | — | — | DNA | DNA | chr11: 105879774-105879968 | − | 74 | 195 | MSANTD4 | Proximal | 0 | Not documented | 30 |
| L1ME4a_dup30099 | Multi | No | — | — | LINE | Other L1 | chr11: 105967870-105967981 | − | 100 | 112 | AASDHPPT | Proximal | 0 | Not documented | 31 |
| MLT1L_dup8237 | Multi | No | — | — | LTR | ERVL- | chr11: 105968151-105968244 | − | 130 | 94 | AASDHPPT | Proximal | 0 | Not documented | 32 |
| | | | | | | MaLR | | | | | | | | | |
| MLT1L_dup8238 | Multi | No | — | — | LTR | ERVL- | chr11: 105968275-105968468 | − | 140 | 194 | AASDHPPT | Proximal | 0 | Not documented | 33 |
| | | | | | | MaLR | | | | | | | | | |
| L1MA5_dup3299 | Uniquely | No | — | — | LINE | Other L1 | chr11: 106721935-106726254 | − | 97 | 4320 | GUCY1A2 | Proximal | 0 | Not documented | 34 |
| AluJo_dup44641 | Multi | No | — | — | SINE | Alu | chr11: 107662318-107662452 | + | 71 | 135 | SLC35F2 | Proximal | 0 | Not documented | 35 |
| AluSz_dup61078 | Multi/ | No | — | — | SINE | Alu | chr11: 107662455-107662717 | + | 64 | 263 | SLC35F2 | Proximal | 0 | Not documented | 36 |
| | Uniquely | | | | | | | | | | | | | | |
| Charlie14a_dup367 | Multi | No | — | — | DNA | DNA | chr11: 10876220-10876816 | − | 90 | 597 | ZBED5 | Proximal | 0 | Not documented | 37 |
| LTR50_dup1743 | Multi/ | No | — | — | LTR | ERVL | chr11: 10900242-10900865 | + | 110 | 624 | ZBED5 | Distal | 19900 | Not documented | 38 |
| | Uniquely | | | | | | | | | | | | | | |
| MIRc_dup71630 | Multi | No | — | — | SINE | MIR | chr11: 110333446-110333624 | − | 140 | 179 | FDX1 | Proximal | 0 | Not documented | 39 |
| MER21C_dup3625 | Uniquely | No | — | — | LTR | ERVL | chr11: 111512820-111513654 | − | 93 | 835 | SIK2 | Proximal | 0 | Not documented | 40 |
| MER5B_dup17299 | Uniquely | No | — | — | DNA | DNA | chr11: 111780589-111780795 | − | 63 | 207 | CRYAB | Proximal | 0 | Not documented | 41 |
| AluJr_dup48589 | Multi | No | — | — | SINE | Alu | chr11: 111892417-111892721 | + | 61 | 305 | DIXDC1 | Proximal | 0 | Not documented | 42 |
| MIRc_dup71699 | Uniquely | No | — | — | SINE | MIR | chr11: 111954850-111954954 | + | 130 | 105 | C11orf57 | Proximal | 0 | Not documented | 43 |
| MIRc_dup71700 | Multi/ | No | — | — | SINE | MIR | chr11: 111956926-111957088 | − | 140 | 163 | TIMM8B | Proximal | 0 | Not documented | 44 |
| | Uniquely | | | | | | | | | | | | | | |
| L2b_dup65900 | Uniquely | No | — | — | LINE | L2 | chr11: 114177915-114178848 | + | 150 | 934 | NNMT | Proximal | 0 | Not documented | 45 |
| L1MC1_dup9596 | Uniquely | No | — | — | LINE | Other L1 | chr11: 114204012-114207767 | + | 64 | 3756 | NNMT | Distal | 20006 | Not documented | 46 |
| Kanga2_a_dup1064 | Multi | No | — | — | DNA | DNA | chr11: 115238541-115239327 | − | 110 | 787 | CADM1 | Proximal | 0 | Not documented | 47 |
| MER3_dup7316 | Multi | No | — | — | DNA | DNA | chr11: 115239484-115239676 | + | 88 | 193 | CADM1 | Proximal | 0 | Not documented | 48 |
| MIRb_dup155163 | Multi | No | — | — | SINE | MIR | chr11: 115269728-115269930 | − | 150 | 203 | CADM1 | Proximal | 0 | Not documented | 49 |
| L2c_dup100431 | Uniquely | No | — | — | LINE | L2 | chr11: 116899013-116899504 | − | 150 | 492 | SIK3 | Proximal | 0 | Not documented | 1450 |
| AluSq2_dup34930 | Multi | No | — | — | SINE | Alu | chr11: 117039504-117039806 | − | 50 | 303 | PAFAH1B2 | Proximal | 0 | Not documented | 51 |
| AluSx3_dup18709 | Multi | No | — | — | SINE | Alu | chr11: 118471792-118472075 | − | 46 | 284 | ARCN1 | Proximal | 0 | Not documented | 52 |
| MIRc_dup66903 | Multi | No | — | — | SINE | MIR | chr11: 11985242-11985466 | + | 120 | 225 | DKK3 | Proximal | 0 | Not documented | 53 |
| AluSz_dup61616 | Uniquely | No | — | — | SINE | Alu | chr11: 120239827-120240137 | − | 60 | 311 | ARHGEF12 | Proximal | 0 | Not documented | 54 |
| MER82_dup2240 | Uniquely | No | — | — | DNA | DNA | chr11: 120903027-120903675 | + | 97 | 649 | TBCEL | Proximal | 0 | Not documented | 55 |
| L2b_dup66388 | Uniquely | No | — | — | LINE | L2 | chr11: 121958957-121959630 | − | 150 | 674 | BLID | Distal | 26433 | Not documented | 56 |
| MIR3_dup63889 | Multi/ | No | — | — | SINE | MIR | chr11: 121960691-121960861 | + | 170 | 171 | BLID | Distal | 25202 | Not documented | 57 |
| | Uniquely | | | | | | | | | | | | | | |
| MIRb_dup156043 | Multi | No | — | — | SINE | MIR | chr11: 121961208-121961355 | + | 84 | 148 | BLID | Distal | 24708 | Not documented | 58 |
| LTR33_dup6516 | Uniquely | No | — | — | LTR | ERVL | chr11: 122009760-122010247 | − | 140 | 488 | BLID | Dista | 22838 | Not documented | 59 |
| L1ME3A_dup11021 | Multi | No | — | — | LINE | Other L1 | chr11: 123995281-123995990 | − | 110 | 710 | VWA5A | Proximal | 0 | Not documented | 60 |
| MIR_dup120353 | Multi | No | — | — | SINE | MIR | chr11: 124493251-124493410 | + | 120 | 160 | TBRG1 | Proximal | 0 | Not documented | 61 |
| MIRb_dup156328 | Multi | No | — | — | SINE | MIR | chr11: 124493437-124493566 | − | 110 | 130 | TBRG1 | Proximal | 0 | Not documented | 62 |
| L3_dup32622 | Multi | No | — | — | LINE | CR1 | chr11: 124506474-124506515 | + | 110 | 42 | SIAE | Proximal | 0 | Not documented | 63 |
| L2b_dup66473 | Multi | No | — | — | LINE | L2 | chr11: 124789141-124789234 | − | 110 | 94 | HEPACAM | Proximal | 0 | Not documented | 64 |
| MER44A_dup1701 | Multi | No | — | — | DNA | DNA | chr11: 125357998-125358290 | + | 66 | 293 | FEZ1 | Proximal | 0 | Not documented | 65 |
| AluSg_dup26291 | Multi | No | — | — | SINE | Alu | chr11: 125358295-125358604 | + | 49 | 310 | FEZ1 | Proximal | 0 | Not documented | 66 |
| Charlie13a_dup422 | Multi | No | — | — | DNA | DNA | chr11: 125453238-125453416 | − | 120 | 179 | EI24 | Proximal | 0 | Not documented | 67 |
| L2a_dup118155 | Multi | No | — | — | LINE | L2 | chr11: 125491153-125491225 | + | 88 | 73 | STT3A | Proximal | 0 | Not documented | 68 |
| MER91A_dup2446 | Uniquely | No | — | — | DNA | DNA | chr11: 126654540-126654662 | − | 140 | 123 | KIRREL3 | Proximal | 0 | Not documented | 69 |
| AluSc_dup22616 | Uniquely | No | — | — | SINE | Alu | chr11: 126655491-126655797 | + | 45 | 307 | KIRREL3 | Proximal | 0 | Not documented | 70 |
| AluY_dup77341 | Multi/ | No | — | — | SINE | Alu | chr11: 126781600-126781902 | + | 21 | 303 | KIRREL3 | Proximal | | Not documented | 71 |
| | Uniquely | | | | | | | | | | | | | | |
| MER5A_dup24382 | Uniquely | No | — | — | DNA | DNA | chr11: 126811281-126811410 | + | 120 | 130 | KIRREL3 | Proximal | 0 | Not documented | 72 |
| Tigger1_dup8798 | Uniquely | No | — | — | DNA | DNA | chr11: 126830646-126833020 | + | 60 | 2375 | KIRREL3 | Proximal | 0 | Not documented | 73 |
| MIRb_dup143701 | Uniquely | No | — | — | SINE | MIR | chr11: 12741987-12742191 | − | 130 | 205 | TEAD1 | Proximal | 0 | Not documented | 74 |
| AluSx1_dup68863 | Multi/ | No | — | — | SINE | Alu | chr11: 129086295-129086588 | + | 53 | 294 | ARHGAP32 | Proximal | 0 | Not documented | 1475 |
| | Uniquely | | | | | | | | | | | | | | |
| MER33_dup6341 | Uniquely | No | — | — | DNA | DNA | chr11: 129092825-129093140 | − | 80 | 316 | ARHGAP32 | Proximal | 0 | Not documented | 76 |
| L1M4_dup12208 | Uniquely | No | — | — | LINE | Other L1 | chr11: 129094284-129094724 | + | 110 | 441 | ARHGAP32 | Proximal | 0 | Not documented | 77 |
| MIRb_dup143728 | Multi/ | No | — | — | SINE | MIR | chr11: 12959999-12960074 | − | 130 | 76 | TEAD1 | Proximal | 0 | Not documented | 78 |
| | Uniquely | | | | | | | | | | | | | | |
| MamRep564_dup516 | Multi/ | No | — | — | Other | Other | chr11: 12960331-12960455 | + | 120 | 125 | TEAD1 | Proximal | 0 | Not documented | 79 |
| | Uniquely | | | | | Repeats | | | | | | | | | |
| AluJr_dup46454 | Multi | No | — | — | SINE | Alu | chr11: 13344326-13344643 | − | 63 | 318 | ARNTL | Proximal | 0 | Not documented | 80 |
| L2c_dup93765 | Multi | No | — | — | LINE | L2 | chr11: 13344644-13344777 | − | 130 | 134 | ARNTL | Proximal | 0 | Not documented | 81 |
| L2a_dup110662 | Multi | No | — | — | LINE | L2 | chr11: 13344823-13345171 | + | 140 | 349 | ARNTL | Proximal | 0 | Not documented | 82 |
| L3_dup30520 | Multi | No | — | — | LINE | CR1 | chr11: 13375831-13375902 | + | 130 | 72 | ARNTL | Proximal | 0 | Not documented | 83 |
| L1MCa_dup5303 | Uniquely | No | — | — | LINE | Other L1 | chr11: 134003528-134004427 | + | 68 | 900 | JAM3 | Proximal | 0 | Not documented | 84 |
| L2a_dup118744 | Multi | No | — | — | LINE | L2 | chr11: 134118648-134118714 | − | 130 | 67 | THYN1 | Proximal | 0 | Not documented | 85 |
| AluSc8_dup13190 | Uniquely | No | — | — | SINE | Alu | chr11: 16328160-16328469 | − | 50 | 310 | SOX6 | Proximal | 0 | Not documented | 86 |
| Tigger1_dup8384 | Uniquely | No | — | — | DNA | DNA | chr11: 16495340-16497399 | − | 57 | 2060 | SOX6 | Proximal | 0 | Not documented | 87 |
| AluSq2_dup33317 | Multi | No | — | — | SINE | Alu | chr11: 17109796-17110088 | − | 34 | 293 | PIK3C2A | Proximal | 0 | Not documented | 88 |
| MIRb_dup144721 | Multi | No | — | — | SINE | MIR | chr11: 19799841-19799991 | + | 150 | 151 | NAV2 | Proximal | 0 | Not documented | 89 |
| MLT1G_dup1918 | Uniquely | No | — | — | LTR | ERVL- | chr11: 19987253-19987822 | − | 110 | 570 | NAV2 | Proximal | 0 | Not documented | 90 |
| | | | | | | MaLR | | | | | | | | | |
| L3_dup30724 | Uniquely | No | — | — | LINE | CR1 | chr11: 19989062-19989349 | + | 140 | 288 | NAV2 | Proximal | 0 | Not documented | 91 |
| AluSx3_dup17888 | Uniquely | No | — | — | SINE | Alu | chr11: 20074481-20074789 | + | 59 | 309 | NAV2 | Proximal | 0 | Not documented | 92 |
| AluY_dup73494 | Multi | No | — | — | SINE | Alu | chr11: 20096756-20097086 | − | 30 | 331 | NAV2 | Proximal | 0 | Not documented | 93 |
| L1PA7_dup9622 | Uniquely | No | — | — | LINE | L1PA\|B\|x | chr11: 24874912-24876629 | − | 47 | 1718 | LUZP2 | Proximal | 0 | Not documented | 94 |
| L1M2_dup6231 | Uniquely | No | — | — | LINE | Other L1 | chr11: 2669435-2671817 | − | 84 | 2383 | KCNQ1 | Proximal | 0 | Not documented | 95 |
| L3_dup30853 | Multi/ | No | — | — | LINE | CR1 | chr11: 27147196-27147302 | + | 150 | 107 | BBOX1 | Proximal | 0 | Not documented | 96 |
| | Uniquely | | | | | | | | | | | | | | |
| FRAM_dup5187 | Multi | No | — | — | SINE | Alu | chr11: 27517379-27517536 | + | 78 | 158 | LIN7C | Proximal | 0 | Not documented | 97 |
| Tigger3a_dup3649 | Uniquely | No | — | — | DNA | DNA | chr11: 33000425-33000725 | − | 51 | 301 | QSER1 | Proximal | 0 | Not documented | 98 |
| HAL1_dup18463 | Uniquely | No | — | — | LINE | Other L1 | chr11: 33163319-33163386 | − | 94 | 68 | CSTF3 | Proximal | 0 | Not documented | 99 |
| L1PB4_dup5263 | Multi | No | — | — | LINE | L1PA\|B\|x | chr11: 33911787-33911887 | + | 120 | 101 | LMO2 | Proximal | 0 | Not documented | 1500 |
| AluSq2_dup33509 | Multi/ | No | — | — | SINE | Alu | chr11: 33911893-33912198 | − | 56 | 306 | LMO2 | Proximal | 0 | Not documented | 1 |
| | Uniquely | | | | | | | | | | | | | | |
| MIRb_dup146238 | Multi/ | No | — | — | SINE | MIR | chr11: 33912290-33912397 | − | 110 | 108 | LMO2 | Proximal | 0 | Not documented | 2 |
| | Uniquely | | | | | | | | | | | | | | |
| MIRb_dup146239 | Multi/ | No | — | — | SINE | MIR | chr11: 33912566-33912669 | + | 140 | 104 | LMO2 | Proximal | 0 | Not documented | 3 |
| | Uniquely | | | | | | | | | | | | | | |
| SATR2_dup151 | Uniquely | No | — | — | Other | Other | chr11: 3408679-3411970 | + | 77 | 3292 | ZNF195 | Distal | 8232 | Not documented | 4 |
| | | | | | | Repeats | | | | | | | | | |
| L2a_dup112202 | Multi | No | — | — | LINE | L2 | chr11: 34120482-34120608 | + | 45 | 127 | CAPRIN1 | Proximal | 0 | Not documented | 5 |
| UCON23_dup21 | Multi | No | — | — | DNA | DNA | chr11: 34121588-34121621 | − | 54 | 34 | CAPRIN1 | Proximal | 0 | Not documented | 6 |
| L3_dup30983 | Multi | No | — | — | LINE | CR1 | chr11: 34474662-34474729 | + | 90 | 68 | CAT | Proximal | 0 | Not documented | 7 |
| HUERS-P3-int_dup461 | Uniquely | No | — | — | LTR | ERV1 | chr11: 34920716-34928687 | + | 64 | 7972 | APIP | Proximal | 0 | EVE annotated | 8 |
| MIR3_dup60360 | Multi | No | — | — | SINE | MIR | chr11: 35225799-35225914 | + | 170 | 116 | CD44 | Proximal | 0 | Not documented | 9 |
| MIR3_dup60361 | Multi | No | — | — | SINE | MIR | chr 11: 35247403-35247533 | + | 140 | 131 | CD44 | Proximal | 0 | Not documented | 10 |
| MIR_dup114155 | Multi | No | — | — | SINE | MIR | chr11: 35397336-35397558 | − | 130 | 223 | SLC1A2 | Proximal | 0 | Not documented | 11 |
| L1MC1_dup9239 | Uniquely | No | — | — | LINE | Other L1 | chr11: 35739963-35742454 | − | 63 | 2492 | TRIM44 | Proximal | 0 | Not documented | 12 |
| MIRb_dup146542 | Uniquely | No | — | — | SINE | MIR | chr11: 35808105-35808233 | + | 100 | 129 | TRIM44 | Proximal | 0 | Not documented | 13 |
| L1ME2_dup8641 | Uniquely | No | — | — | LINE | Other L1 | chr11: 35907455-35909593 | − | 120 | 2139 | LDLRAD3 | Distal | 55939 | Not documented | 14 |
| L1ME3A_dup10544 | Uniquely | No | — | — | LINE | Other L1 | chr11: 35926196-35927010 | + | 100 | 815 | LDLRAD3 | Distal | 38522 | Not documented | 15 |
| MLT1K_dup11265 | Multi/ | No | — | — | LTR | ERVL- | chr11: 35940035-35940544 | − | 150 | 510 | LDLRAD3 | Distal | 24988 | Not documented | 16 |
| | Uniquely | | | | | MaLR | | | | | | | | | |
| MIR3_dup59118 | Multi | No | — | — | SINE | MIR | chr11: 3847170-3847302 | + | 140 | 133 | PGAP2 | Proximal | 0 | Not documented | 17 |
| L1P3_dup2489 | Uniquely | No | — | — | LINE | L1PA\|B\|x | chr11: 40213725-40215995 | + | 47 | 2271 | LRRC4C | Proximal | 0 | Not documented | 18 |
| AluSz6_dup27597 | Multi | No | — | — | SINE | Alu | chr11: 4067290-4067449 | − | 43 | 160 | STIM1 | Proximal | 0 | Not documented | 19 |
| MIRb_dup147374 | Multi | No | — | — | SINE | MIR | chr11: 43902656-43902822 | − | 130 | 167 | ALKBH3 | Proximal | 0 | Not documented | 20 |
| AluSz_dup59061 | Multi | No | — | — | SINE | Alu | chr11: 45848036-45848380 | + | 82 | 345 | SLC35C1 | Distal | 13471 | Not documented | 21 |
| AluSc_dup21683 | Multi | No | — | — | SINE | Alu | chr11: 46699220-46699509 | + | 33 | 290 | ARHGAP1 | Proximal | 0 | Not documented | 22 |
| MIRb_dup148021 | Multi | No | — | — | SINE | MIR | chr11: 47442030-47442197 | + | 140 | 168 | PSMC3 | Proximal | 0 | Not documented | 23 |
| MER57B1_dup674 | Multi | No | — | — | LTR | ERV1 | chr11: 47639731-47639769 | − | 81 | 39 | MTCH2 | Proximal | 0 | Not documented | 24 |
| L2c_dup95979 | Multi | No | — | — | LINE | L2 | chr11: 57095345-57095535 | + | 170 | 191 | SSRP1 | Proximal | 0 | Not documented | 1525 |
| FLAM_C_dup13339 | Uniquely | No | — | — | SINE | Alu | chr11: 57509798-57509901 | + | 70 | 104 | C11orf31 | Proximal | 0 | Not documented | 26 |
| L1MEf_dup9441 | Multi | No | — | — | LINE | Other L1 | chr11: 57561511-57561552 | + | 65 | 42 | CTNND1 | Proximal | 0 | Not documented | 27 |
| L1PA2_dup3688 | Multi | No | — | — | LINE | L1PA\|B\|x | chr11: 57819104-57820079 | + | 5.9 | 976 | OR9Q1 | Proximal | 0 | Not documented | 28 |
| L1MEc_dup13024 | Uniquely | No | — | — | LINE | Other L1 | chr11: 58876187-58877073 | − | 120 | 887 | FAM111B | Proximal | 0 | Not documented | 29 |
| AluSx3_dup18160 | Multi/ | No | — | — | SINE | Alu | chr11: 58921177-58921484 | − | 49 | 308 | FAM111A | Proximal | 0 | Not documented | 30 |
| | Uniquely | | | | | | | | | | | | | | |
| L2a_dup113751 | Multi | No | — | — | LINE | L2 | chr11: 60618421-60618620 | − | 110 | 200 | PTGDR2 | Proximal | 0 | Not documented | 31 |
| MIRc_dup68944 | Uniquely | No | — | — | SINE | MIR | chr11: 61101332-61101425 | − | 92 | 94 | DAK | Proximal | 0 | Not documented | 32 |
| MIRb_dup148829 | Uniquely | No | — | — | SINE | MIR | chr11: 61101558-61101717 | + | 120 | 160 | DAK | Proximal | 0 | Not documented | 33 |
| MLT2B4_dup3263 | Uniquely | No | — | — | LTR | ERVL | chr11: 61240184-61240660 | + | 100 | 477 | RP11-286N22.8 | Proximal | 0 | Not documented | 34 |
| AluJb_dup87239 | Multi | No | — | — | SINE | Alu | chr11: 61240661-61240952 | − | 62 | 292 | RP11-286N22.8 | Proximal | 0 | Not documented | 35 |
| AluJb_dup87248 | Multi | No | — | — | SINE | Alu | chr11: 61567660-61567831 | − | 79 | 172 | FADS1 | Proximal | 0 | Not documented | 36 |
| AluSx_dup85555 | Multi | No | — | — | SINE | Alu | chr11: 61569355-61569516 | − | 34 | 162 | FADS1 | Proximal | 0 | Not documented | 37 |
| AluJb_dup87297 | Multi | No | — | — | SINE | Alu | chr11: 62159947-62160070 | + | 70 | 124 | ASRGL1 | Proximal | 0 | Not documented | 38 |
| MER5A_dup23652 | Multi | No | — | — | DNA | DNA | chr11: 62529937-62530088 | + | 120 | 152 | POLR2G | Proximal | 0 | Not documented | 39 |
| FLAM_C_dup13394 | Multi | No | — | — | SINE | Alu | chr11: 62557910-62558035 | − | 61 | 126 | TMEM223 | Proximal | 0 | Not documented | 40 |
| FLAM_C_dup13397 | Multi | No | — | — | SINE | Alu | chr11: 62619795-62619921 | + | 130 | 127 | SLC3A2 | Distal | 3598 | Not documented | 41 |
| AluSx3_dup18229 | Multi/ | No | — | — | SINE | Alu | chr11: 62649961-62650190 | − | 61 | 230 | SLC3A2 | Proximal | 0 | Not documented | 42 |
| | Uniquely | | | | | | | | | | | | | | |
| MIRb_dup148996 | Multi/ | No | — | — | SINE | MIR | chr11: 62651471-62651595 | + | 140 | 125 | SLC3A2 | Proximal | 0 | Not documented | 43 |
| | Uniquely | | | | | | | | | | | | | | |
| MER5A_dup23660 | Multi | No | — | — | DNA | DNA | chr11: 63392427-63392560 | + | 120 | 134 | ATL3 | Proximal | 0 | Not documented | 44 |
| AluSg_dup25440 | Multi | No | — | — | SINE | Alu | chr11: 63393187-63393472 | + | 59 | 286 | ATL3 | Proximal | 0 | Not documented | 45 |
| AluSx_dup85771 | Multi | No | — | — | SINE | Alu | chr11: 63393571-63393872 | + | 50 | 302 | ATL3 | Proximal | 0 | Not documented | 46 |
| MIR3_dup61368 | Multi/ | No | — | — | SINE | MIR | chr11: 63992557-63992647 | + | 98 | 91 | TRPT1 | Proximal | 0 | Not documented | 47 |
| | Uniquely | | | | | | | | | | | | | | |
| MIR3_dup61369 | Multi | No | — | — | SINE | MIR | chr11: 63993408-63993586 | − | 160 | 179 | TRPT1 | Proximal | 0 | Not documented | 48 |
| L2a_dup113953 | Multi | No | — | — | LINE | L2 | chr11: 64015359-64015491 | + | 150 | 133 | PPP1R14B | Proximal | 947 | Not documented | 49 |
| L2a_dup113954 | Multi | No | — | — | LINE | L2 | chr11: 64015529-64015612 | + | 110 | 84 | PPP1R14B | Proximal | 1117 | Not documented | 1550 |
| MIR_dup116121 | Multi/ | No | — | — | SINE | MIR | chr11: 64089073-64089204 | + | 130 | 132 | PRDX5 | Proximal | 0 | Not documented | 51 |
| | Uniquely | | | | | | | | | | | | | | |
| AluSc_dup21334 | Multi | No | — | — | SINE | Alu | chr11: 6413717-6414021 | − | 45 | 305 | SMPD1 | Proximal | 0 | Not documented | 52 |
| MIRc_dup69098 | Multi | No | — | — | SINE | MIR | chr11: 64574823-64575036 | − | 120 | 214 | MEN1 | Proximal | 0 | Not documented | 53 |
| AluSx1_dup66595 | Multi | No | — | — | SINE | Alu | chr11: 64893610-64893905 | − | 54 | 296 | MRPL49 | Proximal | 0 | Not documented | 54 |
| MIRc_dup69129 | Multi | No | — | — | SINE | MIR | chr11: 64894508-64894589 | + | 140 | 82 | MRPL49 | Proximal | 0 | Not documented | 55 |
| MIRb_dup143100 | Multi | No | — | — | SINE | MIR | chr11: 6503807-6503898 | − | 120 | 92 | TIMM10B | Proximal | 0 | Not documented | 56 |
| AluSx3_dup17768 | Multi | No | — | — | SINE | Alu | chr11: 6505320-6505621 | − | 36 | 302 | TIMM10B | Proximal | 0 | Not documented | 57 |
| L3_dup31302 | Multi | No | — | — | LINE | CR1 | chr11: 65422118-65422194 | − | 140 | 77 | RELA | Proximal | 0 | Not documented | 58 |
| MIRc_dup69158 | Multi | No | — | — | SINE | MIR | chr11: 65485534-65485590 | − | 140 | 57 | RNASEH2C | Proximal | 0 | Not documented | 59 |
| MIR_dup116219 | Multi/ | No | — | — | SINE | MIR | chr11: 65485903-65486002 | − | 130 | 100 | RNASEH2C | Proximal | 0 | Not documented | 60 |
| | Uniquely | | | | | | | | | | | | | | |
| MIRc_dup69163 | Multi | No | — | — | SINE | MIR | chr11: 65633864-65634031 | − | 140 | 168 | MUS81 | Proximal | 0 | Not documented | 61 |
| MIRc_dup69201 | Multi | No | — | — | SINE | MIR | chr11: 66113183-66113425 | − | 100 | 243 | B3GNT1 | Proximal | 0 | Not documented | 62 |
| AluJo_dup43748 | Multi | No | — | — | SINE | Alu | chr11: 66435170-66435467 | − | 53 | 298 | RBM4B | Proximal | 0 | Not documented | 63 |
| MIRc_dup69287 | Multi | No | — | — | SINE | MIR | chr11: 67275340-67275405 | − | 140 | 66 | CDK2AP2 | Proximal | 0 | Not documented | 64 |
| MIRb_dup149455 | Multi/ | No | — | — | SINE | MIR | chr11: 67375179-67375414 | + | 140 | 236 | NDUFV1 | Proximal | 0 | Not documented | 65 |
| | Uniquely | | | | | | | | | | | | | | |
| AluSz_dup59979 | Multi | No | — | — | SINE | Alu | chr11: 67375416-67375709 | + | 45 | 294 | NDUFV1 | Proximal | 0 | Not documented | 66 |
| MIRc_dup69305 | Multi | No | — | — | SINE | MIR | chr11: 67947582-67947681 | + | 82 | 100 | SUV420H1 | Proximal | 0 | Not documented | 67 |
| MIR_dup116581 | Multi | No | — | — | SINE | MIR | chr11: 70052964-70053034 | − | 120 | 71 | FADD | Proximal | 0 | Not documented | 68 |
| MIRb_dup149679 | Multi | No | — | — | SINE | MIR | chr11: 70053235-70053313 | + | 130 | 79 | FADD | Proximal | 0 | Not documented | 69 |
| L2a_dup114370 | Uniquely | No | — | — | LINE | L2 | chr11: 71159836-71159950 | − | 150 | 115 | DHCR7 | Proximal | 0 | Not documented | 70 |
| MIRb_dup149789 | Multi | No | — | — | SINE | MIR | chr11: 71822444-71822628 | + | 84 | 185 | ANAPC15 | Proximal | 0 | Not documented | 71 |
| L2b_dup63972 | Multi/ | No | — | — | LINE | L2 | chr11: 73586367-73586684 | − | 140 | 318 | COA4 | Proximal | 0 | Not documented | 72 |
| | Uniquely | | | | | | | | | | | | | | |
| L2b_dup63973 | Multi | No | — | — | LINE | L2 | chr11: 73586790-73586877 | − | 120 | 88 | COA4 | Proximal | 0 | Not documented | 73 |
| MIRb_dup150047 | Multi | No | — | — | SINE | MIR | chr11: 73586901-73587013 | + | 130 | 113 | COA4 | Proximal | 0 | Not documented | 74 |
| AluJb_dup88443 | Multi | No | — | — | SINE | Alu | chr11: 73587029-73587198 | + | 67 | 170 | COA4 | Proximal | 0 | Not documented | 1575 |
| L1MB7_dup15187 | Uniquely | No | — | — | LINE | Other L1 | chr11: 73823457-73824440 | + | 71 | 984 | C2CD3 | Proximal | 0 | Not documented | 76 |
| SVA_B_dup314 | Multi | No | — | — | Other | SVA | chr11: 74038874-74040191 | + | 22 | 1318 | PGM2L1 | Proximal | 1173 | Not documented | 77 |
| AluSp_dup30468 | Multi | No | — | — | SINE | Alu | chr11: 74042309-74042606 | − | 40 | 298 | PGM2L1 | Proximal | 0 | Not documented | 78 |
| AluJr4_dup11376 | Multi | No | — | — | SINE | Alu | chr11: 74045953-74046112 | − | 85 | 160 | PGM2L1 | Proximal | 0 | Not documented | 79 |
| AluSg4_dup4616 | Multi/ | No | — | — | SINE | Alu | chr11: 74046172-74046464 | − | 40 | 293 | PGM2L1 | Proximal | 0 | Not documented | 80 |
| | Uniquely | | | | | | | | | | | | | | |
| ERVL-E-int_dup6302 | Uniquely | No | — | — | LTR | ERVL | chr11: 74625680-74626730 | + | 140 | 1051 | XRRA1 | Proximal | 0 | Not documented | 81 |
| AluSp_dup30502 | Multi/ | No | — | — | SINE | Alu | chr11: 76152396-76152689 | − | 35 | 294 | C11orf30 | Distal | 3279 | Not documented | 82 |
| | Uniquely | | | | | | | | | | | | | | |
| MIR3_dup62178 | Multi | No | — | — | SINE | MIR | chr11: 76508215-76508367 | − | 130 | 153 | TSKU | Proximal | 0 | Not documented | 83 |
| MIRc_dup69915 | Multi/ | No | — | — | SINE | MIR | chr11: 76508498-76508558 | + | 120 | 61 | TSKU | Proximal | 0 | Not documented | 84 |
| | Uniquely | | | | | | | | | | | | | | |
| L1MB5_dup5814 | Multi | No | — | — | LINE | Other L1 | chr11: 767069-767261 | − | 160 | 193 | PDDC1 | Proximal | 0 | Not documented | 85 |
| MIR3_dup62200 | Multi | No | — | — | SINE | MIR | chr11: 76834979-76835082 | + | 96 | 104 | CAPN5 | Proximal | 0 | Not documented | 86 |
| MIRc_dup69940 | Multi | No | — | — | SINE | MIR | chr11: 76836455-76836593 | + | 130 | 139 | CAPN5 | Proximal | 0 | Not documented | 87 |
| MER58A_dup8914 | Uniquely | No | — | — | DNA | DNA | chr11: 77780600-77780793 | − | 80 | 194 | NDUFC2 | Proximal | 0 | Not documented | 88 |
| L1PA14_dup2387 | Uniquely | No | — | — | LINE | L1PA\|B\|x | chr11: 81236135-81240092 | − | 55 | 3958 | FAM181B | Distal | 1202962 | Not documented | 89 |
| LTR10C_dup316 | Uniquely | No | — | — | LTR | ERV1 | chr11: 8160095-8160673 | + | 26 | 579 | RIC3 | Proximal | 0 | Not documented | 90 |
| MIRc_dup66747 | Multi/ | No | — | — | SINE | MIR | chr11: 8161238-8161463 | + | 150 | 226 | RIC3 | Proximal | 0 | Not documented | 91 |
| | Uniquely | | | | | | | | | | | | | | |
| L2a_dup109989 | Multi | No | — | — | LINE | L2 | chr11: 838654-838835 | + | 110 | 182 | POLR2L | Proximal | 0 | Not documented | 92 |
| AluJb_dup84931 | Multi/ | No | — | — | SINE | Alu | chr11: 839635-839943 | − | 85 | 309 | POLR2L | Proximal | 0 | Not documented | 93 |
| | Uniquely | | | | | | | | | | | | | | |
| L2c_dup98028 | Uniquely | No | — | — | LINE | L2 | chr11: 84531301-84531969 | + | 180 | 669 | DLG2 | Proximal | 0 | Not documented | 94 |
| L1MA3_dup6592 | Uniquely | No | — | — | LINE | Other L1 | chr11: 84851489-84857266 | − | 73 | 5778 | DLG2 | Proximal | 0 | Not documented | 95 |
| L2a_dup115428 | Uniquely | No | — | — | LINE | L2 | chr11: 85292746-85293499 | − | 140 | 754 | DLG2 | Proximal | 0 | Not documented | 96 |
| AluY_dup73084 | Multi | No | — | — | SINE | Alu | chr11: 8941175-8941483 | − | 32 | 309 | AKIP1 | Proximal | 0 | Not documented | 97 |
| AluSg_dup24811 | Multi | No | — | — | SINE | Alu | chr11: 9246127-9246423 | + | 35 | 297 | DENND5A | Proximal | 0 | Not documented | 98 |
| L2_dup39717 | Multi | No | — | — | LINE | L2 | chr11: 92914867-92914932 | + | 160 | 66 | SLC36A4 | Proximal | 0 | Not documented | 99 |
| AluSx_dup83724 | Multi | No | — | — | SINE | Alu | chr11: 9303643-9303940 | + | 47 | 298 | TMEM41B | Proximal | 0 | Not documented | 1600 |
| AluY_dup73113 | Multi/ | No | — | — | SINE | Alu | chr11: 9304199-9304508 | + | 22 | 310 | TMEM41B | Proximal | 0 | Not documented | 1 |
| | Uniquely | | | | | | | | | | | | | | |
| FLAM_C_dup13709 | Multi | No | — | — | SINE | Alu | chr11: 93494954-93495090 | + | 66 | 137 | C11orf54 | Proximal | 0 | Not documented | 2 |
| L2c_dup98856 | Multi | No | — | — | LINE | L2 | chr11: 94865486-94865733 | − | 170 | 248 | ENDOD1 | Proximal | 0 | Not documented | 3 |
| MIRc_dup71166 | Uniquely | No | — | — | SINE | MIR | chr11: 95555230-95555381 | + | 140 | 152 | CEP57 | Proximal | 0 | Not documented | 4 |
| Tigger2_dup1971 | Multi | No | — | — | DNA | DNA | chr11: 95556478-95557246 | + | 56 | 769 | CEP57 | Proximal | 0 | Not documented | 5 |
| L3_dup30415 | Multi/ | No | — | — | LINE | CR1 | chr11: 9597763-9597850 | + | 130 | 88 | WEE1 | Proximal | 0 | Not documented | 6 |
| | Uniquely | | | | | | | | | | | | | | |
| MARNA_dup2354 | Multi | No | — | — | DNA | DNA | chr11: 96119014-96119517 | + | 140 | 504 | CCDC82 | Proximal | 0 | Not documented | 7 |
| MIRc_dup71194 | Multi | No | — | — | SINE | MIR | chr11: 96120573-96120764 | − | 130 | 192 | CCDC82 | Proximal | 0 | Not documented | 8 |
| MER1B_dup4028 | Uniquely | No | — | — | DNA | DNA | chr12: 100672878-100673221 | − | 63 | 344 | SCYL2 | Proximal | 0 | Not documented | 9 |
| L1MEc_dup14153 | Uniquely | No | — | — | LINE | Other L1 | chr12: 100673225-100674003 | − | 140 | 779 | SCYL2 | Proximal | 0 | Not documented | 10 |
| MIRc_dup76557 | Multi | No | — | — | SINE | MIR | chr12: 101788613-101788846 | + | 130 | 234 | ARL1 | Proximal | 0 | Not documented | 11 |
| LTR16A_dup5291 | Multi | No | — | — | LTR | ERVL | chr12: 104166310-104166728 | − | 120 | 419 | NT5DC3 | Proximal | 0 | Not documented | 12 |
| MER58A_dup9502 | Multi | No | — | — | DNA | DNA | chr12: 104166965-104167147 | + | 110 | 183 | NT5DC3 | Proximal | 0 | Not documented | 13 |
| AluSq2_dup37099 | Multi | No | — | — | SINE | Alu | chr12: 104168178-104168490 | + | 42 | 313 | NT5DC3 | Proximal | 0 | Not documented | 14 |
| AluSp_dup32994 | Uniquely | No | — | — | SINE | Alu | chr12: 104170052-104170363 | + | 51 | 312 | NT5DC3 | Proximal | 0 | Not documented | 15 |
| AluSx1_dup72421 | Uniquely | No | — | — | SINE | Alu | chr12: 104338334-104338631 | − | 46 | 298 | HSP90B1 | Proximal | 0 | Not documented | 16 |
| L1MA9_dup12867 | Multi | No | — | — | LINE | Other L1 | chr12: 104423654-104424509 | + | 60 | 856 | GLT8D2 | Proximal | 0 | Not documented | 17 |
| AluSc_dup23805 | Multi | No | — | — | SINE | Alu | chr12: 104658750-104659047 | + | 44 | 298 | TXNRD1 | Proximal | 0 | Not documented | 18 |
| AluSz_dup65230 | Uniquely | No | — | — | SINE | Alu | chr12: 104716153-104716457 | − | 58 | 305 | TXNRD1 | Proximal | 0 | Not documented | 19 |
| HAL1_dup20319 | Uniquely | No | — | — | LINE | Other L1 | chr12: 105257240-105259524 | − | 120 | 2285 | SLC41A2 | Proximal | 0 | Not documented | 20 |
| MLT1K_dup12346 | Multi | No | — | — | LTR | ERVL- | chr12: 105666738-105667134 | − | 150 | 397 | C12orf75 | Proximal | 0 | Not documented | 21 |
| | | | | | | MaLR | | | | | | | | | |
| L1ME3_dup6606 | Uniquely | No | — | — | LINE | Other L1 | chr12: 107003473-107003901 | − | 100 | 429 | RFX4 | Proximal | 0 | Not documented | 22 |
| L2b_dup70419 | Multi/ | No | — | — | LINE | L2 | chr12: 107076338-107076565 | − | 140 | 228 | RFX4 | Proximal | 0 | Not documented | 23 |
| | Uniquely | | | | | | | | | | | | | | |
| MER103C_dup6896 | Multi/ | No | — | — | DNA | DNA | chr12: 107076673-107076848 | + | 87 | 176 | RFX4 | Proximal | 0 | Not documented | 24 |
| | Uniquely | | | | | | | | | | | | | | |
| MARNA_dup2556 | Multi/ | No | — | — | DNA | DNA | chr12: 107077010-107077252 | − | 130 | 243 | RFX4 | Proximal | 0 | Not documented | 1625 |
| | Uniquely | | | | | | | | | | | | | | |
| L2b_dup70427 | Uniquely | No | — | — | LINE | L2 | chr12: 107107179-107107377 | − | 150 | 199 | RFX4 | Proximal | 0 | Not documented | 26 |
| AluSq_dup14429 | Multi/ | No | — | — | SINE | Alu | chr12: 107107564-107107869 | + | 50 | 306 | RFX4 | Proximal | 0 | Not documented | 27 |
| | Uniquely | | | | | | | | | | | | | | |
| MIRb_dup165099 | Uniquely | No | — | — | SINE | MIR | chr12: 107110509-107110706 | − | 120 | 198 | RFX4 | Proximal | 0 | Not documented | 28 |
| L2c_dup107623 | Multi | No | — | — | LINE | L2 | chr12: 107131046-107131265 | − | 160 | 220 | RFX4 | Proximal | 0 | Not documented | 29 |
| Tigger16b_dup854 | Uniquely | No | — | — | DNA | DNA | chr12: 107280333-107280612 | − | 110 | 280 | RIC8B | Proximal | 0 | Not documented | 30 |
| L2b_dup70440 | Multi | No | — | — | LINE | L2 | chr12: 107378701-107378929 | + | 120 | 229 | MTERFD3 | Proximal | 0 | Not documented | 31 |
| L2b_dup70441 | Multi/ | No | — | — | LINE | L2 | chr12: 107378979-107379185 | + | 160 | 207 | MTERFD3 | Proximal | 0 | Not documented | 32 |
| | Uniquely | | | | | | | | | | | | | | |
| L1PA11_dup3320 | Uniquely | No | — | — | LINE | L1PA\|B\|x | chr12: 107389924-107390451 | − | 43 | 528 | CRY1 | Proximal | 0 | Not documented | 33 |
| AluSg4_dup4959 | Uniquely | No | — | — | SINE | Alu | chr12: 107397586-107397882 | − | 41 | 297 | CRY1 | Proximal | 0 | Not documented | 34 |
| MIRb_dup165145 | Multi | No | — | — | SINE | MIR | chr12: 107398871-107398908 | − | 130 | 38 | CRY1 | Proximal | 0 | Not documented | 35 |
| L2b_dup70496 | Multi | No | — | — | LINE | L2 | chr12: 108106568-108106645 | − | 140 | 78 | PWP1 | Proximal | 0 | Not documented | 36 |
| Charlie1b_dup2217 | Multi | No | — | — | DNA | DNA | chr12: 10863181-10863614 | + | 84 | 434 | YBX3 | Proximal | 0 | Not documented | 37 |
| MIR_dup128295 | Uniquely | No | — | — | SINE | MIR | chr12: 109898315-109898398 | − | 120 | 84 | KCTD10 | Proximal | 0 | Not documented | 38 |
| MamRep4096_dup891 | Uniquely | No | — | — | DNA | DNA | chr12: 110010544-110010912 | + | 140 | 369 | MMAB | Proximal | 0 | Not documented | 39 |
| AluSq2_dup37211 | Multi | No | — | — | SINE | Alu | chr12: 110289656-110289953 | − | 34 | 298 | GLTP | Proximal | 0 | Not documented | 40 |
| HAL1_dup20347 | Uniquely | No | — | — | LINE | Other L1 | chr12: 110641676-110641756 | + | 95 | 81 | IFT81 | Proximal | 0 | Not documented | 41 |
| L1PA7_dup10665 | Uniquely | No | — | — | LINE | L1PA\|B\|x | chr12: 111066901-111068042 | + | 29 | 1142 | TCTN1 | Proximal | 0 | Not documented | 42 |
| L1MEg2_dup561 | Multi | No | — | — | LINE | Other L1 | chr12: 11126262-11126434 | + | 140 | 173 | TAS2R14 | Proximal | 0 | Not documented | 43 |
| AluSx3_dup18982 | Uniquely | No | — | — | SINE | Alu | chr12: 11148652-11148946 | + | 65 | 295 | TAS2R14 | Proximal | 0 | Not documented | 44 |
| L1MA2_dup5751 | Uniquely | No | — | — | LINE | Other L1 | chr12: 11193318-11195219 | + | 60 | 1902 | TAS2R14 | Proximal | 0 | Not documented | 45 |
| MLT1G_dup2015 | Multi | No | — | — | LTR | ERVL- | chr12: 11199582-11199743 | + | 130 | 162 | TAS2R14 | Proximal | 0 | Not documented | 46 |
| | | | | | | MaLR | | | | | | | | | |
| MLT1J1_dup3724 | Multi | No | — | — | LTR | ERVL- | chr12: 112277524-112277914 | − | 130 | 391 | MAPKAPK5 | Proximal | 1869 | Not documented | 47 |
| | | | | | | MaLR | | | | | | | | | |
| AluJb_dup96790 | Multi | No | — | — | SINE | Alu | chr12: 112278168-112278449 | + | 65 | 282 | MAPKAPK5 | Proximal | 1334 | Not documented | 48 |
| L2a_dup126688 | Multi | No | — | — | LINE | L2 | chr12: 112278878-112279301 | + | 150 | 424 | MAPKAPK5 | Proximal | 482 | Not documented | 49 |
| MIRb_dup166039 | Multi | No | — | — | SINE | MIR | chr12: 112279376-112279535 | + | 140 | 160 | MAPKAPK5 | Proximal | 248 | Not documented | 1650 |
| 7SK_dup566 | Multi | No | — | — | Other | Other | chr12: 112704881-112705119 | + | 13 | 239 | HECTD4 | Proximal | 0 | Not documented | 51 |
| | | | | | | Repeats | | | | | | | | | |
| L2b_dup70870 | Multi | No | — | — | LINE | L2 | chr12: 113596575-113596633 | + | 69 | 59 | CCDC42B | Proximal | 0 | Not documented | 52 |
| MIRb_dup166224 | Uniquely | No | — | — | SINE | MIR | chr12: 113623932-113624117 | + | 120 | 186 | C12orf52 | Proximal | 0 | Not documented | 53 |
| L2c_dup108198 | Multi | No | — | — | LINE | L2 | chr12: 116623807-116624080 | + | 160 | 274 | MED13L | Proximal | 0 | Not documented | 54 |
| MIRc_dup77383 | Multi | No | — | — | SINE | MIR | chr12: 116624328-116624526 | − | 160 | 199 | MED13L | Proximal | 0 | Not documented | 55 |
| MIR_dup129212 | Multi/ | No | — | — | SINE | MIR | chr12: 116625004-116625221 | + | 120 | 218 | MED13L | Proximal | 0 | Not documented | 56 |
| | Uniquely | | | | | | | | | | | | | | |
| L2b_dup71095 | Uniquely | No | — | — | LINE | L2 | chr12: 116973864-116974045 | + | 110 | 182 | MAP1LC3B2 | Distal | 23142 | Not documented | 57 |
| L1M5_dup47404 | Multi | No | — | — | LINE | Other L1 | chr12: 117151132-117151574 | + | 130 | 443 | C12orf49 | Distal | 2020 | Not documented | 58 |
| AluSx1_dup73329 | Multi | No | — | — | SINE | Alu | chr12: 118820472-118820772 | − | 39 | 301 | SUDS3 | Proximal | 0 | Not documented | 59 |
| MIR3_dup67984 | Multi/ | No | — | — | SINE | MIR | chr12: 119617028-119617109 | + | 110 | 82 | HSPB8 | Proximal | 0 | Not documented | 60 |
| | Uniquely | | | | | | | | | | | | | | |
| MamRep564_dup597 | Multi/ | No | — | — | Other | Other | chr12: 119631778-119631842 | − | 130 | 65 | HSPB8 | Proximal | 0 | Not documented | 61 |
| | Uniquely | | | | | Repeats | | | | | | | | | |
| MamRep564_dup598 | Multi/ | No | — | — | Other | Other | chr12: 119631882-119631971 | − | 100 | 90 | HSPB8 | Proximal | 0 | Not documented | 62 |
| | Uniquely | | | | | Repeats | | | | | | | | | |
| AluJr_dup52535 | Multi/ | No | — | — | SINE | Alu | chr12: 120898906-120899192 | − | 70 | 287 | GATC | Proximal | 0 | Not documented | 63 |
| | Uniquely | | | | | | | | | | | | | | |
| MIRb_dup167632 | Multi | No | — | — | SINE | MIR | chr12: 120903343-120903410 | − | 110 | 68 | SRSF9 | Proximal | 0 | Not documented | 64 |
| MIRb_dup167634 | Uniquely | No | — | — | SINE | MIR | chr12: 120928682-120928940 | − | 130 | 259 | DYNLL1 | Proximal | 0 | Not documented | 65 |
| AluJb_dup97955 | Multi/ | No | — | — | SINE | Alu | chr12: 123078172-123078440 | − | 61 | 269 | KNTC1 | Proximal | 0 | Not documented | 66 |
| | Uniquely | | | | | | | | | | | | | | |
| AluSg_dup28202 | Multi | No | — | — | SINE | Alu | chr12: 123254063-123254351 | − | 36 | 289 | DENR | Proximal | 0 | Not documented | 67 |
| L1ME4a_dup32344 | Multi | No | — | — | LINE | Other L1 | chr12: 123254604-123254939 | + | 120 | 336 | DENR | Proximal | 0 | Not documented | 68 |
| AluSx1_dup73843 | Uniquely | No | — | — | SINE | Alu | chr12: 123741773-123742088 | + | 26 | 316 | C12orf65 | Proximal | 0 | Not documented | 69 |
| AluSz6_dup31686 | Multi | No | — | — | SINE | Alu | chr12: 123777769-123777909 | − | 45 | 141 | SBNO1 | Proximal | 0 | Not documented | 70 |
| AluSz_dup66682 | Uniquely | No | — | — | SINE | Alu | chr12: 123955608-123955918 | − | 54 | 311 | SNRNP35 | Proximal | 0 | Not documented | 71 |
| L4_dup13074 | Multi | No | — | — | LINE | RTE | chr12: 124102402-124102457 | − | 110 | 56 | DDX55 | Proximal | 0 | Not documented | 72 |
| AluSq2_dup37685 | Uniquely | No | — | — | SINE | Alu | chr12: 124180394-124180690 | − | 49 | 297 | TCTN2 | Proximal | 0 | Not documented | 73 |
| L1MC4a_dup20035 | Uniquely | No | — | — | LINE | Other L1 | chr12: 124416809-124417767 | − | 140 | 959 | DNAH10OS | Proximal | 0 | Not documented | 74 |
| MIR3_dup68136 | Multi/ | Nc | — | — | SINE | MIR | chr12: 124499406-124499534 | + | 120 | 129 | ZNF664 | Proximal | 0 | Not documented | 1675 |
| | Uniquely | | | | | | | | | | | | | | |
| MIR3_dup68137 | Multi/ | No | — | — | SINE | MIR | chr12: 124499624-124499809 | + | 120 | 186 | ZNF664 | Proximal | 0 | Not documented | 76 |
| | Uniquely | | | | | | | | | | | | | | |
| MLT1B_dup13443 | Multi | No | — | — | LTR | ERVL- | chr12: 127908982-127909380 | + | 95 | 399 | TMEM132C | Distal | 842569 | Not documented | 77 |
| | | | | | | MaLR | | | | | | | | | |
| AluSx3_dup20231 | Multi | No | — | — | SINE | Alu | chr12: 131275791-131276086 | + | 37 | 296 | STX2 | Proximal | 0 | Not documented | 78 |
| AluSq2_dup35616 | Multi | No | — | — | SINE | Alu | chr12: 13234884-13235197 | − | 35 | 314 | KIAA1467 | Proximal | 0 | Not documented | 79 |
| AluSg_dup28350 | Multi | No | — | — | SINE | Alu | chr12: 133298830-133299133 | − | 35 | 304 | PGAM5 | Proximal | 0 | Not documented | 80 |
| L1MEc_dup14329 | Uniquely | No | — | — | LINE | Other L1 | chr12: 133500813-133501403 | − | 130 | 591 | ZNF605 | Proximal | 0 | Not documented | 81 |
| AluSx1_dup69539 | Multi/ | No | — | — | SINE | Alu | chr12: 13350428-13350738 | + | 54 | 311 | EMP1 | Proximal | 0 | Not documented | 82 |
| | Uniquely | | | | | | | | | | | | | | |
| Plat_L3_dup2748 | Uniquely | No | — | — | LINE | CR1 | chr12: 13352500-13352640 | − | 160 | 141 | EMP1 | Proximal | 0 | Not documented | 83 |
| MIR3_dup65091 | Multi/ | No | — | — | SINE | MIR | chr12: 13354015-13354071 | + | 120 | 57 | EMP1 | Proximal | 0 | Not documented | 84 |
| | Uniquely | | | | | | | | | | | | | | |
| AluJo_dup45726 | Multi/ | No | — | — | SINE | Alu | chr12: 13354083-13354364 | + | 73 | 282 | EMP1 | Proximal | 0 | Not documented | 85 |
| | Uniquely | | | | | | | | | | | | | | |
| MIRb_dup158425 | Multi/ | No | — | — | SINE | MIR | chr12: 13362499-13362646 | − | 150 | 148 | EMP1 | Proximal | 0 | Not documented | 86 |
| | Uniquely | | | | | | | | | | | | | | |
| AmnSINE1_dup795 | Multi | No | — | — | SINE | Deu | chr12: 13368777-13368814 | + | 60 | 38 | EMP1 | Proximal | 0 | Not documented | 87 |
| MER135_dup648 | Multi/ | No | — | — | DNA | DNA | chr12: 13369826-13369896 | + | 110 | 71 | EMP1 | Proximal | 119 | Not documented | 88 |
| | Uniquely | | | | | | | | | | | | | | |
| THE1D-int_dup1482 | Uniquely | No | — | — | LTR | ERVL- | chr12: 13372244-13372493 | − | 51 | 250 | EMP1 | Distal | 2537 | Not documented | 89 |
| | | | | | | MaLR | | | | | | | | | |
| MER115_dup1883 | Uniquely | No | — | — | DNA | DNA | chr12: 13374756-13375390 | − | 140 | 635 | EMP1 | Distal | 5049 | Not documented | 90 |
| MER131_dup337 | Multi | No | — | — | SINE | SINE | chr12: 16703494-16703570 | − | 96 | 77 | LMO3 | Proximal | 0 | Not documented | 91 |
| L2a_dup119993 | Multi | No | — | — | LINE | L2 | chr12: 19349952-19350213 | + | 160 | 262 | PLEKHA5 | Proximal | 0 | Not documented | 92 |
| L1PA8_dup6066 | Multi | No | — | — | LINE | L1PA\|B\|x | chr12: 20229577-20230192 | + | 37 | 616 | PDE3A | Distal | 291988 | Not documented | 93 |
| MER 103C_dup6613 | Multi | No | — | — | DNA | DNA | chr12: 20605457-20605532 | + | 100 | 76 | PDE3A | Proximal | 0 | Not documented | 94 |
| HAL1_dup19595 | Multi | No | — | — | LINE | Other L1 | chr12: 20851301-20851441 | − | 110 | 141 | SLCO1C1 | Proximal | 0 | Not documented | 95 |
| MER4-int_dup2181 | Uniquely | No | — | — | LTR | ERV1 | chr12: 22456823-22458313 | + | 52 | 1491 | ST8SIA1 | Proximal | 0 | Not documented | 96 |
| MER44B_dup1546 | Uniquely | No | — | — | DNA | DNA | chr12: 22478526-22479065 | − | 83 | 540 | ST8SIA1 | Proximal | 0 | Not documented | 97 |
| MSTB_dup6150 | Multi | No | — | — | LTR | ERVL- | chr12: 26108009-26108382 | − | 85 | 374 | RASSF8 | Distal | 3581 | Not documented | 98 |
| | | | | | | MaLR | | | | | | | | | |
| L2c_dup103135 | Uniquely | No | — | — | LINE | L2 | chr12: 26123407-26123563 | + | 150 | 157 | RASSF8 | Proximal | 0 | Not documented | 99 |
| L1MB8_dup11706 | Uniquely | No | — | — | LINE | Other L1 | chr12: 26174357-26175667 | + | 89 | 1311 | RASSF8 | Proximal | 0 | Not documented | 1700 |
| L2b_dup67818 | Uniquely | No | — | — | LINE | L2 | chr12: 27952505-27952609 | − | 110 | 105 | KLHL42 | Proximal | 0 | Not documented | 1 |
| AluSz6_dup29891 | Multi | No | — | — | SINE | Alu | chr12: 27953569-27953666 | + | 37 | 98 | KLHL42 | Proximal | 0 | Not documented | 2 |
| MER117_dup3184 | Uniquely | No | — | — | DNA | DNA | chr12: 27954492-27954668 | − | 140 | 177 | KLHL42 | Proximal | 0 | Not documented | 3 |
| AluSx1_dup69130 | Multi | No | — | — | SINE | Alu | chr12: 2997695-2997965 | − | 60 | 271 | RHNO1 | Proximal | 0 | Not documented | 4 |
| AluSp_dup31811 | Uniquely | No | — | — | SINE | Alu | chr12: 32264936-32265239 | − | 46 | 304 | BICD1 | Proximal | 0 | Not documented | 5 |
| L2a_dup118837 | Multi | No | — | — | LINE | L2 | chr12: 385654-385707 | − | 110 | 54 | KDM5A | Distal | 3589 | Not documented | 6 |
| AluSz_dup63200 | Multi | No | — | — | SINE | | chr12: 42835488-42835621 | − | 44 | 134 | PPHLN1 | Proximal | 0 | Not documented | 7 |
| MamRep137_dup1600 | Uniquely | No | — | — | DNA | DNA | chr12: 4406004-4406341 | − | 120 | 338 | CCND2 | Proximal | 0 | Not documented | 8 |
| L2_dup41522 | Multi | No | — | — | LINE | L2 | chr12: 45429782-45429945 | − | 140 | 164 | DBX2 | Proximal | 0 | Not documented | 9 |
| AluJb_dup90884 | Uniquely | No | — | — | SINE | Alu | chr12: 466165-466441 | + | 70 | 277 | KDM5A | Proximal | 0 | Not documented | 10 |
| L1ME4a_dup31047 | Multi | No | — | — | LINE | Other L1 | chr12: 46636903-46637064 | − | 110 | 162 | SLC38A1 | Proximal | 0 | Not documented | 11 |
| L2a_dup121598 | Multi | No | — | — | LINE | L2 | chr12: 46637065-46637114 | + | 64 | 50 | SLC38A1 | Proximal | 0 | Not documented | 12 |
| MIR3_dup65802 | Multi | No | — | — | SINE | MIR | chr12: 48176023-48176161 | − | 130 | 139 | SLC48A1 | Proximal | 0 | Not documented | 13 |
| L2a_dup121723 | Multi/ | No | — | — | LINE | L2 | chr12: 48362213-48362267 | + | 91 | 55 | TMEM106C | Proximal | 0 | Not documented | 14 |
| | Uniquely | | | | | | | | | | | | | | |
| AluSq2_dup36066 | Multi | No | — | — | SINE | Alu | chr12: 48542442-48542746 | − | 40 | 305 | ASB8 | Proximal | 0 | Not documented | 15 |
| AluSq2_dup36106 | Uniquely | No | — | — | SINE | Alu | chr12: 49406150-49406456 | − | 55 | 307 | PRKAG1 | Proximal | 0 | Not documented | 16 |
| AluJo_dup46510 | Multi | No | — | — | SINE | Alu | chr12: 51325532-51325647 | − | 78 | 116 | METTL7A | Proximal | 0 | Not documented | 17 |
| AluJb_dup93598 | Uniquely | No | — | — | SINE | Alu | chr12: 53396894-53397190 | + | 69 | 297 | EIF4B | Distal | 2753 | Not documented | 18 |
| AluSz_dup63665 | Uniquely | No | — | — | SINE | Alu | chr12: 53551923-53552219 | − | 47 | 297 | CSAD | Proximal | 0 | Not documented | 19 |
| L2a_dup122096 | Multi | No | — | — | LINE | L2 | chr12: 54526477-54526632 | − | 140 | 156 | SMUG1 | Distal | 31898 | Not documented | 20 |
| MIR_dup124072 | Multi/ | No | — | — | SINE | MIR | chr12: 54626190-54626307 | − | 42 | 118 | CBX5 | Proximal | 0 | Not documented | 21 |
| | Uniquely | | | | | | | | | | | | | | |
| AluJo_dup46649 | Multi/ | No | — | — | SINE | Alu | chr12: 54627433-54627675 | + | 60 | 243 | CBX5 | Proximal | 0 | Not documented | 22 |
| | Uniquely | | | | | | | | | | | | | | |
| AluSg7_dup5456 | Multi | No | — | — | SINE | Alu | chr12: 54627687-54627990 | + | 36 | 304 | CBX5 | Proximal | 0 | Not documented | 23 |
| AluJr_dup50528 | Multi/ | No | — | — | SINE | Alu | chr12: 54634180-54634310 | − | 52 | 131 | CBX5 | Proximal | 0 | Not documented | 24 |
| | Uniquely | | | | | | | | | | | | | | |
| MIRc_dup75061 | Uniquely | No | — | — | SINE | MIR | chr12: 56114371-56114513 | − | 120 | 143 | RDH5 | Proximal | 0 | Not documented | 1725 |
| HAL1-3A_ME_{—} | Multi | No | — | — | LINE | Other L1 | chr12: 56373947-56374079 | − | 120 | 133 | RAB5B | Proximal | 0 | Not documented | 26 |
| dup1369 | | | | | | | | | | | | | | | |
| MER50-int_dup396 | Multi | No | — | — | LTR | ERV1 | chr12: 56500341-56500448 | − | 110 | 108 | RP11-603J24.9 | Proximal | 0 | Not documented | 27 |
| AluSp_dup32340 | Multi | No | — | — | SINE | Alu | chr12: 56623237-56623548 | + | 41 | 312 | NABP2 | Proximal | 0 | Not documented | 28 |
| L1MB3_dup11739 | Multi | No | — | — | LINE | Other L1 | chr12: 56679965-56680145 | + | 70 | 181 | CS | Proximal | 0 | Not documented | 29 |
| AluJb_dup93880 | Multi | No | — | — | SINE | Alu | chr12: 56706004-56706304 | − | 68 | 301 | CNPY2 | Proximal | 0 | Not documented | 30 |
| AluSp_dup32348 | Uniquely | No | — | — | SINE | Alu | chr12: 56706347-56706653 | − | 34 | 307 | CNPY2 | Proximal | 0 | Not documented | 31 |
| AluSp_dup32352 | Multi | No | — | — | SINE | Alu | chr12: 56735800-56736099 | + | 41 | 300 | STAT2 | Proximal | 0 | Not documented | 32 |
| AluJo_dup46715 | Multi | No | — | — | SINE | Alu | chr12: 56736104-56736385 | + | 61 | 282 | STAT2 | Proximal | 0 | Not documented | 33 |
| AluSx_dup91977 | Multi/ | No | — | — | SINE | Alu | chr12: 58141528-58141824 | − | 43 | 297 | CDK4 | Proximal | 0 | Not documented | 34 |
| | Uniquely | | | | | | | | | | | | | | |
| AluSx_dup91978 | Multi | No | — | — | SINE | Alu | chr12: 58142478-58142788 | − | 42 | 311 | CDK4 | Proximal | 0 | Not documented | 35 |
| AluJr_dup50670 | Uniquely | No | — | — | SINE | Alu | chr12: 58144102-58144361 | + | 79 | 260 | CDK4 | Proximal | 0 | Not documented | 36 |
| AluSg_dup27261 | Multi | No | — | — | SINE | Alu | chr12: 58151156-58151459 | + | 28 | 304 | MARCH9 | Proximal | 0 | Not documented | 37 |
| AluJb_dup94094 | Multi/ | No | — | — | SINE | Alu | chr12: 58174833-58175135 | − | 57 | 303 | METTL21B | Proximal | 0 | Not documented | 38 |
| | Uniquely | | | | | | | | | | | | | | |
| L2c_dup104626 | Multi/ | No | — | — | LINE | L2 | chr12: 58176029-58176167 | + | 110 | 139 | METTL21B | Proximal | 0 | Not documented | 39 |
| | Uniquely | | | | | | | | | | | | | | |
| MIRc_dup75116 | Multi | No | — | — | SINE | MIR | chr12: 58176242-58176341 | + | 120 | 100 | RP11-571M6.15 | Proximal | 0 | Not documented | 40 |
| L2_dup41795 | Uniquely | No | — | — | LINE | L2 | chr12: 58196306-58196695 | + | 170 | 390 | AVIL | Proximal | 0 | Not documented | 41 |
| L1ME1_dup22971 | Uniquely | No | — | — | LINE | Other L1 | chr12: 58197771-58198313 | − | 88 | 543 | AVIL | Proximal | 0 | Not documented | 42 |
| MIRb_dup161150 | Uniquely | No | — | — | SINE | MIR | chr12: 58200484-58200707 | − | 130 | 224 | AVIL | Proximal | 0 | Not documented | 43 |
| L2c_dup104628 | Multi/ | No | — | — | LINE | L2 | chr12: 58210829-58210931 | − | 130 | 103 | AVIL | Proximal | 0 | Not documented | 44 |
| | Uniquely | | | | | | | | | | | | | | |
| AluJb_dup94096 | Multi | No | — | — | SINE | Alu | chr12: 58211799-58212112 | − | 65 | 314 | AVIL | Proximal | 0 | Not documented | 45 |
| AluSg7_dup5483 | Multi/ | No | — | — | SINE | Alu | chr12: 58241206-58241504 | + | 14 | 299 | CTDSP2 | Proximal | 685 | Not documented | 46 |
| | Uniquely | | | | | | | | | | | | | | |
| MLT1K_dup11951 | Multi/ | No | — | — | LTR | ERVL- | chr12: 58325258-58325488 | − | 120 | 231 | XRCC6BP1 | Distal | 9837 | Not documented | 47 |
| | Uniquely | | | | | MaLR | | | | | | | | | |
| L2_dup41797 | Multi/ | No | — | — | LINE | L2 | chr12: 58329239-58329350 | + | 130 | 112 | XRCC6BP1 | Distal | 5975 | Not documented | 48 |
| | Uniquely | | | | | | | | | | | | | | |
| L1PB1_dup10387 | Uniquely | No | — | — | LINE | L1PA\|B\|x | chr12: 58351230-58357709 | + | 42 | 6480 | XRCC6BP1 | Proximal | 179 | EVE annotated | 49 |
| HERVK-int_dup183 | Multi | No | — | — | LTR | ERVK | chr12: 58722210-58729730 | − | 3.6 | 7521 | RP11-362K2.2 | Distal | 208178 | EVE annotated | 1750 |
| MLT1F1_dup2264 | Uniquely | No | — | — | LTR | ERVL- | chr12: 58873116-58873590 | − | 110 | 475 | RP11-362K2.2 | Distal | 64318 | Not documented | 51 |
| | | | | | | MaLR | | | | | | | | | |
| L1MCa_dup5535 | Uniquely | No | — | — | LINE | Other L1 | chr12: 60759417-60761017 | + | 93 | 1601 | SLC16A7 | Distal | 583023 | Not documented | 52 |
| L1MCa_dup5536 | Uniquely | No | — | — | LINE | Other L1 | chr12: 60764521-60766482 | + | 83 | 1962 | SLC16A7 | Distal | 588127 | Not documented | 53 |
| L1PA10_dup5376 | Uniquely | No | — | — | LINE | L1PA\|B\|x | chr12: 60766483-60768294 | + | 84 | 1812 | SLC16A7 | Distal | 590089 | Not documented | 54 |
| L1PA10_dup5377 | Uniquely | No | — | — | LINE | L1PA\|B\|x | chr12: 60768560-60770725 | + | 56 | 2166 | SLC16A7 | Distal | 592166 | Not documented | 55 |
| LTR26_dup449 | Uniquely | No | — | — | LTR | ERV1 | chr12: 60809173-60809756 | + | 73 | 584 | SLC16A7 | Distal | 632779 | Not documented | 56 |
| L1HS_dup1230 | Multi | No | — | — | LINE | L1PA\|B\|x | chr12: 62295058-62295218 | − | 2.7 | 161 | FAM19A2 | Proximal | 0 | Not documented | 57 |
| MLT1D-int_dup503 | Multi/ | No | — | — | LTR | ERVL- | chr12: 64175992-64176963 | − | 110 | 972 | TMEM5 | Proximal | 0 | Not documented | 58 |
| | Uniquely | | | | | MaLR | | | | | | | | | |
| Tigger3b_dup4931 | Multi/ | No | — | — | DNA | DNA | chr12: 64202998-64203287 | + | 64 | 290 | TMEM5 | Proximal | 0 | Not documented | 59 |
| | Uniquely | | | | | | | | | | | | | | |
| FLAM_A_dup11157 | Multi/ | No | — | — | SINE | Alu | chr12: 64537442-64537574 | + | 75 | 133 | SRGAP1 | Proximal | 0 | Not documented | 60 |
| | Uniquely | | | | | | | | | | | | | | |
| Plat_L3_dup2824 | Multi | No | — | — | LINE | CR1 | chr12: 64537952-64538013 | − | 170 | 62 | SRGAP1 | Proximal | 0 | Not documented | 61 |
| Plat_L3_dup2825 | Multi | No | — | — | LINE | CR1 | chr12: 64538035-64538329 | − | 170 | 295 | SRGAP1 | Proximal | 0 | Not documented | 62 |
| AluSx_dup92124 | Multi/ | No | — | — | SINE | Alu | chr12: 64538617-64538910 | − | 39 | 294 | SRGAP1 | Proximal | 0 | Not documented | 63 |
| | Uniquely | | | | | | | | | | | | | | |
| AluSz_dup64099 | Multi | No | — | — | SINE | Alu | chr12: 64842697-64842992 | + | 48 | 296 | XPOT | Proximal | 0 | Not documented | 64 |
| AluJr4_dup12146 | Multi | No | — | — | SINE | Alu | chr12: 64843934-64844224 | − | 75 | 291 | XPOT | Proximal | 0 | Not documented | 65 |
| L2a_dup122684 | Uniquely | No | — | — | LINE | L2 | chr12: 64862307-64862608 | − | 140 | 302 | TBK1 | Proximal | 0 | Not documented | 66 |
| AluSz6_dup30520 | Multi | No | — | — | SINE | Alu | chr12: 64894534-64894837 | − | 42 | 304 | TBK1 | Proximal | 0 | Not documented | 67 |
| AluSx3_dup19537 | Multi | No | — | — | SINE | Alu | chr12: 65109018-65109316 | + | 44 | 299 | GNS | Proximal | 0 | Not documented | 68 |
| MLT1D_dup14096 | Multi | No | — | — | LTR | ERVL- | chr12: 6548497-6548974 | − | 93 | 478 | CD27 | Distal | 5060 | Not documented | 69 |
| | | | | | | MaLR | | | | | | | | | |
| AluJb_dup91226 | Multi/ | No | — | — | SINE | Alu | chr12: 6555977-6556282 | + | 64 | 30€ | CD27 | Proximal | 0 | Not documented | 70 |
| | Uniquely | | | | | | | | | | | | | | |
| AluSc8_dup14064 | Multi | No | — | — | SINE | Alu | chr12: 6557665-6557951 | + | 33 | 287 | CD27 | Proximal | 0 | Not documented | 71 |
| MIRb_dup158063 | Multi | No | — | — | SINE | MIR | chr12: 6602717-6602868 | − | 130 | 152 | MRPL51 | Proximal | 0 | Not documented | 72 |
| L2c_dup102152 | Multi | No | — | — | LINE | L2 | chr12: 6651191-6651264 | + | 100 | 74 | IFFO1 | Proximal | 0 | Not documented | 73 |
| AluSx3_dup19553 | Multi/ | No | — | — | SINE | Alu | chr12: 66516915-66517204 | − | 50 | 290 | LLPH | Proximal | 0 | Not documented | 74 |
| | Uniquely | | | | | | | | | | | | | | |
| MER57B2_dup796 | Uniquely | No | — | — | LTR | ERV1 | chr12: 66562244-66562617 | + | 67 | 374 | TMBIM4 | Proximal | 0 | Not documented | 1775 |
| AluSp_dup31380 | Multi | No | — | — | SINE | Alu | chr12: 6842600-6842912 | − | 46 | 313 | COPS7A | Proximal | 1560 | Not documented | 76 |
| AluSz_dup64256 | Multi | No | — | — | SINE | Alu | chr12: 69234616-69234915 | − | 60 | 300 | MDM2 | Proximal | 0 | Not documented | 77 |
| AluJo_dup47023 | Multi | No | — | — | SINE | Alu | chr12: 69235059-69235179 | − | 45 | 121 | MDM2 | Proximal | 0 | Not documented | 78 |
| L4_dup12746 | Multi/ | No | — | — | LINE | RTE | chr12: 69653917-69653978 | + | 150 | 62 | CPSF6 | Proximal | 0 | Not documented | 79 |
| | Uniquely | | | | | | | | | | | | | | |
| AluSp_dup32570 | Multi/ | No | — | — | SINE | Alu | chr12: 69659379-69659685 | − | 46 | 307 | CPSF6 | Proximal | 0 | Not documented | 80 |
| | Uniquely | | | | | | | | | | | | | | |
| FRAM_dup5482 | Multi | No | — | — | SINE | Alu | chr12: 6991340-6991482 | + | 92 | 143 | SPSB2 | Proximal | 0 | Not documented | 81 |
| L1PA6_dup4723 | Uniquely | No | — | — | LINE | L1PA\|B\|x | chr12: 70576144-70577580 | − | 30 | 1437 | CNOT2 | Distal | 59195 | Not documented | 82 |
| L1MA9_dup12645 | Uniquely | No | — | — | LINE | Other L1 | chr12: 70602424-70604608 | − | 72 | 2185 | CNOT2 | Distal | 32167 | Not documented | 83 |
| AluY_dup80634 | Multi/ | No | — | — | SINE | Alu | chr12: 70655083-70655395 | − | 36 | 313 | CNOT2 | Proximal | 0 | Not documented | 84 |
| | Uniquely | | | | | | | | | | | | | | |
| L1ME1_dup23110 | Multi | No | — | — | LINE | Other L1 | chr12: 70655396-70656047 | − | 85 | 652 | CNOT2 | Proximal | 0 | Not documented | 85 |
| L1ME1_dup23111 | Multi | No | — | — | LINE | Other L1 | chr12: 70656367-70656443 | − | 120 | 77 | CNOT2 | Proximal | 0 | Not documented | 86 |
| AluSx1_dup71499 | Multi | No | — | — | SINE | Alu | chr12: 70656444-70656752 | − | 60 | 309 | CNOT2 | Proximal | 0 | Not documented | 87 |
| L1ME1_dup23112 | Multi | No | — | — | LINE | Other L1 | chr12: 70656753-70658721 | − | 110 | 1969 | CNOT2 | Proximal | 0 | Not documented | 88 |
| AluSg_dup27389 | Multi | No | — | — | SINE | Alu | chr12: 70674865-70675160 | − | 31 | 296 | CNOT2 | Proximal | 0 | Not documented | 89 |
| L2a_dup123233 | Uniquely | No | — | — | LINE | L2 | chr12: 70734966-70735467 | + | 130 | 502 | CNOT2 | Proximal | 0 | Not documented | 90 |
| L3_dup34074 | Multi | No | — | — | LINE | CR1 | chr12: 70748179-70748289 | − | 110 | 111 | CNOT2 | Proximal | 0 | Not documented | 91 |
| AluJb_dup91332 | Multi | No | — | — | SINE | Alu | chr12: 7134869-7135223 | − | 63 | 355 | C15 | Proximal | 0 | Not documented | 92 |
| L1MB7_dup15684 | Multi | No | — | — | LINE | Other L1 | chr12: 7250942-7251509 | + | 78 | 568 | C1RL | Proximal | 0 | Not documented | 93 |
| AluSq2_dup35428 | Multi | No | — | — | SINE | Alu | chr12: 7251510-7251850 | + | 41 | 341 | C1RL | Proximal | 0 | Not documented | 94 |
| MIRc_dup73591 | Multi | No | — | — | SINE | MIR | chr12: 7411392-7411619 | + | 140 | 228 | PEX5 | Distal | 40223 | Not documented | 95 |
| MER4B-int_dup1079 | Multi | No | — | — | LTR | ERV1 | chr12: 7445139-7448128 | + | 54 | 2990 | ACSM4 | Distal | 8753 | Not documented | 96 |
| L2c_dup105959 | Uniquely | No | — | — | LINE | L2 | chr12: 81541147-81541515 | − | 160 | 369 | ACSS3 | Proximal | 0 | Not documented | 97 |
| L1MC1_dup10016 | Multi | No | — | — | LINE | Other L1 | chr12: 81644889-81645325 | + | 91 | 437 | ACSS3 | Proximal | 0 | Not documented | 98 |
| MER102a_dup1873 | Multi | No | — | — | DNA | DNA | chr12: 81649887-81650088 | − | 140 | 202 | ACSS3 | Proximal | 0 | Not documented | 99 |
| L1P4a_dup461 | Uniquely | No | — | — | LINE | L1PA\|B\|x | chr12: 82000001-82005952 | − | 75 | 5952 | PPFIA2 | Proximal | 0 | Not documented | 1800 |
| LTR12C_dup2128 | Uniquely | No | — | — | LTR | ERV1 | chr12: 83122367-83123937 | + | 35 | 1571 | TMTC2 | Proximal | 0 | Not documented | 1 |
| AluSp_dup32751 | Uniquely | No | — | — | SINE | Alu | chr12: 87551832-87552137 | + | 50 | 306 | MGAT4C | Distal | 319152 | Not documented | 2 |
| MER5B_dup18168 | Multi | No | — | — | DNA | DNA | chr12: 88591566-88591729 | + | 110 | 164 | TMTC3 | Proximal | 0 | Not documented | 3 |
| L1MA5A_dup2594 | Uniquely | No | — | — | LINE | Other L1 | chr12: 92391143-92393003 | + | 73 | 1861 | C12orf79 | Proximal | 0 | Not documented | 4 |
| AluSg_dup27582 | Multi | No | — | — | SINE | Alu | chr12: 93794397-93794682 | − | 41 | 286 | NUDT4 | Proximal | 0 | Not documented | 5 |
| Tigger5_dup1982 | Multi | No | — | — | DNA | DNA | chr12: 93895235-93895274 | + | 80 | 40 | MRPL42 | Proximal | 0 | Not documented | 6 |
| Tigger5_dup1983 | Multi | No | — | — | DNA | DNA | chr12: 93895265-93895466 | + | 74 | 202 | MRPL42 | Proximal | 0 | Not documented | 7 |
| MIRb_dup163705 | Multi | No | — | — | SINE | MIR | chr12: 93895692-93895851 | − | 110 | 160 | MRPL42 | Proximal | 0 | Not documented | 8 |
| L2_dup42601 | Uniquely | No | — | — | LINE | L2 | chr12: 94731868-94732459 | − | 190 | 592 | CCDC41 | Proximal | 0 | Not documented | 9 |
| HSMAR1_dup559 | Uniquely | No | — | — | DNA | DNA | chr12: 94742022-94742781 | + | 50 | 760 | CCDC41 | Proximal | 0 | Not documented | 10 |
| L1MC4a_dup19708 | Uniquely | No | — | — | LINE | Other L1 | chr12: 94759572-94761543 | + | 110 | 1972 | CCDC41 | Proximal | 0 | Not documented | 11 |
| L1MDa_dup5295 | Uniquely | No | — | — | LINE | Other L1 | chr12: 94777340-94779278 | − | 93 | 1939 | CCDC41 | Proximal | 0 | Not documented | 12 |
| L4_dup12916 | Multi | No | — | — | LINE | RTE | chr12: 96674001-96674055 | − | 71 | 55 | CDK17 | Proximal | 0 | Not documented | 13 |
| L2b_dup69932 | Uniquely | No | — | — | LINE | L2 | chr12: 97873231-97873856 | + | 160 | 626 | NEDD1 | Distal | 526103 | Not documented | 14 |
| MLT1B_dup14071 | Multi/ | No | — | — | LTR | ERVL- | chr13: 110683402-110683770 | − | 100 | 369 | COL4A1 | Distal | 117549 | Not documented | 15 |
| | Uniquely | | | | | MaLR | | | | | | | | | |
| L2c_dup112859 | Multi | No | — | — | LINE | L2 | chr13: 110684537-110684625 | + | 150 | 89 | COL4A1 | Distal | 116694 | Not documented | 16 |
| MLT1A_dup7150 | Multi | No | — | — | LTR | ERVL- | chr13: 110687676-110687946 | + | 120 | 271 | COL4A1 | Distal | 113373 | Not documented | 17 |
| | | | | | | MaLR | | | | | | | | | |
| MER90a_dup936 | Multi/ | No | — | — | LTR | ERV1 | chr13: 110689097-110689207 | − | 110 | 111 | COL4A1 | Distal | 112112 | Not documented | 18 |
| | Uniquely | | | | | | | | | | | | | | |
| AluJr_dup54824 | Multi/ | No | — | — | SINE | Alu | chr13: 110708461-110708755 | + | 69 | 295 | COL4A1 | Distal | 92564 | Not documented | 19 |
| | Uniquely | | | | | | | | | | | | | | |
| LTR58_dup72 | Multi/ | No | — | — | LTR | ERV1 | chr13: 110709015-110709666 | + | 97 | 652 | COL4A1 | Distal | 91653 | Not documented | 20 |
| | Uniquely | | | | | | | | | | | | | | |
| MER47A_dup2353 | Multi | No | — | — | DNA | DNA | chr13: 113831750-113831983 | + | 110 | 234 | PCID2 | Proximal | 0 | Not documented | 21 |
| AluSg_dup29387 | Multi/ | No | — | — | SINE | Alu | chr13: 115049557-115049827 | + | 50 | 271 | UPF3A | Proximal | 0 | Not documented | 22 |
| | Uniquely | | | | | | | | | | | | | | |
| MER30_dup3106 | Uniquely | No | — | — | DNA | DNA | chr13: 21142053-21142265 | − | 39 | 213 | IFT88 | Proximal | 0 | Not documented | 23 |
| L1MA4A_dup4945 | Uniquely | No | — | — | LINE | Other L1 | chr13: 21324223-21328766 | − | 68 | 4544 | N6AMT2 | Proximal | 0 | Not documented | 24 |
| LTR6A_dup176 | Multi | No | — | — | LTR | ERV1 | chr13: 21535457-21535486 | − | 15 | 30 | LATS2 | Distal | 11686 | Not documented | 1825 |
| MIR_dup130911 | Multi | No | — | — | SINE | MIR | chr13: 21722348-21722485 | + | 110 | 138 | SAP18 | Proximal | 0 | Not documented | 26 |
| AluSz_dup67206 | Multi | No | — | — | SINE | Alu | chr13: 21751827-21752130 | + | 60 | 304 | MRP63 | Proximal | 0 | Not documented | 27 |
| L1MC1_dup10254 | Uniquely | No | — | — | LINE | Other L1 | chr13: 24175197-24180260 | + | 65 | 5064 | TNFRSF19 | Proximal | 0 | Not documented | 28 |
| L1MA8_dup8429 | Uniquely | No | — | — | LINE | Other L1 | chr13: 24783639-24785676 | − | 73 | 2038 | SPATA13 | Proximal | 0 | Not documented | 29 |
| L1ME4a_dup32610 | Uniquely | No | — | — | LINE | Other L1 | chr13: 27252425-27252685 | − | 110 | 261 | WASF3 | Proximal | 0 | Not documented | 30 |
| L1MC5_dup15083 | Multi | No | — | — | LINE | Other L1 | chr13: 28019028-28019335 | + | 130 | 308 | MTIF3 | Proximal | 0 | Not documented | 31 |
| MER21-int_dup772 | Uniquely | No | — | — | LTR | ERVL | chr13: 31872487-31874496 | − | 85 | 2010 | B3GALTL | Proximal | 0 | Not documented | 32 |
| AluSc5_dup4853 | Multi | No | — | — | SINE | Alu | chr13: 38936643-38936730 | − | 31 | 88 | UFM1 | Proximal | 0 | Not documented | 33 |
| L1PA15_dup6807 | Uniquely | No | — | — | LINE | L1PA\|B\|x | chr13: 40034963-40035603 | − | 48 | 641 | LHFP | Proximal | 0 | Not documented | 34 |
| MER5B_dup18875 | Multi/ | No | — | — | DNA | DNA | chr13: 45945403-45945517 | − | 140 | 115 | SLC25A30 | Distal | 21935 | Not documented | 35 |
| | Uniquely | | | | | | | | | | | | | | |
| Tigger2_dup2156 | Uniquely | No | — | — | DNA | DNA | chr13: 50626005-50627469 | + | 58 | 1465 | DLEU1 | Distal | 28839 | Not documented | 36 |
| MIRb_dup170640 | Uniquely | No | — | — | SINE | MIR | chr13: 50656622-50656844 | − | 110 | 223 | DLEU1 | Proximal | 0 | Not documented | 37 |
| AluSx4_dup4047 | Multi | No | — | — | SINE | Alu | chr13: 67780292-67780588 | − | 35 | 297 | PCDH9 | Proximal | 0 | Not documented | 38 |
| AluY_dup85247 | Multi | No | — | — | SINE | Alu | chr13: 67787067-67787368 | + | 21 | 302 | PCDH9 | Proximal | 0 | Not documented | 39 |
| L1PBa1_dup327 | Uniquely | No | — | — | LINE | L1PA\|B\|x | chr13: 80835279-80837619 | − | 60 | 2341 | SPRY2 | Distal | 72493 | Not documented | 40 |
| FLAM_A_dup11969 | Multi | No | — | — | SINE | Alu | chr13: 88154463-88154570 | + | 120 | 108 | SLITRK5 | Distal | 170301 | Not documented | 41 |
| L1M3b_dup490 | Uniquely | No | — | — | LINE | Other L1 | chr13: 92997670-92999999 | + | 130 | 2330 | GPC5 | Proximal | 0 | Not documented | 42 |
| L1PA3_dup9027 | Uniquely | No | — | — | LINE | L1PA\|B\|x | chr13: 94015384-94016476 | − | 10 | 1093 | GPC6 | Proximal | | Not documented | 43 |
| L1ME1_dup25834 | Multi | No | — | — | LINE | Other L1 | chr14: 102336289-102337224 | − | 110 | 936 | PPP2R5C | Proximal | 0 | Not documented | 44 |
| AluSx_dup103372 | Multi | No | — | — | SINE | Alu | chr14: 103799238-103799536 | − | 34 | 299 | EIF5 | Proximal | 346 | Not documented | 45 |
| AluSz6_dup34235 | Multi | No | — | — | SINE | Alu | chr14: 104056923-104057209 | + | 52 | 287 | APOPT1 | Proximal | 0 | Not documented | 46 |
| MIRc_dup83543 | Multi | No | — | — | SINE | MIR | chr14: 104151256-104151413 | − | 120 | 158 | RP11-73M18.2 | Proximal | 0 | Not documented | 47 |
| MIRc_dup83554 | Multi | No | — | — | SINE | MIR | chr14: 104378469-104378709 | − | 120 | 241 | C14orf2 | Proximal | 0 | Not documented | 48 |
| LTR48B_dup810 | Multi/ | No | — | — | LTR | ERV1 | chr14: 21408815-21409393 | + | 110 | 579 | RNASE2 | Distal | 14219 | Not documented | 49 |
| | Uniquely | | | | | | | | | | | | | | |
| SVA_D_dup1014 | Multi | No | — | — | Other | SVA | chr14: 21656418-21657641 | + | 11 | 1224 | HNRNPC | Distal | 19655 | Not documented | 1850 |
| AluSx1_dup77097 | Multi | No | — | — | SINE | Alu | chr14: 21965662-21965970 | − | 32 | 309 | TOX4 | Proximal | 0 | Not documented | 51 |
| AluJo_dup50827 | Multi | No | — | — | SINE | Alu | chr14: 21966008-21966126 | − | 73 | 119 | TOX4 | Proximal | 0 | Not documented | 52 |
| MIR3_dup70217 | Multi | No | — | — | SINE | MIR | chr14: 23080381-23080535 | − | 110 | 155 | ABHD4 | Proximal | 0 | Not documented | 53 |
| AluSx3_dup21042 | Uniquely | No | — | — | SINE | Alu | chr14: 23349301-23349601 | + | 51 | 301 | LRP10 | Proximal | 0 | Not documented | 54 |
| L4_dup13732 | Multi | No | — | — | LINE | RTE | chr14: 23732548-23732613 | − | 140 | 66 | C14orf164 | Proximal | 0 | Not documented | 55 |
| AluSp_dup35092 | Multi | No | — | — | SINE | Alu | chr14: 24409561-24409855 | − | 39 | 295 | DHRS4 | Distal | 12941 | Not documented | 56 |
| MIR3_dup70273 | Multi | No | — | — | SINE | MIR | chr14: 24615007-24615198 | − | 140 | 192 | PSME2 | Proximal | 0 | Not documented | 57 |
| L4_dup13748 | Multi | No | — | — | LINE | RTE | chr14: 25735703-25735768 | − | 140 | 66 | STXBP6 | Distal | 216201 | Not documented | 58 |
| L2a_dup134119 | Multi | No | — | — | LINE | L2 | chr14: 26934962-26935568 | − | 130 | 607 | NOVA1 | Proximal | 0 | Not documented | 59 |
| MLT1A1_dup5504 | Multi | No | — | — | LTR | ERVL- | chr14: 26935839-26936212 | + | 72 | 374 | NOVA1 | Proximal | 0 | Not documented | 60 |
| | | | | | | MaLR | | | | | | | | | |
| L2a_dup134121 | Multi | No | — | — | LINE | L2 | chr14: 26936282-26937114 | − | 120 | 833 | NOVA1 | Proximal | 0 | Not documented | 61 |
| MLT1E1A_dup2751 | Multi | No | — | — | LTR | ERVL- | chr14: 26937115-26937780 | + | 110 | 666 | NOVA1 | Proximal | 0 | Not documented | 62 |
| | | | | | | MaLR | | | | | | | | | |
| L2c_dup113283 | Uniquely | No | — | — | LINE | L2 | chr14: 26969236-26969510 | + | 140 | 275 | NOVA1 | Proximal | 0 | Not documented | 63 |
| L1MC2_dup4997 | Uniquely | No | — | — | LINE | Other L1 | chr14: 27026879-27027713 | + | 82 | 835 | NOVA1 | Proximal | 0 | Not documented | 64 |
| AluSc_dup25323 | Multi/ | No | — | — | SINE | Alu | chr14: 27048257-27048560 | − | 45 | 304 | NOVA1 | Proximal | 0 | Not documented | 65 |
| | Uniquely | | | | | | | | | | | | | | |
| L1PA13_dup7538 | Uniquely | No | — | — | LINE | L1PA\|B\|x | chr14: 27970139-27976798 | − | 69 | 6660 | NOVA1 | Distal | 903180 | Not documented | 66 |
| AluY_dup87061 | Uniquely | No | — | — | SINE | Alu | chr14: 29282148-29282456 | − | 44 | 309 | C14orf23 | Proximal | 0 | Not documented | 67 |
| THE1A-int_dup1233 | Uniquely | No | — | — | LTR | ERVL- | chr14: 30348771-30350329 | + | 45 | 1559 | PRKD1 | Proximal | 0 | Not documented | 68 |
| | | | | | | MaLR | | | | | | | | | |
| L1ME4a_dup33714 | Multi | No | — | — | LINE | Other L1 | chr14: 32740652-32741000 | + | 110 | 349 | AKAP6 | Distal | 57480 | Not documented | 69 |
| AluJo_dup51084 | Multi/ | No | — | — | SINE | Alu | chr14: 33422006-33422284 | + | 72 | 279 | NPAS3 | Proximal | 0 | Not documented | 70 |
| | Uniquely | | | | | | | | | | | | | | |
| LTR40b_dup982 | Uniquely | No | — | — | LTR | ERVL | chr14: 33422784-33423212 | − | 99 | 429 | NPAS3 | Proximal | 0 | Not documented | 71 |
| AluY_dup87235 | Uniquely | No | — | — | SINE | Alu | chr14: 33426573-33426877 | − | 28 | 305 | NPAS3 | Proximal | 0 | Not documented | 72 |
| FLAM_A_dup12157 | Multi | No | — | — | SINE | AIL | chr14: 33432077-33432179 | − | 80 | 103 | NPAS3 | Proximal | 0 | Not documented | 73 |
| MIRc_dup80837 | Multi | No | — | — | SINE | MIR | chr14: 33432957-33433023 | + | 140 | 67 | NPAS3 | Proximal | 0 | Not documented | 74 |
| AluJr_dup55200 | Multi | No | — | — | SINE | Alu | chr14: 33433899-33434196 | + | 56 | 298 | NPAS3 | Proximal | 0 | Not documented | 1875 |
| L1MA6_dup4618 | Multi/ | No | — | — | LINE | Other L1 | chr14: 33434214-33435794 | + | 62 | 1581 | NPAS3 | Proximal | 0 | Not documented | 76 |
| | Uniquely | | | | | | | | | | | | | | |
| Tigger3b_dup5394 | Multi | No | — | — | DNA | DNA | chr14: 33473389-33474584 | − | 63 | 1196 | NPAS3 | Proximal | 0 | Not documented | 77 |
| L3_dup36621 | Uniquely | No | — | — | LINE | CR1 | chr14: 33484230-33484457 | + | 160 | 228 | NPAS3 | Proximal | 0 | Not documented | 78 |
| L3_dup36623 | Multi | No | — | — | LINE | CR1 | chr14: 33485652-33485734 | + | 100 | 83 | NPAS3 | Proximal | 0 | Not documented | 79 |
| MIR_dup135997 | Uniquely | No | — | — | SINE | MIR | chr14: 33538690-33538939 | + | 130 | 250 | NPAS3 | Proximal | 0 | Not documented | 80 |
| Tigger1_dup9828 | Uniquely | No | — | — | DNA | DNA | chr14: 33639334-33641530 | − | 64 | 2197 | NPAS3 | Proximal | 0 | Not documented | 81 |
| L2_dup45790 | Uniquely | No | — | — | LINE | L2 | chr14: 33652770-33653051 | + | 160 | 282 | NPAS3 | Proximal | 0 | Not documented | 82 |
| L2b_dup74840 | Multi | No | — | — | LINE | L2 | chr14: 33708491-33708533 | − | 95 | 43 | NPAS3 | Proximal | 0 | Not documented | 83 |
| MIRb_dup174678 | Multi/ | No | — | — | SINE | MIR | chr14: 33715232-33715441 | + | 150 | 210 | NPAS3 | Proximal | 0 | Not documented | 84 |
| | Uniquely | | | | | | | | | | | | | | |
| AluYf4_dup1018 | Multi/ | No | — | — | SINE | Alu | chr14: 33715464-33715769 | + | 24 | 306 | NPAS3 | Proximal | 0 | Not documented | 85 |
| | Uniquely | | | | | | | | | | | | | | |
| AluSx_dup99914 | Multi | No | — | — | SINE | Alu | chr14: 33715917-33716264 | + | 70 | 348 | NPAS3 | Proximal | 0 | Not documented | 86 |
| L2c_dup113620 | Multi/ | No | — | — | LINE | L2 | chr14: 33730241-33730373 | + | 190 | 133 | NPAS3 | Proximal | 0 | Not documented | 87 |
| | Uniquely | | | | | | | | | | | | | | |
| L2a_dup134471 | Uniquely | No | — | — | LINE | L2 | chr14: 33746582-33747737 | − | 130 | 1156 | NPAS3 | Proximal | 0 | Not documented | 88 |
| MER5A_dup27199 | Multi/ | No | — | — | DNA | DNA | chr14: 33837561-33837739 | + | 130 | 179 | NPAS3 | Proximal | 0 | Not documented | 89 |
| | Uniquely | | | | | | | | | | | | | | |
| MER103C_dup7287 | Multi | No | — | — | DNA | DNA | chr14: 33837814-33837881 | − | 150 | 68 | NPAS3 | Proximal | 0 | Not documented | 90 |
| L3_dup36631 | Multi | No | — | — | LINE | CR1 | chr14: 33838236-33838760 | + | 150 | 525 | NPAS3 | Proximal | 0 | Not documented | 91 |
| L2c_dup113628 | Uniquely | No | — | — | LINE | L2 | chr14: 33839428-33840354 | − | 160 | 927 | NPAS3 | Proximal | 0 | Not documented | 92 |
| AluJb_dup102490 | Multi/ | No | — | — | SINE | Alu | chr14: 33852018-33852319 | + | 83 | 302 | NPAS3 | Proximal | 0 | Not documented | 93 |
| | Uniquely | | | | | | | | | | | | | | |
| AluSp_dup35187 | Multi | No | — | — | SINE | Alu | chr14: 33860394-33860697 | − | 39 | 304 | NPAS3 | Proximal | 0 | Not documented | 94 |
| MIRb_dup174699 | Multi | No | — | — | SINE | MIR | chr14: 33861481-33861672 | − | 150 | 192 | NPAS3 | Proximal | 0 | Not documented | 95 |
| L1PA7_dup11252 | Uniquely | No | — | — | LINE | L1PA\|B\|x | chr14: 33965068-33968053 | + | 33 | 2986 | NPAS3 | Proximal | 0 | Not documented | 96 |
| L1ME1_dup24985 | Multi | No | — | — | LINE | Other L1 | chr14: 34072910-34074370 | + | 110 | 1461 | NPAS3 | Proximal | 0 | Not documented | 97 |
| L1MEf_dup10976 | Uniquely | No | — | — | LINE | Other L1 | chr14: 36574240-36578026 | + | 110 | 3787 | BRMS1L | Distal | 172710 | Not documented | 98 |
| L2a_dup134632 | Multi | No | — | — | LINE | L2 | chr14: 36767852-36767912 | − | 120 | 61 | MBIP | Proximal | 0 | Not documented | 99 |
| AluSx_dup100607 | Multi | No | — | — | SINE | Alu | chr14: 50792667-50792966 | + | 44 | 300 | ATP5S | Proximal | 0 | Not documented | 1900 |
| MLT1F_dup3285 | Uniquely | No | — | — | LTR | ERVL- | chr14: 51203720-51204222 | + | 110 | 503 | NIN | Proximal | 0 | Not documented | 1 |
| | | | | | | MaLR | | | | | | | | | |
| L2b_dup75210 | Multi/ | No | — | — | LINE | L2 | chr14: 51443048-51443283 | + | 110 | 236 | TRIM9 | Proximal | 0 | Not documented | 2 |
| | Uniquely | | | | | | | | | | | | | | |
| L3_dup36895 | Multi | No | — | — | LINE | CR1 | chr14: 51455602-51455926 | − | 150 | 325 | TRIM9 | Proximal | 0 | Not documented | 3 |
| AluY_dup87893 | Uniquely | No | — | — | SINE | Alu | chr14: 51467947-51468246 | − | 17 | 300 | TRIM9 | Proximal | 0 | Not documented | 4 |
| AluY_dup87894 | Multi/ | No | — | — | SINE | Alu | chr14: 51468845-51469150 | − | 37 | 30€ | TRIM9 | Proximal | 0 | Not documented | 5 |
| | Uniquely | | | | | | | | | | | | | | |
| MIR_dup136790 | Uniquely | No | — | — | SINE | MIR | chr14: 51471307-51471527 | − | 120 | 221 | TRIM9 | Proximal | 0 | Not documented | 6 |
| L1MB3_dup12928 | Uniquely | No | — | — | LINE | Other L1 | chr14: 51478778-51480216 | − | 75 | 1439 | TRIM9 | Proximal | 0 | Not documented | 7 |
| L1MEf_dup11056 | Uniquely | No | — | — | LINE | Other L1 | chr14: 51529411-51531214 | + | 120 | 1804 | TRIM9 | Proximal | 0 | Not documented | 8 |
| Tigger4a_dup2727 | Multi | No | — | — | DNA | DNA | chr14: 51537181-51537402 | − | 75 | 222 | TRIM9 | Proximal | 0 | Not documented | 9 |
| Charlie8_dup2233 | Multi | No | — | — | DNA | DNA | chr14: 51537430-51537529 | + | 110 | 100 | TRIM9 | Proximal | 0 | Not documented | 10 |
| AluSp_dup35421 | Multi/ | No | — | — | SINE | Alu | chr14: 51537816-51538121 | + | 55 | 306 | TRIM9 | Proximal | 0 | Not documented | 11 |
| | Uniquely | | | | | | | | | | | | | | |
| L1ME3A_dup12518 | Multi/ | No | — | — | LINE | Other L1 | chr14: 51539721-51540515 | + | 100 | 795 | TRIM9 | Proximal | 0 | Not documented | 12 |
| | Uniquely | | | | | | | | | | | | | | |
| MIR_dup136798 | Uniquely | No | — | — | SINE | MIR | chr14: 51542755-51542963 | − | 110 | 209 | TRIM9 | Proximal | 0 | Not documented | 13 |
| L2a_dup135369 | Uniquely | No | — | — | LINE | L2 | chr14: 51559499-51559955 | − | 110 | 457 | TRIM9 | Proximal | 0 | Not documented | 14 |
| MER20_dup12212 | Uniquely | No | — | — | DNA | DNA | chr14: 53258925-53259155 | + | 100 | 231 | GNPNAT1 | Proximal | 540 | Not documented | 15 |
| L2_dup46196 | Uniquely | No | — | — | LINE | L2 | chr14: 53372151-53372538 | − | 150 | 388 | FERMT2 | Proximal | 0 | Not documented | 16 |
| MER20B_dup3255 | Multi/ | No | — | — | DNA | DNA | chr14: 55057953-55058588 | + | 120 | 636 | SAMD4A | Proximal | 0 | Not documented | 17 |
| | Uniquely | | | | | | | | | | | | | | |
| MLT1D_dup16011 | Uniquely | No | — | — | LTR | ERVL- | chr14: 55075746-55076238 | + | 88 | 493 | SAMD4A | Proximal | 0 | Not documented | 18 |
| | | | | | | MaLR | | | | | | | | | |
| AluSz_dup70406 | Multi | No | — | — | SINE | Alu | chr14: 55078313-55078623 | + | 50 | 311 | SAMD4A | Proximal | 0 | Not documented | 19 |
| Charlie1a_dup4583 | Uniquely | No | — | — | DNA | DNA | chr14: 55080621-55081146 | + | 73 | 526 | SAMD4A | Proximal | 0 | Not documented | 20 |
| MIRc_dup81321 | Multi/ | No | — | — | SINE | MIR | chr14: 55081901-55082029 | − | 120 | 129 | SAMD4A | Proximal | 0 | Not documented | 21 |
| | Uniquely | | | | | | | | | | | | | | |
| Tigger16b_dup898 | Multi/ | No | — | — | DNA | DNA | chr14: 55082137-55082382 | + | 130 | 246 | SAMD4A | Proximal | 0 | Not documented | 22 |
| | Uniquely | | | | | | | | | | | | | | |
| MER5B_dup19553 | Multi | No | — | — | DNA | DNA | chr14: 55089369-55089489 | − | 120 | 121 | SAMD4A | Proximal | 0 | Not documented | 23 |
| MER5A1_dup12242 | Multi | No | — | — | DNA | DNA | chr14: 55089490-55089646 | + | 68 | 157 | SAMD4A | Proximal | 0 | Not documented | 24 |
| L2b_dup75325 | Multi | No | — | — | LINE | L2 | chr14: 55089703-55089809 | + | 110 | 107 | SAMD4A | Proximal | 0 | Not documented | 1925 |
| MamRep605_dup3729 | Multi/ | No | — | — | Other | Other | chr14: 55089932-55090053 | − | 110 | 122 | SAMD4A | Proximal | 0 | Not documented | 26 |
| | Uniquely | | | | | Repeats | | | | | | | | | |
| L1MB3_dup12965 | Multi | No | — | — | LINE | Other L1 | chr14: 55096385-55097315 | − | 63 | 931 | SAMD4A | Proximal | 0 | Not documented | 27 |
| AluSx_dup100786 | Multi | No | — | — | SINE | Alu | chr14: 55102186-55102483 | + | 53 | 298 | SAMD4A | Proximal | 0 | Not documented | 28 |
| MLT1F1_dup2474 | Uniquely | No | — | — | LTR | ERVL- | chr14: 55164414-55164880 | − | 94 | 467 | SAMD4A | Proximal | 0 | Not documented | 29 |
| | | | | | | MaLR | | | | | | | | | |
| MER117_dup3525 | Multi | No | — | — | DNA | DNA | chr14: 57755885-57756055 | − | 160 | 171 | AP5M1 | Proximal | 0 | Not documented | 30 |
| AluJr_dup55758 | Multi | No | — | — | SINE | Alu | chr14: 58739682-58739889 | − | 75 | 208 | C14orf37 | Proximal | 0 | Not documented | 31 |
| AluSg_dup29906 | Multi | No | — | — | SINE | Alu | chr14: 58740242-58740533 | − | 56 | 292 | C14orf37 | Proximal | 0 | Not documented | 32 |
| L3_dup37000 | Multi | No | — | — | LINE | CR1 | chr14: 58890671-58890799 | − | 150 | 129 | TIMM9 | Proximal | 0 | Not documented | 33 |
| MIR3_dup70997 | Multi | No | — | — | SINE | MIR | chr14: 58890800-58890865 | + | 120 | 66 | TIMM9 | Proximal | 0 | Not documented | 34 |
| L1PA7_dup11443 | Uniquely | No | — | — | LINE | L1PA\|B\|x | chr14: 58991984-58997746 | + | 49 | 5763 | KIAA0586 | Proximal | 0 | EVE annotated | 35 |
| L2a_dup135883 | Multi | No | — | — | LINE | L2 | chr14: 59837028-59837159 | − | 86 | 132 | DAAM1 | Proximal | 0 | Not documented | 36 |
| LTR57_dup201 | Multi | No | — | — | LTR | ERVL | chr14: 59940842-59941240 | + | 68 | 399 | L3HYPDH | Proximal | 0 | Not documented | 37 |
| MIR_dup137344 | Multi/ | No | — | — | SINE | MIR | chr14: 59941287-59941546 | + | 130 | 260 | L3HYPDH | Proximal | 0 | Not documented | 38 |
| | Uniquely | | | | | | | | | | | | | | |
| Charlie1b_dup2447 | Multi | No | — | — | DNA | DNA | chr14: 59941948-59942429 | − | 71 | 482 | L3HYPDH | Proximal | 0 | Not documented | 39 |
| L4_dup14014 | Multi | No | — | — | LINE | RTE | chr14: 61438406-61438471 | − | 140 | 66 | TRMT5 | Proximal | 0 | Not documented | 40 |
| L1MB8_dup12938 | Uniquely | No | — | — | LINE | Other L1 | chr14: 63699950-63700182 | + | 81 | 233 | RHOJ | Proximal | 0 | Not documented | 41 |
| L2b_dup75617 | Uniquely | No | — | — | LINE | L2 | chr14: 63700408-63700702 | + | 160 | 295 | RHOJ | Proximal | 0 | Not documented | 42 |
| AluJr_dup55867 | Multi | No | — | — | SINE | Alu | chr14: 63759386-63759681 | + | 75 | 296 | RHOJ | Proximal | 0 | Not documented | 43 |
| Charlie24_dup1130 | Multi | No | — | — | DNA | DNA | chr14: 64882347-64882406 | + | 120 | 60 | MTHFD1 | Proximal | 0 | Not documented | 44 |
| L1MC3_dup10498 | Multi | No | — | — | LINE | Other L1 | chr14: 65399216-65400083 | + | 65 | 868 | CHURC1 | Proximal | 0 | Not documented | 45 |
| L3b_dup5875 | Multi | No | — | — | LINE | CR1 | chr14: 67831471-67831540 | + | 110 | 70 | EIF2S1 | Proximal | 0 | Not documented | 46 |
| AluJr4_dup13369 | Multi | No | — | — | SINE | Alu | chr14: 67852028-67852180 | + | 80 | 153 | EIF2S1 | Proximal | 0 | Not documented | 47 |
| FLAM_C_dup15985 | Multi | No | — | — | SINE | Alu | chr14: 67852379-67852490 | − | 69 | 112 | EIF2S1 | Proximal | 0 | Not documented | 48 |
| AluSq10_dup1684 | Multi | No | — | — | SINE | Alu | chr14: 68144497-68144578 | − | 39 | 82 | RDH11 | Proximal | 0 | Not documented | 49 |
| L1M2_dup7482 | Uniquely | No | — | — | LINE | Other L1 | chr14: 68398926-68400552 | − | 110 | 1627 | RAD51B | Proximal | 0 | Not documented | 1950 |
| AluSx1_dup78581 | Multi | No | — | — | SINE | Alu | chr14: 71051096-71051392 | − | 49 | 297 | MED6 | Proximal | 0 | Not documented | 51 |
| MER4E1_dup814 | Multi | No | — | — | LTR | ERV1 | chr14: 71979321-71979915 | + | 78 | 595 | SIPA1L1 | Proximal | 0 | Not documented | 52 |
| MIRb_dup177192 | Multi | No | — | — | SINE | MIR | chr14: 74178869-74178949 | − | 130 | 81 | PNMA1 | Proximal | 0 | Not documented | 53 |
| MamGyp-int_dup287 | Multi | No | — | — | LTR | Gypsy | chr14: 74179322-74180371 | − | 140 | 1050 | PNMA1 | Proximal | 0 | Not documented | 54 |
| AluSx_dup101827 | Multi | No | — | — | SINE | Alu | chr14: 74183096-74183412 | + | 42 | 317 | ELMSAN1 | Proximal | 0 | Not documented | 55 |
| AluSc8_dup15928 | Multi | No | — | — | SINE | Alu | chr14: 74524749-74525058 | + | 40 | 310 | ALDH6A1 | Proximal | 0 | Not documented | 56 |
| FLAM_C_dup16090 | Multi | No | — | — | SINE | Alu | chr14: 74526863-74527001 | − | 65 | 139 | ALDH6A1 | Proximal | 0 | Not documented | 57 |
| AluSc_dup25890 | Uniquely | No | — | — | SINE | Alu | chr14: 74666838-74667145 | + | 44 | 308 | LIN52 | Proximal | 0 | Not documented | 58 |
| AluSq10_dup1696 | Uniquely | No | — | — | SINE | Alu | chr14: 75180876-75181007 | + | 28 | 132 | FCF1 | Proximal | 0 | Not documented | 59 |
| L1MB7_dup17716 | Uniquely | No | — | — | LINE | Other L1 | chr14: 75526967-75527486 | + | 64 | 520 | ACYP1 | Proximal | 0 | Not documented | 60 |
| AluSp_dup35919 | Uniquely | No | — | — | SINE | Alu | chr14: 75528523-75528832 | + | 42 | 310 | ACYP1 | Proximal | 0 | Not documented | 61 |
| AluSz_dup71273 | Multi | No | — | — | SINE | Alu | chr14: 75598809-75599111 | + | 55 | 303 | TMED10 | Proximal | 0 | Not documented | 62 |
| L1MD2_dup8879 | Multi | No | — | — | LINE | Other L1 | chr14: 75599933-75600938 | + | 61 | 1006 | TMED10 | Proximal | 0 | Not documented | 63 |
| L1ME3B_dup6597 | Multi | No | — | — | LINE | Other L1 | chr14: 76117589-76117772 | + | 100 | 184 | C14orf1 | Proximal | 0 | Not documented | 64 |
| AluSq2_dup40417 | Multi | No | — | — | SINE | Alu | chr14: 77582033-77582327 | − | 39 | 295 | KIAA1737 | Proximal | 0 | Not documented | 65 |
| L1ME1_dup25536 | Multi | No | — | — | LINE | Other L1 | chr14: 78202927-78203314 | − | 98 | 388 | SNW1 | Proximal | 0 | Not documented | 66 |
| L4_dup14113 | Multi | No | — | — | LINE | RTE | chr14: 81289639-81289700 | + | 130 | 62 | CEP128 | Proximal | 0 | Not documented | 67 |
| MER30_dup3316 | Multi/ | No | — | — | DNA | DNA | chr14: 81729517-81729600 | + | 50 | 84 | STON2 | Proximal | 0 | Not documented | 68 |
| | Uniquely | | | | | | | | | | | | | | |
| AluSx_dup102333 | Multi/ | No | — | — | SINE | Alu | chr14: 81729601-81729911 | + | 47 | 311 | STON2 | Proximal | 0 | Not documented | 69 |
| | Uniquely | | | | | | | | | | | | | | |
| 7SK_dup611 | Multi | No | — | — | Other | Other | chr14: 90178855-90179094 | + | 7.7 | 240 | RP11-944C7.1 | Distal | 69841 | Not documented | 70 |
| | | | | | | Repeats | | | | | | | | | |
| AluSq2_dup40611 | Multi | No | — | — | SINE | Alu | chr14: 90266248-90266568 | + | 43 | 321 | EFCAB11 | Proximal | 0 | Not documented | 71 |
| AluY_dup89379 | Multi | No | — | — | SINE | Alu | chr14: 90523879-90524188 | + | 16 | 310 | KCNK13 | Distal | 3922 | Not documented | 72 |
| Tigger7_dup2559 | Multi | No | — | — | DNA | DNA | chr14: 91691582-91691985 | + | 90 | 404 | C14orf159 | Proximal | 0 | Not documented | 73 |
| AluSz_dup71901 | Multi | No | — | — | SINE | Alu | chr14: 93648993-93649289 | + | 54 | 297 | MOAP1 | Proximal | 0 | Not documented | 74 |
| MamGyp-int_dup288 | Multi | No | — | — | LTR | Gypsy | chr14: 93649573-93650621 | − | 140 | 1049 | MOAP1 | Proximal | 0 | Not documented | 1975 |
| AluSc_dup26136 | Uniquely | No | — | — | SINE | Alu | chr14: 95625029-95625327 | − | 40 | 299 | DICER1 | Proximal | 683 | Not documented | 76 |
| MLT1J_dup12397 | Uniquely | No | — | — | LTR | ERVL- | chr14: 95645938-95646294 | + | 130 | 357 | CLMN | Proximal | 1984 | Not documented | 77 |
| | | | | | | MaLR | | | | | | | | | |
| L2a_dup138222 | Multi/ | No | — | — | LINE | L2 | chr14: 96000020-96000082 | − | 94 | 63 | GLRX5 | Proximal | 0 | Not documented | 78 |
| | Uniquely | | | | | | | | | | | | | | |
| L2b_dup76867 | Multi | No | — | — | LINE | L2 | chr14: 96000283-96000343 | + | 100 | 61 | GLRX5 | Proximal | 0 | Not documented | 79 |
| FLAM_C_dup16263 | Multi/ | No | — | — | SINE | Alu | chr14: 96000438-96000606 | + | 40 | 169 | GLRX5 | Proximal | 0 | Not documented | 80 |
| | Uniquely | | | | | | | | | | | | | | |
| MIR3_dup72418 | Multi | No | — | — | SINE | MIR | chr14: 96553837-96553990 | − | 130 | 154 | C14orf132 | Proximal | 0 | Not documented | 81 |
| MIRb_dup179560 | Multi/ | No | — | — | SINE | MIR | chr14: 96555615-96555833 | − | 140 | 219 | C14orf132 | Proximal | 0 | Not documented | 82 |
| | Uniquely | | | | | | | | | | | | | | |
| AluSg_dup30507 | Multi | No | — | — | SINE | Alu | chr14: 96556456-96556757 | + | 51 | 302 | C14orf132 | Proximal | 0 | Not documented | 83 |
| MER20_dup12487 | Uniquely | No | — | — | DNA | DNA | chr14: 96559134-96559338 | + | 76 | 205 | C14orf132 | Proximal | 0 | Not documented | 84 |
| AluSx_dup107990 | Uniquely | No | — | — | SINE | Alu | chr15: 100231621-100231922 | + | 36 | 302 | MEF2A | Proximal | 0 | Not documented | 85 |
| AluY_dup90242 | Multi | No | — | — | SINE | Alu | chr15: 20682499-20682798 | + | 40 | 300 | GOLGA6L6 | Distal | 54297 | Not documented | 86 |
| AluY_dup90385 | Uniquely | No | — | — | SINE | Alu | chr15: 23086973-23087282 | + | 31 | 310 | NIPA1 | Proximal | 0 | Not documented | 87 |
| AluJb_dup106768 | Multi | No | — | — | SINE | Alu | chr15: 23296036-23296340 | + | 73 | 305 | GOLGA8I | Distal | 27214 | Not documented | 88 |
| AluY_dup90433 | Multi | No | — | — | SINE | Alu | chr15: 23349939-23350239 | + | 39 | 301 | RP11-467N20.5 | Distal | 54831 | Not documented | 89 |
| L2b_dup77458 | Multi | No | — | — | LINE | L2 | chr15: 25227628-25227733 | + | 130 | 106 | SNRPN | Distal | 3759 | Not documented | 90 |
| AluJr_dup57293 | Multi | No | — | — | SINE | Alu | chr15: 25227759-25228027 | − | 85 | 269 | SNRPN | Distal | 3890 | Not documented | 91 |
| AluSx1_dup80380 | Multi | No | — | — | SINE | Alu | chr15: 25228275-25228568 | + | 45 | 294 | SNRPN | Distal | 4406 | Not documented | 92 |
| AluSx_dup103886 | Multi | No | — | — | SINE | Alu | chr15: 25228657-25228952 | + | 65 | 296 | SNRPN | Distal | 4788 | Not documented | 93 |
| L1MDb_dup897 | Uniquely | No | — | — | LINE | Other L1 | chr15: 25341455-25342184 | − | 110 | 730 | SNRPN | Distal | 117586 | Not documented | 94 |
| AluSx1_dup80382 | Multi/ | No | — | — | SINE | Alu | chr15: 25345083-25345380 | − | 56 | 298 | SNRPN | Distal | 121214 | Not documented | 95 |
| | Uniquely | | | | | | | | | | | | | | |
| MER54A_dup506 | Multi/ | No | — | — | LTR | ERVL | chr15: 25360314-25360813 | + | 91 | 500 | SNRPN | Distal | 136445 | Not documented | 96 |
| | Uniquely | | | | | | | | | | | | | | |
| L1M5_dup51945 | Multi | No | — | — | LINE | Other L1 | chr15: 25364964-25365373 | | 120 | 410 | SNRPN | Distal | 141095 | Not documented | 97 |
| L1M4_dup14039 | Uniquely | No | — | — | LINE | Other L1 | chr15: 25578749-25579997 | + | 85 | 1249 | UBE3A | Distal | 2385 | Not documented | 98 |
| AluY_dup90788 | Multi | No | — | — | SINE | Alu | chr15: 28863181-28863480 | − | 40 | 300 | GOLGA8M | Distal | 83621 | Not documented | 99 |
| AluJb_dup107035 | Multi | No | — | — | SINE | Alu | chr15: 28916198-28916507 | − | 70 | 310 | GOLGA8M | Distal | 30594 | Not documented | 2000 |
| L4_dup14292 | Multi | No | — | — | LINE | RTE | chr15: 30023693-30023758 | + | 140 | 66 | TJP1 | Proximal | 0 | Not documented | 1 |
| L1ME1_dup26062 | Uniquely | No | — | — | LINE | Other L1 | chr15: 30090735-30091352 | + | 95 | 618 | TJP1 | Proximal | 0 | Not documented | 2 |
| L1PA12_dup1554 | Uniquely | No | — | — | LINE | L1PA\|B\|x | chr15: 33625220-33627911 | + | 41 | 2692 | RYR3 | Proximal | 0 | Not documented | 3 |
| HERVIP10F- | Uniquely | No | — | — | LTR | ERV1 | chr15: 34447433-34451570 | − | 93 | 4138 | KATNBL1 | Proximal | 0 | EVE annotated | 4 |
| int_dup336 | | | | | | | | | | | | | | | |
| AluSx1_dup80713 | Multi | No | — | — | SINE | Alu | chr15: 34829568-34829879 | + | 58 | 312 | GOLGA8B | Proximal | 0 | Not documented | 5 |
| MIRc_dup83960 | Uniquely | No | — | — | SINE | MIR | chr15: 36953310-36953385 | − | 150 | 76 | C15orf41 | Proximal | 0 | Not documented | 6 |
| MLT2B3_dup2842 | Uniquely | No | — | — | LTR | ERVL | chr15: 37273837-37274402 | + | 91 | 566 | MEIS2 | Proximal | 0 | Not documented | 7 |
| L1MA9_dup14286 | Uniquely | No | — | — | LINE | Other L1 | chr15: 37274403-37277259 | − | 66 | 2857 | MEIS2 | Proximal | 0 | Not documented | 8 |
| L1MD2_dup9103 | Uniquely | No | — | — | LINE | Other L1 | chr15: 38602642-38604206 | − | 89 | 1565 | SPRED1 | Proximal | 0 | Not documented | 9 |
| L1PA16_dup12253 | Multi | No | — | — | LINE | L1PA\|B\|x | chr15: 38610644-38611105 | − | 67 | 462 | SPRED1 | Proximal | 0 | Not documented | 10 |
| L4_dup14356 | Uniquely | No | — | — | LINE | RTE | chr15: 40685803-40685908 | − | 88 | 106 | KNSTRN | Proximal | 0 | Not documented | 11 |
| Tigger4b_dup2081 | Multi | No | — | — | DNA | DNA | chr15: 40710950-40711008 | + | 63 | 59 | IVD | Proximal | 0 | Not documented | 12 |
| AluSq2_dup41281 | Multi | No | — | — | SINE | Alu | chr15: 40711051-40711356 | + | 52 | 306 | IVD | Proximal | 0 | Not documented | 13 |
| AluSz_dup72878 | Multi | No | — | — | SINE | Alu | chr15: 40711428-40711726 | + | 61 | 299 | IVD | Proximal | 0 | Not documented | 14 |
| AluSx_dup104485 | Uniquely | No | — | — | SINE | Alu | chr15: 40986261-40986545 | − | 57 | 285 | RAD51 | Proximal | 428 | Not documented | 15 |
| LTR7_dup2081 | Multi | No | — | — | LTR | ERV1 | chr15: 41577519-41577884 | − | 42 | 366 | CHP1 | Distal | 3477 | Not documented | 16 |
| FLAM_A_dup12723 | Uniquely | No | — | — | SINE | Alu | chr15: 41673058-41673105 | − | 38 | 48 | NUSAP1 | Proximal | 0 | Not documented | 17 |
| AluSx1_dup80939 | Uniquely | No | — | — | SINE | Alu | chr15: 41898850-41899160 | − | 44 | 311 | MGA | Distal | 14263 | Not documented | 18 |
| AluSg_dup31036 | Uniquely | No | — | — | SINE | Alu | chr15: 42835068-42835366 | − | 52 | 299 | LRRC57 | Proximal | 0 | Not documented | 19 |
| AluSz_dup73054 | Uniquely | No | — | — | SINE | Alu | chr15: 42835397-42835698 | − | 53 | 302 | LRRC57 | Proximal | 0 | Not documented | 20 |
| L2_dup47422 | Uniquely | No | — | — | LINE | L2 | chr15: 43623863-43624423 | − | 170 | 561 | ADAL | Proximal | 0 | Not documented | 21 |
| L2c_dup118276 | Multi/ | No | — | — | LINE | L2 | chr15: 43695265-43695671 | − | 140 | 407 | TUBGCP4 | Proximal | 0 | Not documented | 22 |
| | Uniquely | | | | | | | | | | | | | | |
| MIR3_dup73386 | Multi | No | — | — | SINE | MIR | chr15: 43696803-43696885 | − | 130 | 83 | TUBGCP4 | Proximal | 0 | Not documented | 23 |
| MIR3_dup73387 | Multi | No | — | — | SINE | MIR | chr15: 43697006-43697110 | + | 130 | 105 | TUBGCP4 | Proximal | 0 | Not documented | 24 |
| L2a_dup139769 | Multi | No | — | — | LINE | L2 | chr15: 43697669-43697752 | − | 99 | 84 | TUBGCP4 | Proximal | 0 | Not documented | 2025 |
| AluSq2_dup41428 | Multi | No | — | — | SINE | Alu | chr15: 43697956-43698263 | + | 44 | 308 | TUBGCP4 | Proximal | 0 | Not documented | 26 |
| MIRb_dup181773 | Multi | No | — | — | SINE | MIR | chr15: 44088037-44088249 | + | 100 | 213 | SERINC4 | Proximal | 0 | Not documented | 27 |
| L2_dup47433 | Multi | No | — | — | LINE | L2 | chr15: 44097460-44097490 | − | 44 | 31 | MFAP1 | Proximal | 0 | Not documented | 28 |
| L1MA3_dup7828 | Uniquely | No | — | — | LINE | Other L1 | chr15: 44643797-44644828 | + | 49 | 1032 | CASC4 | Proximal | 0 | Not documented | 29 |
| AluSq2_dup41476 | Multi/ | No | — | — | SINE | Alu | chr15: 44706006-44706333 | − | 45 | 328 | CASC4 | Proximal | 0 | Not documented | 30 |
| | Uniquely | | | | | | | | | | | | | | |
| AluJo_dup53619 | Multi | No | — | — | SINE | Alu | chr15: 44827286-44827562 | − | 59 | 277 | EIF3J | Proximal | 1694 | Not documented | 31 |
| L2c_dup118338 | Multi | No | — | — | LINE | L2 | chr15: 45008992-45009130 | − | 160 | 139 | B2M | Proximal | 0 | Not documented | 32 |
| MIRc_dup84239 | Multi | No | — | — | SINE | MIR | chr15: 45009210-45009321 | − | 120 | 112 | B2M | Proximal | 0 | Not documented | 33 |
| Tigger3a_dup4527 | Multi | No | — | — | DNA | DNA | chr15: 45009328-45009601 | − | 45 | 274 | B2M | Proximal | 0 | Not documented | 34 |
| MLT1J_dup12525 | Multi | No | — | — | LTR | ERVL- | chr15: 45024682-45024732 | + | 140 | 51 | TRIM69 | Proximal | 0 | Not documented | 35 |
| | | | | | | MaLR | | | | | | | | | |
| MER49_dup1075 | Multi | No | — | — | LTR | ERV1 | chr15: 45024733-45025056 | + | 55 | 324 | TRIM69 | Proximal | 0 | Not documented | 36 |
| L1ME4a_dup35401 | Uniquely | No | — | — | LINE | Other L1 | chr15: 48449566-48449930 | + | 120 | 365 | MYEF2 | Proximal | 0 | Not documented | 37 |
| MamRep1161_{—} | Multi | No | — | — | DNA | DNA | chr15: 49171866-49172076 | − | 100 | 211 | EID1 | Proximal | 0 | Not documented | 38 |
| dup1535 | | | | | | | | | | | | | | | |
| L4_dup14399 | Multi | No | — | — | LINE | RTE | chr15: 49924335-49924395 | + | 140 | 61 | DTWD1 | Proximal | 0 | Not documented | 39 |
| AluSz_dup73376 | Uniquely | No | — | — | SINE | Alu | chr15: 50662519-50662814 | + | 60 | 296 | GABPB1 | Distal | 14915 | Not documented | 40 |
| AluSx_dup105196 | Multi/ | No | — | — | SINE | Alu | chr15: 50662901-50663188 | + | 71 | 288 | GABPB1 | Distal | 15297 | Not documented | 41 |
| | Uniquely | | | | | | | | | | | | | | |
| L1MC5_dup16569 | Multi | No | — | — | LINE | Other L1 | chr15: 50663217-50663393 | + | 95 | 177 | GABPB1 | Distal | 15613 | Not documented | 42 |
| L1M1_dup8394 | Multi | No | — | — | LINE | Other L1 | chr15: 52357479-52357560 | + | 110 | 82 | MAPK6 | Proximal | 0 | Not documented | 43 |
| Tigger7_dup2603 | Multi | No | — | — | DNA | DNA | chr15: 52840282-52840401 | + | 73 | 120 | ARPP19 | Proximal | 0 | Not documented | 44 |
| AluSx1_dup81462 | Multi | No | — | — | SINE | Alu | chr15: 52840402-52840710 | + | 40 | 309 | ARPP19 | Proximal | 0 | Not documented | 45 |
| Tigger7_dup2604 | Multi | No | — | — | DNA | DNA | chr15: 52840711-52840853 | + | 73 | 143 | ARPP19 | Proximal | 0 | Not documented | 46 |
| Tigger7_dup2605 | Multi | No | — | — | DNA | DNA | chr15: 52840852-52840950 | + | 64 | 99 | ARPP19 | Proximal | 0 | Not documented | 47 |
| MamRep434_dup1838 | Multi | No | — | — | DNA | DNA | chr15: 52840970-52841185 | − | 120 | 216 | ARPP19 | Proximal | 0 | Not documented | 48 |
| AluJo_dup53796 | Multi | No | — | — | SINE | Alu | chr15: 52842732-52842832 | + | 95 | 101 | ARPP19 | Proximal | 0 | Not documented | 49 |
| AluSg_dup31249 | Multi/ | No | — | — | SINE | Alu | chr15: 55609510-55609810 | − | 47 | 301 | RAB27A | Proximal | 0 | Not documented | 2050 |
| | Uniquely | | | | | | | | | | | | | | |
| L1P1_dup2775 | Uniquely | No | — | — | LINE | L1PA\|B\|x | chr15: 56728261-56731078 | + | 25 | 2818 | MNS1 | Proximal | 0 | EVE annotated | 51 |
| AluYa8_dup274 | Multi | No | — | — | SINE | Alu | chr15: 58007520-58007614 | − | 53 | 95 | POLR2M | Proximal | 0 | Not documented | 52 |
| L1ME4a_dup35586 | Multi | No | — | — | LINE | Other L1 | chr15: 58008270-58008406 | − | 100 | 137 | POLR2M | Proximal | 0 | Not documented | 53 |
| L1ME3B_dup6856 | Multi | No | — | — | LINE | Other L1 | chr15: 58009468-58010142 | − | 110 | 675 | POLR2M | Proximal | 0 | Not documented | 54 |
| L2b_dup78412 | Uniquely | No | — | — | LINE | L2 | chr15: 60958800-60959117 | − | 160 | 318 | RORA | Proximal | 0 | Not documented | 55 |
| UCON26_dup183 | Uniquely | No | — | — | Other | Other | chr15: 61152206-61152400 | + | 150 | 195 | RORA | Proximal | 0 | Not documented | 56 |
| | | | | | | Repeats | | | | | | | | | |
| MER5B_dup20347 | Uniquely | No | — | — | DNA | DNA | chr15: 61236347-61236511 | − | 100 | 165 | RORA | Proximal | 0 | Not documented | 57 |
| L1MB7_dup18362 | Uniquely | No | — | — | LINE | Other L1 | chr15: 61271959-61273178 | − | 76 | 1220 | RORA | Proximal | 0 | Not documented | 58 |
| L1MB7_dup18363 | Multi/ | No | — | — | LINE | Other L1 | chr15: 61273175-61275110 | − | 100 | 1936 | RORA | Proximal | 0 | Not documented | 59 |
| | Uniquely | | | | | | | | | | | | | | |
| AluSc_dup26809 | Uniquely | No | — | — | SINE | Alu | chr15: 61277782-61278078 | − | 43 | 297 | RORA | Proximal | 0 | Not documented | 60 |
| THE1A_dup3710 | Uniquely | No | — | — | LTR | ERVL- | chr15: 61315422-61315776 | − | 60 | 355 | RORA | Proximal | 0 | Not documented | 61 |
| | | | | | | MaLR | | | | | | | | | |
| L1MC4_dup23871 | Uniquely | No | — | — | LINE | Other L1 | chr15: 61322229-61322631 | + | 110 | 403 | RORA | Proximal | 0 | Not documented | 62 |
| MIRb_dup182948 | Uniquely | No | — | — | SINE | MIR | chr15: 61325109-61325333 | − | 130 | 225 | RORA | Proximal | 0 | Not documented | 63 |
| AluSc8_dup16512 | Multi | No | — | — | SINE | Alu | chr15: 61341849-61342157 | − | 53 | 309 | RORA | Proximal | 0 | Not documented | 64 |
| MER58A_dup10735 | Uniquely | No | — | — | DNA | DNA | chr15: 61342307-61342510 | + | 110 | 204 | RORA | Proximal | 0 | Not documented | 65 |
| Charlie15a_{—} | Uniquely | No | — | — | DNA | DNA | chr15: 61387844-61387941 | − | 120 | 98 | RORA | Proximal | 0 | Not documented | 66 |
| dup2850 | | | | | | | | | | | | | | | |
| AluSx_dup105811 | Uniquely | No | — | — | SINE | Alu | chr15: 61392307-61392618 | − | 52 | 312 | RORA | Proximal | 0 | Not documented | 67 |
| L2c_dup119188 | Uniquely | No | — | — | LINE | L2 | chr15: 61496614-61496877 | − | 150 | 264 | RORA | Proximal | 0 | Not documented | 68 |
| AluSx_dup105905 | Multi | No | — | — | SINE | Alu | chr15: 63616887-63616995 | − | 38 | 109 | CA12 | Proximal | 0 | Not documented | 69 |
| AluSx3_dup22530 | Uniquely | No | — | — | SINE | Alu | chr15: 65441535-65441829 | + | 59 | 295 | CLPX | Proximal | 0 | Not documented | 70 |
| AluJr_dup58497 | Multi | No | — | — | SINE | Alu | chr15: 65869492-65869764 | + | 67 | 273 | PTPLAD1 | Proximal | 0 | Not documented | 71 |
| AluSp_dup37548 | Uniquely | No | — | — | SINE | Alu | chr15: 66785711-66786022 | + | 54 | 312 | SNAPC5 | Proximal | 0 | Not documented | 72 |
| FLAM_A_dup12961 | Multi | No | — | — | SINE | Alu | chr15: 67811339-67811457 | + | 120 | 119 | C15orf61 | Proximal | 1950 | Not documented | 73 |
| MIRc_dup85478 | Multi | No | — | — | SINE | MIR | chr15: 69018927-69019165 | − | 150 | 239 | CORO2B | Proximal | 0 | Not documented | 74 |
| MIRc_dup85479 | Multi | No | — | — | SINE | MIR | chr15: 69019511-69019648 | − | 110 | 138 | CORO2B | Proximal | 0 | Not documented | 2075 |
| L2_dup47885 | Multi/ | No | — | — | LINE | L2 | chr15: 69952512-69954504 | − | 140 | 1993 | RPLP1 | Distal | 204258 | Not documented | 76 |
| | Uniquely | | | | | | | | | | | | | | |
| MIR3_dup75136 | Multi | No | — | — | SINE | MIR | chr15: 75931904-75931928 | + | 36 | 25 | IMP3 | Proximal | 0 | Not documented | 77 |
| AluSq2_dup42274 | Uniquely | No | — | — | SINE | Alu | chr15: 80303585-80303888 | + | 48 | 304 | BCL2A1 | Distal | 39798 | Not documented | 78 |
| L1MDb_dup917 | Multi | No | — | — | LINE | Other L1 | chr15: 80352106-80352300 | + | 140 | 195 | ZFAND6 | Proximal | 0 | Not documented | 79 |
| MIR3_dup75470 | Multi | No | — | — | SINE | MIR | chr15: 80887230-80887286 | + | 110 | 57 | ARNT2 | Proximal | 0 | Not documented | 80 |
| L2c_dup120664 | Multi/ | No | — | — | LINE | L2 | chr15: 83423430-83423513 | − | 120 | 84 | FSD2 | Proximal | 602 | Not documented | 81 |
| | Uniquely | | | | | | | | | | | | | | |
| AluSq2_dup42339 | Multi | No | — | — | SINE | Alu | chr15: 83674031-83674335 | − | 42 | 305 | C15orf40 | Proximal | 0 | Not documented | 82 |
| MIRb_dup185509 | Multi/ | No | — | — | SINE | MIR | chr15: 85186484-85186669 | − | 110 | 186 | WDR73 | Proximal | 0 | Not documented | 83 |
| | Uniquely | | | | | | | | | | | | | | |
| AluSx1_dup83210 | Multi | No | — | — | SINE | Alu | chr15: 90377849-90378161 | + | 48 | 313 | AP3S2 | Proximal | 0 | Not documented | 84 |
| AluSz_dup75373 | Multi/ | No | — | — | SINE | Alu | chr15: 93627690-93628000 | − | 60 | 311 | RGMA | Proximal | 0 | Not documented | 85 |
| | Uniquely | | | | | | | | | | | | | | |
| MLT1A_dup7615 | Uniquely | No | — | — | LTR | ERVL- | chr15: 99676572-99676916 | − | 82 | 345 | TTC23 | Proximal | 0 | Not documented | 86 |
| | | | | | | MaLR | | | | | | | | | |
| HAL1-3A_ME_{—} | Multi | No | — | — | LINE | Other L1 | chr16: 11931743-11931906 | − | 110 | 164 | RSL1D1 | Proximal | 0 | Not documented | 87 |
| dup1613 | | | | | | | | | | | | | | | |
| Tigger14a_dup1146 | Multi/ | No | — | — | DNA | DNA | chr16: 14356974-14357124 | + | 150 | 151 | MKL2 | Proximal | 0 | Not documented | 88 |
| | Uniquely | | | | | | | | | | | | | | |
| AluSp_dup38584 | Uniquely | No | — | — | SINE | Alu | chr16: 14708427-14708733 | + | 46 | 307 | PARN | Proximal | 0 | Not documented | 89 |
| L1ME4a_dup36952 | Multi | No | — | — | LINE | Other L1 | chr16: 14946155-14946316 | − | 150 | 162 | NOMO1 | Proximal | 0 | Not documented | 90 |
| L1ME4a_dup36983 | Multi | No | — | — | LINE | Other L1 | chr16: 15681838-15682223 | − | 120 | 386 | C16orf45 | Proximal | 0 | Not documented | 91 |
| AluSx_dup109754 | Multi | No | — | — | SINE | Alu | chr16: 15960783-15961078 | + | 52 | 296 | FOPNL | Proximal | 0 | Not documented | 92 |
| L1ME4a_dup36993 | Multi | No | — | — | LINE | Other L1 | chr16: 16344653-16344814 | − | 150 | 162 | NOMO3 | Proximal | 0 | Not documented | 93 |
| AluSx1_dup83683 | Multi | No | — | — | SINE | Alu | chr16: 174794-175096 | + | 51 | 303 | NPRL3 | Proximal | 0 | Not documented | 94 |
| L1ME4a_dup37048 | Multi | No | — | — | LINE | Other L1 | chr16: 18555062-18555223 | + | 150 | 162 | NOMO2 | Proximal | 0 | Not documented | 95 |
| AluY_dup94638 | Multi | No | — | — | SINE | Alu | chr16: 1878001-1878298 | + | 27 | 298 | FAHD1 | Proximal | 0 | Not documented | 96 |
| MIR3_dup76714 | Multi | No | — | — | SINE | MIR | chr16: 19513986-19514098 | + | 150 | 113 | GDE1 | Proximal | 0 | Not documented | 97 |
| AluSx1_dup85587 | Multi | No | — | — | SINE | Alu | chr16: 21830479-21830774 | − | 34 | 296 | NPIPB4 | Distal | 15117 | Not documented | 98 |
| AluSx_dup108289 | Multi | No | — | — | SINE | Alu | chr16: 2202183-2202388 | + | 49 | 206 | RAB26 | Proximal | 0 | Not documented | 99 |
| AluSx3_dup22980 | Multi | No | — | — | SINE | Alu | chr16: 2202391-2202723 | + | 50 | 333 | RAB26 | Proximal | 0 | Not documented | 2100 |
| MIRc_dup87132 | Multi | No | — | — | SINE | MIR | chr16: 2255832-2255973 | + | 130 | 142 | MLST8 | Proximal | 0 | Not documented | 1 |
| CR1_Mam_dup1564 | Multi | No | — | — | LINE | CR1 | chr16: 2326243-2326331 | − | 140 | 89 | ABCA3 | Proximal | 0 | Not documented | 2 |
| MLT1K_dup14797 | Multi | No | — | — | LTR | ERVL- | chr16: 23680568-23680704 | − | 90 | 137 | DCTN5 | Proximal | 0 | Not documented | 3 |
| | | | | | | MaLR | | | | | | | | | |
| MLT1K_dup14798 | Multi | No | — | — | LTR | ERVL- | chr16: 23680739-23680973 | − | 130 | 235 | DCTN5 | Proximal | 0 | Not documented | 4 |
| | | | | | | MaLR | | | | | | | | | |
| AluSz6_dup36598 | Uniquely | No | — | — | SINE | Alu | chr16: 24553778-24554066 | − | 52 | 289 | RBBP6 | Proximal | 0 | Not documented | 5 |
| AluJb_dup113864 | Multi | No | — | — | SINE | Alu | chr16: 24554614-24554923 | − | 65 | 310 | RBBP6 | Proximal | 0 | Not documented | 6 |
| L1PA16_dup12541 | Multi | No | — | — | LINE | L1PA\|B\|x | chr16: 24637332-24637504 | − | 68 | 173 | RBBP6 | Distal | 53149 | Not documented | 7 |
| LTR33_dup7910 | Uniquely | No | — | — | LTR | ERVL | chr16: 24693928-24694214 | − | 120 | 287 | TNRC6A | Distal | 46803 | Not documented | 8 |
| AluSz_dup77479 | Uniquely | No | — | — | SINE | Alu | chr16: 24744256-24744544 | + | 61 | 289 | TNRC6A | Proximal | 0 | Not documented | 9 |
| AluJr_dup61096 | Multi | No | — | — | SINE | Alu | chr16: 24745215-24745525 | + | 72 | 311 | TNRC6A | Proximal | 0 | Not documented | 10 |
| AluSz_dup77480 | Uniquely | No | — | — | SINE | Alu | chr16: 24746321-24746616 | + | 58 | 296 | TNRC6A | Proximal | 0 | Not documented | 11 |
| L2_dup48575 | Multi | No | — | — | LINE | L2 | chr16: 2945196-2945247 | + | 98 | 52 | FLYWCH2 | Proximal | 0 | Not documented | 12 |
| AluSz_dup77800 | Multi | No | — | — | SINE | Alu | chr16: 29467767-29468034 | − | 54 | 268 | SLX1B | Proximal | 0 | Not documented | 13 |
| AluSx1_dup86274 | Multi | No | — | — | SINE | Alu | chr16: 29468259-29468570 | − | 42 | 312 | SLX1B | Proximal | 0 | Not documented | 14 |
| L1ME3D_dup3961 | Multi | No | — | — | LINE | Other L1 | chr16: 29983100-29983427 | − | 140 | 328 | TMEM219 | Proximal | 0 | Not documented | 15 |
| AluSz_dup77864 | Multi | No | — | — | SINE | Alu | chr16: 30207109-30207376 | − | 54 | 268 | SLX1A | Proximal | 0 | Not documented | 16 |
| AluSx1_dup86390 | Multi | No | — | — | SINE | Alu | chr16: 30207599-30207912 | − | 44 | 314 | SLX1A | Proximal | 0 | Not documented | 17 |
| MIR3_dup76255 | Multi/ | No | — | — | SINE | MIR | chr16: 3022154-3022273 | + | 140 | 120 | PAQR4 | Proximal | 0 | Not documented | 18 |
| | Uniquely | | | | | | | | | | | | | | |
| MLT1D_dup17192 | Multi | No | — | — | LTR | ERVL- | chr16: 30362045-30362510 | − | 100 | 466 | CD2BP2 | Proximal | 0 | Not documented | 19 |
| | | | | | | MaLR | | | | | | | | | |
| MER104_dup1879 | Multi | No | — | — | DNA | DNA | chr16: 30362710-30362851 | + | 140 | 142 | CD2BP2 | Proximal | 0 | Not documented | 20 |
| MIR_dup148262 | Multi | No | — | — | SINE | MIR | chr16: 30434927-30435159 | − | 120 | 233 | ZNF771 | Proximal | 0 | Not documented | 21 |
| LTR83_dup630 | Multi/ | No | — | — | LTR | ERVL | chr16: 30457085-30457148 | − | 110 | 64 | SEPHS2 | Proximal | 0 | Not documented | 22 |
| | Uniquely | | | | | | | | | | | | | | |
| AluSp_dup39070 | Multi | No | — | — | SINE | Alu | chr16: 30646235-30646510 | + | 33 | 276 | ZNF689 | Distal | 10903 | Not documented | 23 |
| AluSp_dup38297 | Multi/ | No | — | — | SINE | Alu | chr16: 3074939-3075242 | − | 43 | 304 | THOC6 | Proximal | 0 | Not documented | 24 |
| | Uniquely | | | | | | | | | | | | | | |
| AluJr4_dup14258 | Multi | No | — | — | SINE | Alu | chr16: 3075248-3075353 | − | 56 | 106 | THOC6 | Proximal | 0 | Not documented | 2125 |
| SVA_D_dup1100 | Multi | No | — | — | Other | SVA | chr16: 308155-308770 | − | 9.5 | 616 | ITFG3 | Proximal | 0 | Not documented | 26 |
| L1ME3A_dup13428 | Uniquely | No | — | — | LINE | Other L1 | chr16: 30905895-30906504 | + | 110 | 610 | BCL7C | Proximal | 0 | Not documented | 27 |
| AluJo_dup57062 | Multi | No | — | — | SINE | Alu | chr16: 30999655-30999951 | − | 63 | 297 | HSD3B7 | Proximal | 0 | Not documented | 28 |
| LTR41_dup1506 | Multi/ | No | — | — | LTR | ERVL | chr16: 3179171-3179829 | − | 90 | 659 | ZNF213 | Proximal | 0 | Not documented | 29 |
| | Uniquely | | | | | | | | | | | | | | |
| REP522_dup147 | Multi | No | — | — | Other | Other | chr16: 33312707-33312895 | − | 87 | 189 | TP53TG3C | Distal | 47981 | Not documented | 30 |
| | | | | | | Repeats | | | | | | | | | |
| AluJr_dup61722 | Multi | No | — | — | SINE | Alu | chr16: 33388630-33388929 | + | 80 | 300 | TP53TG3C | Distal | 123904 | Not documented | 31 |
| AluJb_dup114852 | Multi | No | — | — | SINE | Alu | chr16: 33389144-33389355 | + | 86 | 212 | TP53TG3C | Distal | 124418 | Not documented | 32 |
| TAR1_dup131 | Multi | No | — | — | Other | Other | chr16: 33509673-33510071 | + | 73 | 399 | RP11-812E19.9 | Distal | 136974 | Not documented | 33 |
| | | | | | | Repeats | | | | | | | | | |
| AluSx1_dup83938 | Multi | No | — | — | SINE | Alu | chr16: 3359175-3359479 | + | 64 | 305 | ZNF75A | Proximal | 0 | Not documented | 34 |
| MLT2C1_dup2235 | Multi | No | — | — | LTR | ERVL | chr16: 33646016-33646179 | + | 170 | 164 | RP11-812E19.9 | Proximal | 866 | Not documented | 35 |
| L3b_dup6163 | Multi | No | — | — | LINE | CR1 | chr16: 3368474-3368560 | + | 100 | 87 | ZNF75A | Proximal | 0 | Not documented | 36 |
| AluSz_dup78056 | Multi | No | — | — | SINE | Alu | chr16: 33702657-33702956 | − | 53 | 300 | RP11-812E19.9 | Distal | 54962 | Not documented | 37 |
| AluJo_dup57163 | Multi | No | — | — | SINE | Alu | chr16: 33703299-33703595 | + | 61 | 297 | RP11-812E19.9 | Distal | 55604 | Not documented | 38 |
| L1ME1_dup27179 | Multi | No | — | — | LINE | Other L1 | chr16: 33742304-33742489 | − | 110 | 186 | RP11-812E19.9 | Distal | 94609 | Not documented | 39 |
| AluSg7_dup6598 | Multi | No | — | — | SINE | Alu | chr16: 33761080-33761171 | − | 50 | 92 | RP11-812E19.9 | Distal | 113385 | Not documented | 40 |
| MIR_dup148402 | Multi | No | — | — | SINE | MIR | chr16: 33780697-33780770 | − | 110 | 74 | RP11-812E19.9 | Distal | 133002 | Not documented | 41 |
| L1PB4_dup6644 | Multi | No | — | — | LINE | L1PA\|B\|x | chr16: 33813669-33814440 | − | 91 | 772 | RP11-812E19.9 | Distal | 165974 | Not documented | 42 |
| MLT1A0_dup17950 | Multi | No | — | — | LTR | ERVL- | chr16: 33843762-33844055 | − | 110 | 294 | RP11-812E19.9 | Distal | 196067 | Not documented | 43 |
| | | | | | | MaLR | | | | | | | | | |
| HSATII_dup243 | Multi | No | — | — | Other | Other | chr16: 33888764-33888852 | + | 46 | 89 | RP11-812E19.9 | Distal | 241069 | Not documented | 44 |
| | | | | | | Repeats | | | | | | | | | |
| MER39B_dup1051 | Multi | No | — | — | LTR | ERV1 | chr16: 33955785-33955914 | + | 100 | 130 | CTD-2144E22.5 | Distal | 300594 | Not documented | 45 |
| MER45C_dup1011 | Multi | No | — | — | DNA | DNA | chr16: 33964922-33965030 | + | 88 | 109 | CTD-2144E22.5 | Distal | 291478 | Not documented | 46 |
| HSATII_dup271 | Multi | No | — | — | Other | Other | chr16: 34185051-34187438 | + | 56 | 2388 | CTD-2144E22.5 | Distal | 69070 | Not documented | 47 |
| | | | | | | Repeats | | | | | | | | | |
| L1PB_dup1519 | Multi | No | — | — | LINE | L1PA\|B\|x | chr16: 34215663-34216882 | + | 36 | 1220 | CTD-2144E22.5 | Distal | 39626 | Not documented | 48 |
| MER57A-int_{—} | Multi | No | — | — | LTR | ERV1 | chr16: 34218447-34219679 | + | 80 | 1233 | CTD-2144E22.5 | Distal | 36829 | Not documented | 49 |
| dup1548 | | | | | | | | | | | | | | | |
| AluSx1_dup86647 | Multi | No | — | — | SINE | Alu | chr16: 34223357-34223650 | − | 63 | 294 | CTD-2144E22.5 | Distal | 32858 | Not documented | 2150 |
| L1P1_dup2837 | Multi | No | — | — | LINE | L1PA\|B\|x | chr16: 34229376-34231396 | + | 32 | 2021 | CTD-2144E22.5 | Distal | 25112 | EVE annotated | 51 |
| HERVK-int_dup206 | Multi | No | — | — | LTR | ERVK | chr16: 34231474-34233184 | + | 5.9 | 1711 | CTD-2144E22.5 | Distal | 23324 | EVE annotated | 52 |
| AluSc8_dup17407 | Multi | No | — | — | SINE | Alu | chr16: 34264170-34264477 | − | 46 | 308 | CTD-2144E22.5 | Distal | 6893 | Not documented | 53 |
| THE1B_dup19815 | Multi | No | — | — | LTR | ERVL- | chr16: 34474626-34474793 | + | 73 | 168 | CTD-2144E22.5 | Distal | 217349 | Not documented | 54 |
| | | | | | | MaLR | | | | | | | | | |
| HERVS71-int_{—} | Multi | No | — | — | LTR | ERV1 | chr16: 34503416-34510453 | − | 85 | 7038 | CTD-2144E22.5 | Distal | 246139 | EVE annotated | 55 |
| dup121 | | | | | | | | | | | | | | | |
| L4_dup14856 | Multi | No | — | — | LINE | RTE | chr16: 35036713-35036778 | − | 140 | 66 | CTD-2144E22.5 | Distal | 779436 | Not documented | 56 |
| AluSx_dup111737 | Uniquely | No | — | — | SINE | Alu | chr16: 46731745-46732034 | + | 45 | 290 | ORC6 | Proximal | 0 | Not documented | 57 |
| LTR12C_dup2432 | Multi | No | — | — | LTR | ERV1 | chr16: 47177625-47177852 | + | 57 | 228 | NETO2 | Proximal | 0 | Not documented | 58 |
| MIRb_dup191533 | Multi | No | — | — | SINE | MIR | chr16: 47188905-47189159 | − | 130 | 255 | ITFG1 | Proximal | 0 | Not documented | 59 |
| MIRb_dup191622 | Multi | No | — | — | SINE | MIR | chr16: 48386861-48387015 | + | 130 | 155 | LONP2 | Proximal | 0 | Not documented | 60 |
| MER3_dup9090 | Multi | No | — | — | DNA | DNA | chr16: 54146246-54146448 | − | 72 | 203 | FTO | Proximal | 0 | Not documented | 61 |
| MIR_dup149081 | Multi | No | — | — | SINE | MIR | chr16: 54146835-54147052 | + | 100 | 218 | FTO | Proximal | 0 | Not documented | 62 |
| MIRb_dup192212 | Multi | No | — | — | SINE | MIR | chr16: 54147429-54147552 | + | 140 | 124 | FTO | Proximal | 0 | Not documented | 63 |
| MER102b_dup3456 | Multi | No | — | — | DNA | DNA | chr16: 54147568-54147708 | + | 120 | 141 | FTO | Proximal | 0 | Not documented | 64 |
| AluSc_dup28075 | Multi | No | — | — | SINE | Alu | chr16: 54147709-54148015 | − | 43 | 307 | FTO | Proximal | 0 | Not documented | 65 |
| MER102b_dup3457 | Multi | No | — | — | DNA | DNA | chr16: 54148016-54148205 | + | 130 | 190 | FTO | Proximal | 0 | Not documented | 66 |
| L1MB3_dup14285 | Multi | No | — | — | LINE | Other L1 | chr16: 56510399-56510718 | − | 63 | 320 | OGFOD1 | Proximal | 0 | Not documented | 67 |
| L1MC4a_dup23272 | Multi | No | — | — | LINE | Other L1 | chr16: 56535825-56536024 | − | 120 | 200 | BBS2 | Proximal | 0 | Not documented | 68 |
| AluSz_dup78487 | Uniquely | No | — | — | SINE | Alu | chr16: 56543135-56543437 | + | 57 | 303 | BBS2 | Proximal | 0 | Not documented | 69 |
| L4_dup14913 | Multi/ | No | — | — | LINE | RTE | chr16: 57673541-57673585 | − | 120 | 45 | GPR56 | Proximal | 0 | Not documented | 70 |
| | Uniquely | | | | | | | | | | | | | | |
| AluSz6_dup37069 | Multi/ | No | — | — | SINE | Alu | chr16: 57675478-57675776 | − | 56 | 299 | GPR56 | Proximal | 0 | Not documented | 71 |
| | Uniquely | | | | | | | | | | | | | | |
| L2b_dup82597 | Multi/ | No | — | — | LINE | L2 | chr16: 57698574-57698807 | − | 160 | 234 | GPR56 | Proximal | 0 | Not documented | 72 |
| | Uniquely | | | | | | | | | | | | | | |
| L1ME4a_dup37483 | Multi | No | — | — | LINE | Other L1 | chr16: 57698830-57698993 | − | 130 | 164 | GPR56 | Proximal | 0 | Not documented | 73 |
| Tigger3b_dup5790 | Uniquely | No | — | — | DNA | DNA | chr16: 58158287-58159306 | − | 57 | 1020 | C16orf80 | Proximal | 0 | Not documented | 74 |
| L1PA10_dup6245 | Uniquely | No | — | — | LINE | L1PA\|B\|x | chr16: 58363750-58364460 | − | 36 | 711 | GINS3 | Proximal | 0 | Not documented | 2175 |
| L1PA14_dup2804 | Multi | No | — | — | LINE | L1PA\|B\|x | chr16: 61984605-61984964 | + | 60 | 360 | CDH8 | Proximal | 0 | Not documented | 76 |
| L2c_dup124027 | Uniquely | No | — | — | LINE | L2 | chr16: 65065289-65065503 | − | 160 | 215 | CDH11 | Proximal | 0 | Not documented | 77 |
| FLAM_A_dup13509 | Multi | No | — | — | SINE | Alu | chr16: 66978093-66978226 | + | 88 | 134 | CES2 | Proximal | 0 | Not documented | 78 |
| FLAM_C_dup17871 | Multi | No | — | — | SINE | Alu | chr16: 67133319-67133436 | − | 42 | 118 | CBFB | Proximal | 0 | Not documented | 79 |
| L2c_dup124153 | Multi | No | — | — | LINE | L2 | chr16: 67209504-67209581 | + | 140 | 78 | NOL3 | Proximal | 0 | Not documented | 80 |
| MIRc_dup89501 | Multi | No | — | — | SINE | MIR | chr16: 69376035-69376132 | + | 150 | 98 | NIP7 | Proximal | 0 | Not documented | 81 |
| AluSz_dup79074 | Multi | No | — | — | SINE | Alu | chr16: 69376216-69376497 | + | 63 | 282 | NIP7 | Proximal | 0 | Not documented | 82 |
| AluY_dup97426 | Multi/ | No | — | — | SINE | Alu | chr16: 69390423-69390732 | + | 25 | 310 | TERF2 | Proximal | 0 | Not documented | 83 |
| | Uniquely | | | | | | | | | | | | | | |
| AluJr_dup62728 | Multi | No | — | — | SINE | Alu | chr16: 69496865-69496990 | + | 58 | 126 | CYB5B | Proximal | 0 | Not documented | 84 |
| AluSz_dup79159 | Multi | No | — | — | SINE | Alu | chr16: 70281676-70281979 | + | 66 | 304 | EXOSC6 | Distal | 2156 | Not documented | 85 |
| AluJb_dup116565 | Multi | No | — | — | SINE | Alu | chr16: 70282505-70282816 | − | 75 | 312 | EXOSC6 | Proximal | 1319 | Not documented | 86 |
| AluSz_dup79160 | Multi | No | — | — | SINE | Alu | chr16: 70283020-70283314 | + | 60 | 295 | EXOSC6 | Proximal | 821 | Not documented | 87 |
| AluSz_dup79172 | Multi | No | — | — | SINE | Alu | chr16: 70406854-70407148 | + | 52 | 295 | DDX19A | Proximal | 0 | Not documented | 88 |
| AluSx_dup113205 | Multi | No | — | — | SINE | Alu | chr16: 70412069-70412326 | + | 39 | 258 | ST3GAL2 | Proximal | 1013 | Not documented | 89 |
| L3_dup39872 | Multi | No | — | — | LINE | CR1 | chr16: 70548206-70548270 | − | 150 | 65 | COG4 | Proximal | 0 | Not documented | 90 |
| L2_dup49541 | Multi | No | — | — | LINE | L2 | chr16: 70699682-70700081 | − | 150 | 400 | MTSS1L | Proximal | 0 | Not documented | 91 |
| MLT1A0_dup18127 | Uniquely | No | — | — | LTR | ERVL- | chr16: 70702491-70702836 | + | 87 | 346 | MTSS1L | Proximal | 0 | Not documented | 92 |
| | | | | | | MaLR | | | | | | | | | |
| L1ME3A_dup13644 | Uniquely | No | — | — | LINE | Other L1 | chr16: 70702837-70703304 | + | 100 | 468 | MTSS1L | Proximal | 0 | Not documented | 93 |
| L1MC4a_dup23464 | Multi/ | No | — | — | LINE | Other L1 | chr16: 70705336-70705969 | + | 90 | 634 | MTSS1L | Proximal | 0 | Not documented | 94 |
| | Uniquely | | | | | | | | | | | | | | |
| L1M5_dup55243 | Multi/ | No | — | — | LINE | Other L1 | chr16: 71481567-71481824 | − | 140 | 258 | ZNF23 | Proximal | 0 | Not documented | 95 |
| | Uniquely | | | | | | | | | | | | | | |
| MLT1L_dup10420 | Multi | No | — | — | LTR | ERVL- | chr16: 72118723-72118933 | − | 120 | 211 | TXNL4B | Proximal | 0 | Not documented | 96 |
| | | | | | | MaLR | | | | | | | | | |
| MIR3_dup78191 | Multi | No | — | — | SINE | MIR | chr16: 72119308-72119346 | − | 130 | 39 | TXNL4B | Proximal | 0 | Not documented | 97 |
| AluY_dup97670 | Multi/ | No | — | — | SINE | Alu | chr16: 72119629-72119917 | + | 33 | 289 | TXNL4B | Proximal | 0 | Not documented | 98 |
| | Uniquely | | | | | | | | | | | | | | |
| Tigger1_dup10551 | Uniquely | No | — | — | DNA | DNA | chr16: 72474595-72475877 | − | 56 | 1283 | PMFBP1 | Distal | 263819 | Not documented | 99 |
| L1ME3C_dup10719 | Uniquely | No | — | — | LINE | Other L1 | chr16: 72521013-72521792 | − | 130 | 780 | ZFHX3 | Distal | 294993 | Not documented | 2200 |
| L2c_dup124438 | Multi | No | — | — | LINE | L2 | chr16: 74482173-74482218 | − | 81 | 46 | GLG1 | Distal | 3639 | Not documented | 1 |
| AluSx_dup113523 | Multi | No | — | — | SINE | Alu | chr16: 74482408-74482667 | + | 60 | 260 | GLG1 | Distal | 3190 | Not documented | 2 |
| AluSx3_dup23812 | Uniquely | No | — | — | SINE | Alu | chr16: 74619035-74619320 | + | 57 | 286 | GLG1 | Proximal | 0 | Not documented | 3 |
| AluSz_dup79443 | Multi | No | — | — | SINE | Alu | chr16: 75044601-75044905 | − | 48 | 305 | ZNRF1 | Proximal | 0 | Not documented | 4 |
| FLAM_A_dup13614 | Multi | No | — | — | SINE | Alu | chr16: 75045306-75045429 | − | 85 | 124 | ZNRF1 | Proximal | 0 | Not documented | 5 |
| L1MC4a_dup23528 | Multi | No | — | — | LINE | Other L1 | chr16: 75205725-75206120 | + | 130 | 396 | ZFP1 | Proximal | 0 | Not documented | 6 |
| AluSx1_dup88152 | Multi | No | — | — | SINE | Alu | chr16: 75477705-75478005 | + | 70 | 301 | TMEM170A | Proximal | 0 | Not documented | 7 |
| 7SK_dup646 | Multi | No | — | — | Other | Other | chr16: 75532602-75532756 | + | 110 | 155 | CHST6 | Distal | 3321 | Not documented | 8 |
| | | | | | | Repeats | | | | | | | | | |
| AluSz_dup79499 | Multi | No | — | — | SINE | Alu | chr16: 75632970-75633279 | − | 50 | 310 | ADAT1 | Proximal | 0 | Not documented | 9 |
| L2_dup48548 | Multi/ | No | — | — | LINE | L2 | chr16: 768855-768923 | + | 140 | 69 | METRN | Proximal | 0 | Not documented | 10 |
| | Uniquely | | | | | | | | | | | | | | |
| AluSc8_dup16914 | Multi/ | No | — | — | SINE | Alu | chr16: 769518-769826 | + | 53 | 309 | METRN | Proximal | 0 | Not documented | 11 |
| | Uniquely | | | | | | | | | | | | | | |
| AluJr_dup63183 | Multi | No | — | — | SINE | Alu | chr16: 81014213-81014518 | + | 77 | 306 | CMC2 | Proximal | 0 | Not documented | 12 |
| L1MB2_dup7417 | Multi | No | — | — | LINE | Other L1 | chr16: 81031914-81032400 | + | 77 | 487 | CMC2 | Proximal | 0 | Not documented | 13 |
| L1PA16_dup12734 | Multi/ | No | — | — | LINE | L1PA\|B\|x | chr16: 81034125-81034957 | + | 52 | 833 | CMC2 | Proximal | 0 | Not documented | 14 |
| | Uniquely | | | | | | | | | | | | | | |
| L2c_dup121870 | Multi/ | No | — | — | LINE | L2 | chr16: 8877067-8877400 | − | 150 | 334 | TMEM186 | Proximal | 0 | Not documented | 15 |
| | Uniquely | | | | | | | | | | | | | | |
| AluYf4_dup1144 | Uniquely | No | — | — | SINE | Alu | chr16: 88869455-88869750 | − | 20 | 296 | CDT1 | Proximal | 0 | Not documented | 16 |
| MER4A_dup924 | Multi | No | — | — | LTR | ERV1 | chr16: 88880089-88880575 | + | 79 | 487 | GALNS | Proximal | 0 | Not documented | 17 |
| MIRc_dup87367 | Multi | No | — | — | SINE | MIR | chr16: 8889308-8889492 | − | 140 | 185 | TMEM186 | Proximal | 0 | Not documented | 18 |
| HERVH-int_dup5288 | Uniquely | No | — | — | LTR | ERV1 | chr16: 8932258-8935475 | − | 30 | 3218 | PMM2 | Proximal | 0 | EVE annotated | 19 |
| MIR3_dup76390 | Multi | No | — | — | SINE | MIR | chr16: 8946836-8946992 | + | 110 | 157 | CARHSP1 | Proximal | 0 | Not documented | 20 |
| AluSx_dup108995 | Multi/ | No | — | — | SINE | Alu | chr16: 8947661-8947940 | + | 55 | 280 | CARHSP1 | Proximal | 0 | Not documented | 21 |
| | Uniquely | | | | | | | | | | | | | | |
| L2a_dup148200 | Multi | No | — | — | LINE | L2 | chr16: 90025592-90025635 | − | 130 | 44 | DEF8 | Proximal | 0 | Not documented | 22 |
| L1ME4a_dup38026 | Multi | No | — | — | LINE | Other L1 | chr16: 90111213-90111404 | − | 130 | 192 | GAS8 | Proximal | 0 | Not documented | 23 |
| MIR3_dup78761 | Multi | No | — | — | SINE | MIR | chr17: 1297381-1297598 | + | 160 | 218 | YWHAE | Proximal | 0 | Not documented | 24 |
| MLT1L_dup10578 | Uniquely | No | — | — | LTR | ERVL- | chr17: 13937439-13937720 | + | 130 | 282 | COX10 | Distal | 35094 | Not documented | 2225 |
| | | | | | | MaLR | | | | | | | | | |
| L3_dup40194 | Multi | No | — | — | LINE | CR1 | chr17: 1399432-1399518 | + | 120 | 87 | INPP5K | Proximal | 0 | Not documented | 26 |
| MSTA_dup17575 | Multi | No | — | — | LTR | ERVL- | chr17: 15622049-15622446 | − | 72 | 398 | ZNF286A | Proximal | | Not documented | 27 |
| | | | | | | MaLR | | | | | | | | | |
| MER5B_dup21968 | Multi | No | — | — | DNA | DNA | chr17: 15931561-15931686 | + | 160 | 126 | TTC19 | Proximal | 0 | Not documented | 28 |
| MIRc_dup91056 | Uniquely | No | — | — | SINE | MIR | chr17: 19208000-19208124 | − | 130 | 125 | EPN2 | Proximal | 0 | Not documented | 29 |
| L1M4c_dup5473 | Multi | No | — | — | LINE | Other L1 | chr17: 19350190-19350457 | − | 110 | 268 | RNF112 | Distal | 29602 | Not documented | 30 |
| AluJb_dup119378 | Multi/ | No | — | — | SINE | Alu | chr17: 19579685-19579981 | + | 72 | 297 | ALDH3A2 | Proximal | 0 | Not documented | 31 |
| | Uniquely | | | | | | | | | | | | | | |
| MER91A_dup3160 | Uniquely | No | — | — | DNA | DNA | chr17: 20063158-20063303 | + | 130 | 146 | SPECC1 | Proximal | 0 | Not documented | 32 |
| MLT1J1_dup4382 | Uniquely | No | — | — | LTR | ERVL- | chr17: 20063448-20063781 | − | 110 | 334 | SPECC1 | Proximal | 0 | Not documented | 33 |
| | | | | | | MaLR | | | | | | | | | |
| AluSq_dup17974 | Uniquely | No | — | — | SINE | Alu | chr17: 20141073-20141354 | − | 66 | 282 | SPECC1 | Proximal | 0 | Not documented | 34 |
| L1MEg_dup15970 | Uniquely | No | — | — | LINE | Other L1 | chr17: 20152755-20153643 | + | 110 | 889 | SPECC1 | Proximal | 0 | Not documented | 35 |
| L1MC_dup10370 | Uniquely | No | — | — | LINE | Other L1 | chr17: 20214984-20215586 | − | 95 | 603 | SPECC1 | Proximal | 0 | Not documented | 36 |
| AluJo_dup59462 | Multi | No | — | — | SINE | Alu | chr17: 20217807-20217967 | + | 79 | 161 | SPECC1 | Proximal | 0 | Not documented | 37 |
| AluSx_dup116794 | Multi | No | — | — | SINE | Alu | chr17: 20904094-20904374 | + | 47 | 281 | USP22 | Proximal | 0 | Not documented | 38 |
| MER58B_dup5925 | Multi | No | — | — | DNA | DNA | chr17: 20904696-20904944 | + | 110 | 249 | USP22 | Proximal | 0 | Not documented | 39 |
| AluY_dup98938 | Multi | No | — | — | SINE | Alu | chr17: 2225797-2226105 | − | 26 | 309 | TSR1 | Proximal | 0 | Not documented | 40 |
| AluSx1_dup89255 | Multi | No | — | — | SINE | Alu | chr17: 2226116-2226358 | − | 62 | 243 | TSR1 | Proximal | 0 | Not documented | 41 |
| MER6B_dup603 | Uniquely | No | — | — | DNA | DNA | chr17: 2228265-2228474 | − | 110 | 210 | TSR1 | Proximal | 0 | Not documented | 42 |
| MIRb_dup198112 | Uniquely | No | — | — | SINE | MIR | chr17: 26727791-26728004 | + | 140 | 214 | SLC46A1 | Proximal | 0 | Not documented | 43 |
| AluSq2_dup45827 | Multi/ | No | — | — | SINE | Alu | chr17: 27383720-27384025 | + | 50 | 306 | PIPOX | Proximal | 0 | Not documented | 44 |
| | Uniquely | | | | | | | | | | | | | | |
| MIRb_dup198975 | Multi | No | — | — | SINE | MIR | chr17: 33173899-33174123 | − | 120 | 225 | CCT6B | Distal | 80756 | Not documented | 45 |
| AluSz6_dup38490 | Multi | No | — | — | SINE | Alu | chr17: 33478373-33478496 | − | 51 | 124 | UNC45B | Proximal | 0 | Not documented | 46 |
| AluSz6_dup38502 | Multi | No | — | — | SINE | Alu | chr17: 33901007-33901315 | + | 51 | 309 | PEX12 | Proximal | 500 | Not documented | 47 |
| MIR3_dup80088 | Multi | No | — | — | SINE | MIR | chr17: 34051626-34051790 | − | 130 | 165 | AP2B1 | Proximal | 0 | Not documented | 48 |
| AluSz6_dup38535 | Uniquely | No | — | — | SINE | Alu | chr17: 34894610-34894903 | − | 55 | 294 | PIGW | Proximal | 0 | Not documented | 49 |
| AluSx_dup115155 | Multi | No | — | — | SINE | Alu | chr17: 3570356-3570655 | + | 30 | 300 | TAX1BP3 | Proximal | 0 | Not documented | 2250 |
| LTR79_dup3732 | Uniquely | No | — | — | LTR | ERVL | chr17: 37529409-37529812 | + | 130 | 404 | FBXL20 | Proximal | 0 | Not documented | 51 |
| L2b_dup85305 | Multi/ | No | — | — | LINE | L2 | chr17: 38249792-38250116 | + | 120 | 325 | NR1D1 | Proximal | 0 | Not documented | 52 |
| | Uniquely | | | | | | | | | | | | | | |
| AluSx_dup118200 | Uniquely | No | — | — | SINE | Alu | chr17: 38436440-38436734 | + | 48 | 295 | WIPF2 | Proximal | 0 | Not documented | 53 |
| AluSz_dup82129 | Multi | No | — | — | SINE | Alu | chr17: 39958530-39958804 | − | 28 | 275 | LEPREL4 | Proximal | 0 | Not documented | 54 |
| AluSx1_dup91574 | Uniquely | No | — | — | SINE | Alu | chr17: 39958807-39959103 | − | 46 | 297 | LEPREL4 | Proximal | 0 | Not documented | 55 |
| MIR3_dup80401 | Multi | No | — | — | SINE | MIR | chr17: 40176904-40177016 | + | 110 | 113 | NKIRAS2 | Proximal | 0 | Not documented | 56 |
| AluJr_dup64957 | Multi | No | — | — | SINE | Alu | chr17: 40555092-40555246 | − | 76 | 155 | PTRF | Proximal | 0 | Not documented | 57 |
| AluSx_dup118425 | Multi/ | No | — | — | SINE | Alu | chr17: 40555640-40555958 | − | 55 | 319 | PTRF | Proximal | 0 | Not documented | 58 |
| | Uniquely | | | | | | | | | | | | | | |
| MER21A_dup1635 | Multi | Nc | — | — | LTR | ERVL | chr17: 40813111-40813265 | + | 130 | 155 | TUBG2 | Proximal | 0 | Not documented | 59 |
| LTR7C_dup265 | Uniquely | No | — | — | LTR | ERV1 | chr17: 41300345-41300751 | − | 57 | 407 | NBR1 | Distal | 21748 | Not documented | 60 |
| Harlequin- | Uniquely | No | — | — | LTR | ERV1 | chr17: 41318173-41319262 | − | 38 | 1090 | NBR1 | Distal | 3237 | Not documented | 61 |
| int_dup435 | | | | | | | | | | | | | | | |
| MIR3_dup80476 | Multi | No | — | — | SINE | MIR | chr17: 41844054-41844103 | − | 93 | 50 | DUSP3 | Proximal | 0 | Not documented | 62 |
| MIRc_dup91991 | Multi | No | — | — | SINE | MIR | chr17: 41844841-41845059 | + | 140 | 219 | DUSP3 | Proximal | 0 | Not documented | 63 |
| L1MC4_dup25596 | Multi | No | — | — | LINE | Other L1 | chr17: 42112932-42113098 | + | 170 | 167 | LSM12 | Proximal | 0 | Not documented | 64 |
| AluJb_dup121471 | Uniquely | No | — | — | SINE | Alu | chr17: 42253441-42253751 | + | 61 | 311 | ASB16 | Proximal | 0 | Not documented | 65 |
| MIR3_dup80508 | Uniquely | No | — | — | SINE | MIR | chr17: 42253789-42253981 | + | 120 | 193 | ASB16 | Proximal | 0 | Not documented | 66 |
| L2a_dup150639 | Uniquely | No | — | — | LINE | L2 | chr17: 42965795-42967021 | − | 100 | 1227 | EFTUD2 | Proximal | 0 | Not documented | 67 |
| MIR_dup154760 | Multi/ | No | — | — | SINE | MIR | chr17: 42983296-42983361 | + | 130 | 66 | GFAP | Proximal | 0 | Not documented | 68 |
| | Uniquely | | | | | | | | | | | | | | |
| FLAM_A_dup14067 | Multi/ | No | — | — | SINE | Alu | chr17: 42984079-42984213 | + | 100 | 135 | GFAP | Proximal | 0 | Not documented | 69 |
| | Uniquely | | | | | | | | | | | | | | |
| AluSx_dup118843 | Multi/ | No | — | — | SINE | Alu | chr17: 42989479-42989790 | − | 50 | 312 | GFAP | Proximal | 0 | Not documented | 70 |
| | Uniquely | | | | | | | | | | | | | | |
| MIR_dup154761 | Uniquely | No | — | — | SINE | MIR | chr17: 42990231-42990406 | + | 110 | 176 | GFAP | Proximal | 0 | Not documented | 71 |
| L2c_dup127161 | Multi/ | No | — | — | LINE | L2 | chr17: 43100732-43101146 | − | 160 | 415 | DCAKD | Proximal | 0 | Not documented | 72 |
| | Uniquely | | | | | | | | | | | | | | |
| AluJr_dup65152 | Multi/ | No | — | — | SINE | Alu | chr17: 43189108-43189423 | + | 55 | 316 | PLCD3 | Proximal | 0 | Not documented | 73 |
| | Uniquely | | | | | | | | | | | | | | |
| AluJr4_dup14906 | Uniquely | No | — | — | SINE | Alu | chr17: 44040010-44040318 | + | 62 | 309 | MAPT | Proximal | 0 | Not documented | 74 |
| LTR33B_dup1414 | Multi | No | — | — | LTR | ERVL | chr17: 48562604-48562862 | − | 130 | 259 | RSAD1 | Proximal | 0 | Not documented | 2275 |
| LTR33B_dup1415 | Multi | No | — | — | LTR | ERVL | chr17: 48562893-48563000 | − | 130 | 108 | RSAD1 | Proximal | 0 | Not documented | 76 |
| MIR3_dup80878 | Multi/ | No | — | — | SINE | MIR | chr17: 48768721-48768843 | − | 84 | 123 | ABCC3 | Proximal | 0 | Not documented | 77 |
| | Uniquely | | | | | | | | | | | | | | |
| AluSz_dup82869 | Multi | No | — | — | SINE | Alu | chr17: 48771210-48771510 | + | 50 | 301 | ANKRD40 | Proximal | 0 | Not documented | 78 |
| AluJr_dup65430 | Multi | No | — | — | SINE | Alu | chr17: 48772448-48772566 | + | 54 | 119 | ANKRD40 | Proximal | 0 | Not documented | 79 |
| MIRb_dup196690 | Multi | No | — | — | SINE | MIR | chr17: 5016546-5016763 | − | 140 | 218 | ZNF232 | Proximal | 0 | Not documented | 80 |
| MLT1A_dup7944 | Uniquely | No | — | — | LTR | ERVL- | chr17: 5117183-5117559 | + | 94 | 377 | SCIMP | Proximal | 0 | Not documented | 81 |
| | | | | | | MaLR | | | | | | | | | |
| L1MC4_dup25223 | Uniquely | No | — | — | LINE | Other L1 | chr17: 5381046-5381375 | + | 90 | 330 | DERL2 | Proximal | 0 | Not documented | 82 |
| AluJr4_dup14971 | Multi | No | — | — | SINE | Alu | chr17: 5393186-5393397 | − | 79 | 212 | MIS12 | Proximal | 0 | Not documented | 83 |
| AluSx_dup119791 | Uniquely | No | — | — | SINE | Alu | chr17: 55640177-55640482 | + | 45 | 306 | MSI2 | Proximal | 0 | Not documented | 84 |
| L2c_dup128112 | Multi | No | — | — | LINE | L2 | chr17: 57187416-57187526 | − | 110 | 111 | SKA2 | Proximal | 0 | Not documented | 85 |
| AluSg7_dup7058 | Multi | No | — | — | SINE | Alu | chr17: 57187872-57188172 | + | 35 | 301 | SKA2 | Proximal | 0 | Not documented | 86 |
| L1ME4a_dup39178 | Multi | No | — | — | LINE | Other L1 | chr17: 57188598-57188800 | − | 150 | 203 | SKA2 | Proximal | 0 | Not documented | 87 |
| AluSq2_dup46846 | Multi | No | — | — | SINE | Alu | chr17: 57916349-57916651 | − | 40 | 303 | VMP1 | Proximal | 0 | Not documented | 88 |
| L4_dup15385 | Multi | No | — | — | LINE | RTE | chr17: 58179944-58180005 | − | 97 | 62 | HEATR6 | Distal | 23653 | Not documented | 89 |
| MLT1K_dup15635 | Multi | No | — | — | LTR | ERVL- | chr17: 6027352-6027780 | + | 140 | 429 | WSCD1 | Proximal | 0 | Not documented | 90 |
| | | | | | | MaLR | | | | | | | | | |
| FLAM_A_dup14228 | Multi | No | — | — | SINE | Alu | chr17: 60526161-60526293 | + | 72 | 133 | METTL2A | Proximal | 0 | Not documented | 91 |
| MIRc_dup92933 | Multi | No | — | — | SINE | MIR | chr17: 61905187-61905408 | − | 140 | 222 | PSMC5 | Proximal | 0 | Not documented | 92 |
| L1ME4a_dup39320 | Uniquely | No | — | — | LINE | Other L1 | chr17: 63012954-63013287 | − | 140 | 334 | GNA13 | Proximal | 0 | Not documented | 93 |
| AluSq_dup18487 | Multi | No | — | — | SINE | Alu | chr17: 64804822-64805126 | − | 44 | 305 | PRKCA | Proximal | 0 | Not documented | 94 |
| L1PREC2_dup7058 | Uniquely | No | — | — | LINE | L1PA\|B\|x | chr17: 65491491-65491863 | − | 40 | 373 | PITPNC1 | Proximal | 0 | Not documented | 95 |
| AluY_dup103242 | Multi/ | No | — | — | SINE | Alu | chr17: 66038717-66038998 | + | 23 | 282 | KPNA2 | Proximal | 0 | Not documented | 96 |
| | Uniquely | | | | | | | | | | | | | | |
| AluJb_dup123723 | Multi | No | — | — | SINE | Alu | chr17: 66122123-66122426 | − | 69 | 304 | KPNA2 | Distal | 79166 | Not documented | 97 |
| L1ME4a_dup38045 | Multi | No | — | — | LINE | Other L1 | chr17: 674677-674826 | + | 160 | 150 | GLOD4 | Proximal | 0 | Not documented | 98 |
| FLAM_C_dup18328 | Uniquely | No | — | — | SINE | Alu | chr17: 6905826-6905957 | + | 79 | 132 | ALOX12 | Proximal | 0 | Not documented | 99 |
| L3_dup41281 | Multi | No | — | — | LINE | CR1 | chr17: 70067150-70067250 | + | 150 | 101 | AC007461.1 | Distal | 30279 | Not documented | 2300 |
| LTR33_dup8325 | Multi | No | — | — | LTR | ERVL | chr17: 70077995-70078138 | − | 150 | 144 | SOX9 | Distal | 39024 | Not documented | 1 |
| MLT1L_dup10811 | Multi | No | — | — | LTR | ERVL- | chr17: 70081165-70081293 | − | 110 | 129 | SOX9 | Distal | 35869 | Not documented | 2 |
| | | | | | | MaLR | | | | | | | | | |
| X8_LINE_dup280 | Multi/ | No | — | — | LINE | CR1 | chr17: 70121870-70121938 | − | 150 | 69 | SOX9 | Proximal | 0 | Not documented | 3 |
| | Uniquely | | | | | | | | | | | | | | |
| AluJb_dup123904 | Multi | No | — | — | SINE | Alu | chr17: 70400523-70400818 | − | 65 | 296 | SLC39A11 | Distal | 241271 | Not documented | 4 |
| MIRb_dup202390 | Uniquely | No | — | — | SINE | MIR | chr17: 70424010-70424197 | + | 130 | 188 | SLC39A11 | Distal | 217892 | Not documented | 5 |
| AluSz_dup84029 | Multi/ | No | — | — | SINE | Alu | chr17: 70474465-70474773 | + | 76 | 309 | SLC39A11 | Distal | 167316 | Not documented | 6 |
| | Uniquely | | | | | | | | | | | | | | |
| MIRb_dup202396 | Uniquely | No | — | — | SINE | MIR | chr17: 70499760-70499991 | − | 140 | 232 | SLC39A11 | Distal | 142098 | Not documented | 7 |
| L1ME2z_dup6778 | Multi | No | — | — | LINE | Other L1 | chr17: 70501817-70502142 | + | 91 | 326 | SLC39A11 | Distal | 139947 | Not documented | 8 |
| AluSp_dup42385 | Multi/ | No | — | — | SINE | Alu | chr17: 70502143-70502444 | + | 45 | 302 | SLC39A11 | Distal | 139645 | Not documented | 9 |
| | Uniquely | | | | | | | | | | | | | | |
| AluY_dup103410 | Multi/ | No | — | — | SINE | Alu | chr17: 70502445-70502741 | + | 34 | 297 | SLC39A11 | Distal | 139348 | Not documented | 10 |
| | Uniquely | | | | | | | | | | | | | | |
| L1MB3_dup15007 | Multi | No | — | — | LINE | Other L1 | chr17: 70520522-70520846 | + | 73 | 325 | SLC39A11 | Distal | 121243 | Not documented | 11 |
| FLAM_C_dup19156 | Multi | No | — | — | SINE | Alu | chr17: 70520847-70520981 | + | 71 | 135 | SLC39A11 | Distal | 121108 | Not documented | 12 |
| MER53_dup5173 | Multi/ | No | — | — | DNA | DNA | chr17: 71280191-71280358 | + | 92 | 168 | CDC42EP4 | Proximal | 0 | Not documented | 13 |
| | Uniquely | | | | | | | | | | | | | | |
| L2c_dup125388 | Multi | No | — | — | LINE | L2 | chr17: 7217060-7217163 | + | 160 | 104 | GPS2 | Proximal | 0 | Not documented | 14 |
| MIRc_dup93300 | Multi | No | — | — | SINE | MIR | chr17: 72766776-72766836 | + | 100 | 61 | NAT9 | Proximal | 0 | Not documented | 15 |
| AluSz6_dup39678 | Uniquely | No | — | — | SINE | Alu | chr17: 73425303-73425614 | + | 45 | 312 | KIAA0195 | Distal | 11627 | Not documented | 16 |
| AluSp_dup40337 | Multi | No | — | — | SINE | Alu | chr17: 7360355-7360648 | + | 30 | 294 | CHRNB1 | Proximal | 0 | Not documented | 17 |
| L2a_dup152452 | Multi/ | No | — | — | LINE | L2 | chr17: 73870242-73870307 | − | 90 | 66 | TRIM47 | Proximal | 0 | Not documented | 18 |
| | Uniquely | | | | | | | | | | | | | | |
| L3b_dup6271 | Multi | No | — | — | LINE | CR1 | chr17: 7404245-7404309 | − | 88 | 65 | POLRZA | Proximal | 0 | Not documented | 19 |
| MER112_dup3993 | Multi | No | — | — | DNA | DNA | chr17: 74559565-74559613 | − | 120 | 49 | ST6GALNAC2 | Proximal | 180 | Not documented | 20 |
| AluSx_dup121656 | Multi | No | — | — | SINE | Alu | chr17: 74559800-74560140 | − | 61 | 341 | ST6GALNAC2 | Proximal | 0 | Not documented | 21 |
| AluSq_dup18605 | Uniquely | No | — | — | SINE | Alu | chr17: 75090117-75090398 | − | 37 | 282 | SEC14L1 | Proximal | 0 | Not documented | 22 |
| AluSp_dup40355 | Multi/ | No | — | — | SINE | Alu | chr17: 7559973-7560298 | − | 35 | 326 | ATP1B2 | Proximal | 0 | Not documented | 23 |
| | Uniquely | | | | | | | | | | | | | | |
| AluJb_dup118675 | Multi | No | — | — | SINE | Alu | chr17: 7571867-7572174 | + | 72 | 308 | TP53 | Proximal | 0 | Not documented | 24 |
| MIRb_dup196902 | Multi/ | No | — | — | SINE | MIR | chr17: 7572460-7572562 | − | 130 | 103 | TP53 | Proximal | 0 | Not documented | 2325 |
| | Uniquely | | | | | | | | | | | | | | |
| L1MA4_dup9180 | Uniquely | No | — | — | LINE | Other L1 | chr17: 75974480-75975490 | + | 100 | 1011 | TNRC6C | Distal | 24760 | Not documented | 26 |
| AluJb_dup124520 | Uniquely | No | — | — | SINE | Alu | chr17: 76374101-76374411 | + | 70 | 311 | PGS1 | Proximal | 311 | Not documented | 27 |
| AluSx_dup122212 | Multi | No | — | — | SINE | Alu | chr17: 79640296-79640423 | + | 35 | 128 | CCDC137 | Proximal | 0 | Not documented | 28 |
| LTR52_dup989 | Multi | No | — | — | LTR | ERVL | chr17: 79640548-79640704 | − | 110 | 157 | CCDC137 | Proximal | 0 | Not documented | 29 |
| AluSp_dup42658 | Multi | No | — | — | SINE | Alu | chr17: 79648221-79648530 | − | 50 | 310 | ARL16 | Proximal | 0 | Not documented | 30 |
| AluJb_dup124834 | Multi | No | — | — | SINE | Alu | chr17: 79851398-79851455 | − | 72 | 58 | ANAPC11 | Proximal | 0 | Not documented | 31 |
| MLT2B4_dup4142 | Multi | No | — | — | LTR | ERVL | chr17: 79890133-79890347 | + | 88 | 215 | PYCR1 | Proximal | 0 | Not documented | 32 |
| MER31-int_dup1853 | Multi | No | — | — | LTR | ERV1 | chr17: 81188246-81188689 | − | 99 | 444 | METRNL | Distal | 135383 | Not documented | 33 |
| MIR_dup152645 | Uniquely | No | — | — | SINE | MIR | chr17: 8279553-8279746 | + | 120 | 194 | KRBA2 | Proximal | 0 | Not documented | 34 |
| AluJb_dup125513 | Multi | No | — | — | SINE | Alu | chr18: 10551101-10551233 | − | 89 | 133 | NAPG | Proximal | 0 | Not documented | 35 |
| MER57B2_dup992 | Multi/ | No | — | — | LTR | ERV1 | chr18: 19209358-19209738 | − | 69 | 381 | SNRPD1 | Proximal | 0 | Not documented | 36 |
| | Uniquely | | | | | | | | | | | | | | |
| AluSx1_dup95327 | Multi | No | — | — | SINE | Alu | chr18: 23596405-23596717 | + | 33 | 313 | SS18 | Proximal | 0 | Not documented | 37 |
| L1ME1_dup28876 | Multi | No | — | — | LINE | Other L1 | chr18: 23606205-23607330 | + | 100 | 1126 | SS18 | Proximal | 0 | Not documented | 38 |
| AluSc8_dup19087 | Multi | No | — | — | SINE | Alu | chr18: 23607331-23607666 | + | 42 | 336 | SS18 | Proximal | 0 | Not documented | 39 |
| L2b_dup87398 | Multi/ | No | — | — | LINE | L2 | chr18: 24433983-24434064 | − | 130 | 82 | AQP4 | Proximal | 0 | Not documented | 40 |
| | Uniquely | | | | | | | | | | | | | | |
| Charlie1a_dup5306 | Uniquely | No | — | — | DNA | DNA | chr18: 24476496-24477665 | + | 86 | 1170 | CHST9 | Distal | 17931 | Not documented | 41 |
| MER102b_dup3653 | Uniquely | No | — | — | DNA | DNA | chr18: 2538394-2538727 | − | 140 | 334 | METTL4 | Proximal | 0 | Not documented | 42 |
| AluJb_dup126238 | Multi | No | — | — | SINE | Alu | chr18: 25708381-25708664 | + | 70 | 284 | CDH2 | Proximal | 0 | Not documented | 43 |
| L1PA8_dup7494 | Multi/ | No | — | — | LINE | L1PA\|B\|x | chr18: 25723750-25724140 | + | 36 | 391 | CDH2 | Proximal | 0 | Not documented | 44 |
| | Uniquely | | | | | | | | | | | | | | |
| MIRb_dup204764 | Uniquely | No | — | — | SINE | MIR | chr18: 29907711-29907946 | + | 120 | 236 | GAREM | Proximal | 0 | Not documented | 45 |
| MIRb_dup204765 | Uniquely | No | — | — | SINE | MIR | chr18: 29915943-29916111 | + | 160 | 169 | GAREM | Proximal | 0 | Not documented | 46 |
| AluY_dup105497 | Multi | No | — | — | SINE | Alu | chr18: 32083244-32083547 | − | 36 | 304 | DTNA | Proximal | 0 | Not documented | 47 |
| L1MD1_dup6225 | Multi | No | — | — | LINE | Other L1 | chr18: 32083548-32083790 | − | 98 | 243 | DTNA | Proximal | 0 | Not documented | 48 |
| AluY_dup105498 | Multi/ | No | — | — | SINE | Alu | chr18: 32083791-32084119 | − | 35 | 329 | DTNA | Proximal | 0 | Not documented | 49 |
| | Uniquely | | | | | | | | | | | | | | |
| L1MD1_dup6226 | Multi/ | No | — | — | LINE | Other L1 | chr18: 32084120-32084956 | − | 98 | 837 | DTNA | Proximal | 0 | Not documented | 2350 |
| | Uniquely | | | | | | | | | | | | | | |
| MLT1D_dup18463 | Multi/ | No | — | — | LTR | ERVL- | chr18: 32084957-32085450 | − | 110 | 494 | DTNA | Proximal | 0 | Not documented | 51 |
| | Uniquely | | | | | MaLR | | | | | | | | | |
| L1MD1_dup6227 | Multi | No | — | — | LINE | Other L1 | chr18: 32085451-32086874 | − | 98 | 1424 | DTNA | Proximal | 0 | Not documented | 52 |
| MamRep605_dup4194 | Multi | No | — | — | Other | Other | chr18: 32090948-32091116 | − | 130 | 169 | DTNA | Proximal | 0 | Not documented | 53 |
| | | | | | | Repeats | | | | | | | | | |
| MIR_dup158397 | Multi | No | — | — | SINE | MIR | chr18: 32091244-32091415 | − | 150 | 172 | DTNA | Proximal | 0 | Not documented | 54 |
| AluSq2_dup48232 | Uniquely | No | — | — | SINE | Alu | chr18: 32113053-32113352 | + | 49 | 300 | DTNA | Proximal | 0 | Not documented | 55 |
| L1PA8_dup7514 | Uniquely | No | — | — | LINE | L1PA\|B\|x | chr18: 32114443-32115769 | − | 34 | 1327 | DTNA | Proximal | 0 | Not documented | 56 |
| HAL1_dup25084 | Multi/ | No | — | — | LINE | Other L1 | chr18: 32163399-32165869 | + | 130 | 2471 | DTNA | Proximal | 0 | Not documented | 57 |
| | Uniquely | | | | | | | | | | | | | | |
| Tigger1_dup11096 | Uniquely | No | — | — | DNA | DNA | chr18: 32192892-32194965 | + | 67 | 2074 | DTNA | Proximal | 0 | Not documented | 58 |
| MIRb_dup204919 | Uniquely | No | — | — | SINE | MIR | chr18: 32271317-32271440 | + | 120 | 124 | DTNA | Proximal | 0 | Not documented | 59 |
| L1PA7_dup12259 | Uniquely | No | — | — | LINE | L1PA\|B\|x | chr18: 32304745-32306224 | + | 32 | 1480 | DTNA | Proximal | 0 | Not documented | 60 |
| L1PA16_dup13114 | Multi | No | — | — | LINE | L1PA\|B\|x | chr18: 32318875-32319065 | − | 56 | 191 | DTNA | Proximal | 0 | Not documented | 61 |
| AluSq2_dup48234 | Multi | No | — | — | SINE | Alu | chr18: 32349690-32349984 | − | 45 | 295 | DTNA | Proximal | 0 | Not documented | 62 |
| MLT1A0_dup18867 | Multi | No | — | — | LTR | ERVL- | chr18: 32349985-32350141 | − | 71 | 157 | DTNA | Proximal | 0 | Not documented | 63 |
| | | | | | | MaLR | | | | | | | | | |
| AluY_dup105506 | Multi/ | No | — | — | SINE | Alu | chr18: 32364897-32365175 | − | 33 | 279 | DTNA | Proximal | 0 | Not documented | 64 |
| | Uniquely | | | | | | | | | | | | | | |
| AluY_dup105507 | Multi/ | No | — | — | SINE | Alu | chr18: 32404158-32404454 | + | 28 | 297 | DTNA | Proximal | 0 | Not documented | 65 |
| | Uniquely | | | | | | | | | | | | | | |
| L1PA8_dup7515 | Multi | No | — | — | LINE | L1PA\|B\|x | chr18: 32404467-32404544 | + | 18 | 78 | DTNA | Proximal | 0 | Not documented | 66 |
| AluSq2_dup48236 | Uniquely | No | — | — | SINE | Alu | chr18: 32411450-32411746 | + | 55 | 297 | DTNA | Proximal | 0 | Not documented | 67 |
| MSTB1_dup4589 | Multi | No | — | — | LTR | ERVL- | chr18: 32414108-32414177 | − | 68 | 70 | DTNA | Proximal | 0 | Not documented | 68 |
| | | | | | | MaLR | | | | | | | | | |
| AluSq2_dup48237 | Multi | No | — | — | SINE | Alu | chr18: 32414178-32414479 | + | 39 | 302 | DTNA | Proximal | 0 | Not documented | 69 |
| MSTB1_dup4590 | Multi/ | No | — | — | LTR | ERVL- | chr18: 32414480-32414841 | − | 68 | 362 | DTNA | Proximal | 0 | Not documented | 70 |
| | Uniquely | | | | | MaLR | | | | | | | | | |
| AluSz_dup85746 | Multi/ | No | — | — | SINE | Alu | chr18: 32416335-32416632 | + | 38 | 298 | DTNA | Proximal | 0 | Not documented | 71 |
| | Uniquely | | | | | | | | | | | | | | |
| L2b_dup87589 | Uniquely | No | — | — | LINE | L2 | chr18: 32422400-32423005 | + | 160 | 606 | DTNA | Proximal | 0 | Not documented | 72 |
| MLT1B_dup16130 | Uniquely | No | — | — | LTR | ERVL- | chr18: 32423358-32423729 | − | 76 | 372 | DTNA | Proximal | 0 | Not documented | 73 |
| | | | | | | MaLR | | | | | | | | | |
| L2a_dup154163 | Multi/ | No | — | — | LINE | L2 | chr18: 32432443-32433039 | + | 130 | 597 | DTNA | Proximal | 0 | Not documented | 74 |
| | Uniquely | | | | | | | | | | | | | | |
| MIR_dup158419 | Multi | No | — | — | SINE | MIR | chr18: 32436554-32436774 | + | 150 | 221 | DTNA | Proximal | 0 | Not documented | 2375 |
| AluY_dup105509 | Multi | No | — | — | SINE | Alu | chr18: 32444210-32444516 | − | 13 | 307 | DTNA | Proximal | 0 | Not documented | 76 |
| MamRep434_dup2018 | Multi | No | — | — | DNA | DNA | chr18: 32444525-32444668 | + | 110 | 144 | DTNA | Proximal | 0 | Not documented | 77 |
| L4_dup15665 | Multi/ | No | — | — | LINE | RTE | chr18: 32447960-32448445 | − | 140 | 486 | DTNA | Proximal | 0 | Not documented | 78 |
| | Uniquely | | | | | | | | | | | | | | |
| MER5A_dup31718 | Multi/ | No | — | — | DNA | DNA | chr18: 32469199-32469385 | + | 85 | 187 | DTNA | Proximal | 0 | Not documented | 79 |
| | Uniquely | | | | | | | | | | | | | | |
| LTR41_dup1602 | Multi | No | — | — | LTR | ERVL | chr18: 32842654-32842959 | + | 92 | 306 | ZNF397 | Proximal | 0 | Not documented | 80 |
| AluJo_dup62774 | Multi | No | — | — | SINE | Alu | chr18: 32843056-32843237 | + | 70 | 182 | ZNF397 | Proximal | 0 | Not documented | 81 |
| AluJr_dup67499 | Multi | No | — | — | SINE | Alu | chr18: 32887935-32888089 | + | 70 | 155 | ZSCAN30 | Distal | 17740 | Not documented | 82 |
| AluSx3_dup25763 | Multi | No | — | — | SINE | Alu | chr18: 32888183-32888406 | + | 40 | 224 | ZSCAN30 | Distal | 17988 | Not documented | 83 |
| MLT1K_dup16215 | Multi/ | No | — | — | LTR | ERVL- | chr18: 32912307-32912778 | − | 120 | 472 | ZNF24 | Proximal | 0 | Not documented | 84 |
| | Uniquely | | | | | MaLR | | | | | | | | | |
| L1M5_dup58270 | Multi | No | — | — | LINE | Other L1 | chr18: 32912781-32913164 | + | 120 | 384 | ZNF24 | Proximal | 0 | Not documented | 85 |
| Tigger3c_dup2148 | Uniquely | No | — | — | DNA | DNA | chr18: 33253787-33254344 | − | 63 | 558 | GALNT1 | Proximal | 0 | Not documented | 86 |
| MIRc_dup94378 | Multi | No | — | — | SINE | MIR | chr18: 33559118-33559187 | + | 80 | 70 | C18orf21 | Proximal | 0 | Not documented | 87 |
| MER3_dup9776 | Multi | No | — | — | DNA | DNA | chr18: 34376226-34376412 | + | 83 | 187 | TPGS2 | Proximal | 0 | Not documented | 88 |
| L3_dup41870 | Multi | No | — | — | LINE | CR1 | chr18: 34387717-34387820 | − | 140 | 104 | TPGS2 | Proximal | 0 | Not documented | 89 |
| MER68B_dup397 | Uniquely | No | — | — | LTR | ERVL | chr18: 39621887-39622421 | + | 97 | 535 | PIK3C3 | Proximal | 0 | Not documented | 90 |
| AluSp_dup43247 | Multi | No | — | — | SINE | Alu | chr18: 43835404-43835713 | − | 42 | 310 | C18orf25 | Proximal | 0 | Not documented | 91 |
| AluJo_dup62929 | Multi | No | — | — | SINE | Alu | chr18: 44402920-44403203 | + | 96 | 284 | PIAS2 | Proximal | 0 | Not documented | 92 |
| L2_dup51990 | Uniquely | No | — | — | LINE | L2 | chr18: 44525757-44526123 | − | 160 | 367 | KATNAL2 | Proximal | 0 | Not documented | 93 |
| MER123_dup31 | Multi | No | — | — | DNA | DNA | chr18: 44634246-44634352 | − | 110 | 107 | HDHD2 | Proximal | 0 | Not documented | 94 |
| L2b_dup88109 | Multi | No | — | — | LINE | L2 | chr18: 47795434-47795520 | + | 140 | 87 | MBD1 | Proximal | 0 | Not documented | 95 |
| MLT2F_dup1775 | Multi | No | — | — | LTR | ERVL | chr18: 47795693-47796348 | + | 68 | 656 | MBD1 | Proximal | 0 | Not documented | 96 |
| MIR3_dup83415 | Multi/ | No | — | — | SINE | MIR | chr18: 48256557-48256734 | − | 140 | 178 | MAPK4 | Proximal | 0 | Not documented | 97 |
| | Uniquely | | | | | | | | | | | | | | |
| L2a_dup155040 | Uniquely | No | — | — | LINE | L2 | chr18: 48553155-48553406 | − | 100 | 252 | RP11-729L2.2 | Proximal | 0 | Not documented | 98 |
| AluSg_dup36194 | Uniquely | No | — | — | SINE | Alu | chr18: 48589222-48589521 | − | 27 | 300 | SMAD4 | Proximal | 0 | Not documented | 99 |
| L2a_dup155043 | Uniquely | No | — | — | LINE | L2 | chr18: 48590560-48590911 | + | 150 | 352 | SMAD4 | Proximal | 0 | Not documented | 2400 |
| L2c_dup129372 | Multi/ | No | — | — | LINE | L2 | chr18: 5239079-5239161 | − | 150 | 83 | C18orf42 | Distal | 41578 | Not documented | 1 |
| | Uniquely | | | | | | | | | | | | | | |
| MLT2B2_dup2031 | Uniquely | No | — | — | LTR | ERVL | chr18: 5244238-5244673 | − | 75 | 436 | ZBTB14 | Distal | 44346 | Not documented | 2 |
| AluJr_dup67882 | Multi | No | — | — | SINE | Alu | chr18: 52897176-52897399 | + | 73 | 224 | TCF4 | Proximal | 0 | Not documented | 3 |
| AluSq2_dup48506 | Uniquely | No | — | — | SINE | Alu | chr18: 54269248-54269541 | − | 46 | 294 | TXNL1 | Proximal | 0 | Not documented | 4 |
| MIRc_dup95510 | Multi | No | — | — | SINE | MIR | chr18: 56653423-56653646 | − | 130 | 224 | ZNF532 | Proximal | 0 | Not documented | 5 |
| L1MA4_dup9379 | Multi | No | — | — | LINE | Other L1 | chr18: 56834904-56837217 | + | 95 | 2314 | SEC11C | Distal | 8837 | Not documented | 6 |
| ERV3-16A3_I- | Multi | No | — | — | LTR | ERVL | chr18: 58211323-58212239 | − | 130 | 917 | MC4R | Distal | 171323 | Not documented | 7 |
| int_dup5812 | | | | | | | | | | | | | | | |
| MLT1G1_dup3257 | Uniquely | No | — | — | LTR | ERVL- | chr18: 61048498-61048892 | + | 120 | 395 | VPS4B | Distal | 7532 | Not documented | 8 |
| | | | | | | MaLR | | | | | | | | | |
| AluSz6_dup40693 | Multi | No | — | — | SINE | Alu | chr18: 61057277-61057344 | − | 54 | 68 | VPS4B | Proximal | 0 | Not documented | 9 |
| AluSx1_dup96312 | Multi | No | — | — | SINE | Alu | chr18: 61057345-61057606 | − | 50 | 262 | VPS4B | Proximal | 0 | Not documented | 10 |
| L1PA16_dup13268 | Uniquely | No | — | — | LINE | L1PA\|B\|x | chr18: 65130676-65132717 | − | 75 | 2042 | DSEL | Distal | 41103 | Not documented | 11 |
| AluSg_dup36364 | Multi | No | — | — | SINE | Alu | chr18: 65174305-65174612 | + | 58 | 308 | DSEL | Proximal | 0 | Not documented | 12 |
| Helitron2Na_{—} | Multi | No | — | — | Other | Other | chr18: 65945724-65945861 | + | 140 | 138 | TMX3 | Distal | 395065 | Not documented | 13 |
| Mam_dup428 | | | | | | Repeats | | | | | | | | | |
| Charlie15a_{—} | Multi | No | — | — | DNA | DNA | chr18: 66343308-66343428 | − | 130 | 121 | TMX3 | Proximal | 0 | Not documented | 14 |
| dup3228 | | | | | | | | | | | | | | | |
| L1PB2_dup2660 | Multi | No | — | — | LINE | L1PA\|B\|x | chr18: 72260707-72261085 | − | 42 | 379 | ZNF407 | Distal | 4022 | Not documented | 15 |
| AluY_dup104234 | Multi | No | — | — | SINE | Alu | chr18: 722811-723111 | + | 23 | 301 | YES1 | Proximal | 0 | Not documented | 16 |
| AluY_dup104236 | Multi | No | — | — | SINE | Alu | chr18: 733502-733810 | + | 28 | 309 | YES1 | Proximal | 0 | Not documented | 17 |
| L1PA16_dup13328 | Uniquely | No | — | — | LINE | L1PA\|B\|x | chr18: 75151387-75152208 | − | 59 | 822 | GALR1 | Distal | 170530 | Not documented | 18 |
| AluJo_dup63488 | Uniquely | No | — | — | SINE | Alu | chr18: 77438792-77438990 | − | 66 | 199 | CTDP1 | Proximal | 812 | Not documented | 19 |
| MER68_dup1312 | Uniquely | No | — | — | LTR | ERVL | chr18: 77909190-77909554 | − | 140 | 365 | AC139100.2 | Proximal | 0 | Not documented | 20 |
| MIR3_dup82159 | Multi | No | — | — | SINE | MIR | chr18: 9956099-9956259 | − | 140 | 161 | VAPA | Proximal | 0 | Not documented | 21 |
| AluJo_dup64483 | Multi | No | — | — | SINE | Alu | chr19: 10664244-10664515 | − | 60 | 272 | KRI1 | Proximal | 0 | Not documented | 22 |
| AluJr_dup69340 | Multi | No | — | — | SINE | Alu | chr19: 11040757-11040876 | + | 95 | 120 | C19orf52 | Proximal | 0 | Not documented | 23 |
| AluJo_dup64564 | Multi | No | — | — | SINE | Alu | chr19: 11276241-11276529 | − | 58 | 289 | KANK2 | Proximal | 0 | Not documented | 24 |
| MIRc_dup96336 | Multi | No | — | — | SINE | MIR | chr19: 11467519-11467603 | + | 110 | 85 | DKFZP761J1410 | Proximal | 0 | Not documented | 2425 |
| L1MA4A_dup5926 | Uniquely | No | — | — | LINE | Other L1 | chr19: 11893645-11894870 | + | 69 | 1226 | ZNF441 | Proximal | 0 | Not documented | 26 |
| AluYg6_dup724 | Multi | No | — | — | SINE | Alu | chr19: 12308319-12308450 | − | 20 | 132 | ZNF136 | Distal | 8256 | Not documented | 27 |
| L1MA1_dup4053 | Multi | No | — | — | LINE | Other L1 | chr19: 12308451-12309666 | − | 36 | 1216 | ZNF136 | Distal | 8388 | Not documented | 28 |
| X6B_LINE_dup420 | Multi | No | — | — | LINE | CR1 | chr19: 1270918-1270988 | + | 140 | 71 | CIRBP | Proximal | 0 | Not documented | 29 |
| AluY_dup108569 | Multi | No | — | — | SINE | Alu | chr19: 12740415-12740697 | + | 32 | 283 | ZNF791 | Proximal | 0 | Not documented | 30 |
| AluJr_dup69499 | Multi | No | — | — | SINE | Alu | chr19: 12740708-12740987 | + | 85 | 280 | ZNF791 | Proximal | 0 | Not documented | 31 |
| AluSx_dup127539 | Multi | No | — | — | SINE | Alu | chr19: 12884907-12885219 | − | 61 | 313 | HOOK2 | Proximal | 0 | Not documented | 32 |
| L2a_dup157339 | Multi | No | — | — | LINE | L2 | chr19: 12885220-12885365 | + | 130 | 146 | HOOK2 | Proximal | 0 | Not documented | 33 |
| MIRb_dup208350 | Multi/ | No | — | — | SINE | MIR | chr19: 12911536-12911731 | − | 140 | 196 | PRDX2 | Proximal | 0 | Not documented | 34 |
| | Uniquely | | | | | | | | | | | | | | |
| L2_dup52885 | Multi | No | — | — | LINE | L2 | chr19: 14602400-14602639 | + | 150 | 240 | GIPC1 | Proximal | 0 | Not documented | 35 |
| MLT1F_dup3878 | Multi | No | — | — | LTR | ERVL- | chr19: 1597355-1597871 | + | 100 | 517 | UQCR11 | Proximal | 0 | Not documented | 36 |
| | | | | | | MaLR | | | | | | | | | |
| AluSz_dup88509 | Multi | No | — | — | SINE | Alu | chr19: 16212879-16213167 | + | 52 | 289 | TPM4 | Proximal | 0 | Not documented | 37 |
| MER117_dup4197 | Multi/ | No | — | — | DNA | DNA | chr19: 16302429-16302574 | − | 150 | 146 | FAM32A | Proximal | 0 | Not documented | 38 |
| | Uniquely | | | | | | | | | | | | | | |
| AluSx_dup128197 | Multi/ | No | — | — | SINE | Alu | chr19: 16741914-16742229 | + | 56 | 316 | SMIM7 | Proximal | 0 | Not documented | 39 |
| | Uniquely | | | | | | | | | | | | | | |
| MamGypLTR3_dup888 | Multi/ | No | — | — | LTR | Gypsy | chr19: 16742298-16742518 | + | 140 | 221 | SMIM7 | Proximal | 0 | Not documented | 40 |
| | Uniquely | | | | | | | | | | | | | | |
| L2c_dup132761 | Multi | No | — | — | LINE | L2 | chr19: 17330168-17330372 | − | 150 | 205 | USE1 | Proximal | 0 | Not documented | 41 |
| L2c_dup132762 | Multi | No | — | — | LINE | L2 | chr19: 17339782-17339947 | + | 150 | 166 | OCEL1 | Proximal | 0 | Not documented | 42 |
| L1MC5_dup18967 | Multi | No | — | — | LINE | Other L1 | chr19: 17417358-17417651 | − | 130 | 294 | MRPL34 | Proximal | 0 | Not documented | 43 |
| L2b_dup89790 | Uniquely | No | — | — | LINE | L2 | chr19: 18044512-18044744 | + | 130 | 233 | CCDC124 | Proximal | 0 | Not documented | 44 |
| AluSz6_dup41580 | Multi | No | — | — | SINE | Alu | chr19: 18280737-18281039 | + | 48 | 303 | PIK3R2 | Proximal | 0 | Not documented | 45 |
| AluJr_dup70114 | Multi | No | — | — | SINE | Alu | chr19: 18307402-18307540 | + | 65 | 139 | MPV17L2 | Proximal | 0 | Not documented | 46 |
| L1M5_dup59310 | Multi/ | No | — | — | LINE | Other L1 | chr19: 1875105-1875287 | + | 150 | 183 | ABHD17A | Proximal | 1523 | Not documented | 47 |
| | Uniquely | | | | | | | | | | | | | | |
| L2_dup52956 | Multi | No | — | — | LINE | L2 | chr19: 18988588-18988795 | + | 140 | 208 | GDF1 | Proximal | 0 | Not documented | 48 |
| MIR3_dup84619 | Multi | No | — | — | SINE | MIR | chr19: 19049011-19049170 | − | 150 | 160 | HOMER3 | Proximal | 0 | Not documented | 49 |
| AluSx1_dup96916 | Multi | No | — | — | SINE | Alu | chr19: 1925084-1925396 | − | 44 | 313 | SCAMP4 | Proximal | 0 | Not documented | 2450 |
| L2b_dup89911 | Uniquely | No | — | — | LINE | L2 | chr19: 19292859-19293219 | + | 130 | 361 | MEF2BNB | Proximal | 0 | Not documented | 51 |
| MIRb_dup208838 | Multi | No | — | — | SINE | MIR | chr19: 19313892-19314023 | + | 130 | 132 | NR2CZAP | Proximal | 0 | Not documented | 52 |
| MIRb_dup208849 | Multi/ | No | — | — | SINE | MIR | chr19: 19362120-19362374 | − | 140 | 255 | NCAN | Proximal | 0 | Not documented | 53 |
| | Uniquely | | | | | | | | | | | | | | |
| L1M3a_dup458 | Uniquely | No | — | — | LINE | Other L1 | chr19: 20045795-20046291 | + | 160 | 497 | ZNF93 | Proximal | 0 | Not documented | 54 |
| AluSx_dup125337 | Multi | No | — | — | SINE | Alu | chr19: 2072158-2072452 | + | 51 | 295 | MOB3A | Proximal | 0 | Not documented | 55 |
| FLAM_C_dup19851 | Multi | No | — | — | SINE | Alu | chr19: 2072639-2072758 | + | 60 | 120 | MOB3A | Proximal | 0 | Not documented | 56 |
| L1PBa_dup2080 | Uniquely | No | — | — | LINE | L1PA\|B\|x | chr19: 21454082-21456445 | − | 70 | 2364 | ZNF708 | Distal | 17518 | Not documented | 57 |
| L1PB2_dup2680 | Uniquely | No | — | — | LINE | L1PA\|B\|x | chr19: 21460758-21462263 | − | 70 | 1506 | ZNF708 | Distal | 11700 | Not documented | 58 |
| AluSc8_dup19773 | Uniquely | No | — | — | SINE | Alu | chr19: 21701357-21701659 | − | 46 | 303 | ZNF429 | Proximal | 0 | Not documented | 59 |
| LTR76_dup168 | Uniquely | No | — | — | LTR | ERV1 | chr19: 21701909-21702560 | + | 60 | 652 | ZNF429 | Proximal | 0 | Not documented | 60 |
| BSR/Beta_dup1564 | Uniquely | No | — | — | Other | Other | chr19: 22026603-22026931 | + | 120 | 329 | ZNF43 | Proximal | 0 | Not documented | 61 |
| | | | | | | Repeats | | | | | | | | | |
| AluJr4_dup16057 | Multi | No | — | — | SINE | Alu | chr19: 2233590-2233757 | + | 87 | 168 | PLEKHJ1 | Proximal | 0 | Not documented | 62 |
| L1MA8_dup10466 | Multi | No | — | — | LINE | Other L1 | chr19: 22877394-22877624 | − | 110 | 231 | ZNF492 | Distal | 26923 | Not documented | 63 |
| AluSx1_dup99732 | Multi | No | — | — | SINE | Alu | chr19: 22877697-22877946 | − | 47 | 250 | ZNF492 | Distal | 27226 | Not documented | 64 |
| AluY_dup109544 | Multi | No | — | — | SINE | Alu | chr19: 23542024-23542308 | − | 19 | 285 | ZNF91 | Proximal | 0 | Not documented | 65 |
| LTR70_dup129 | Multi | No | — | — | LTR | ERV1 | chr19: 23855533-23856476 | − | 51 | 944 | ZNF675 | Proximal | 0 | Not documented | 66 |
| AluSx1_dup99816 | Multi | No | — | — | SINE | Alu | chr19: 23993809-23994118 | − | 47 | 310 | RPSAP58 | Proximal | 0 | Not documented | 67 |
| HERV3-int_dup263 | Multi | No | — | — | LTR | ERV1 | chr19: 24001565-24004302 | − | 73 | 2738 | RPSAP58 | Proximal | 0 | EVE annotated | 68 |
| LTR6A_dup228 | Multi | No | — | — | LTR | ERV1 | chr19: 24009970-24009999 | − | 15 | 30 | RPSAP58 | Proximal | 0 | Not documented | 69 |
| LTR10B_dup62 | Multi | No | — | — | LTR | ERV1 | chr19: 24100679-24101097 | − | 67 | 419 | ZNF726 | Proximal | 0 | Not documented | 70 |
| HERVK14-int_{—} | Multi | No | — | — | LTR | ERVK | chr19: 24138536-24139324 | − | 140 | 789 | ZNF726 | Distal | 10576 | EVE annotated | 71 |
| dup344 | | | | | | | | | | | | | | | |
| SVA_C_dup261 | Multi | No | — | — | Other | SVA | chr19: 24146230-24147935 | + | 21 | 1706 | ZNF726 | Distal | 18270 | Not documented | 72 |
| BSR/Beta_dup1884 | Multi | No | — | — | Other | Other | chr19: 24238718-24240453 | − | 110 | 1736 | ZNF254 | Proximal | 0 | Not documented | 73 |
| | | | | | | Repeats | | | | | | | | | |
| BSR/Beta_dup1887 | Multi | No | — | — | Other | Other | chr19: 24241510-24242942 | − | 110 | 1433 | ZNF254 | Proximal | 0 | Not documented | 74 |
| | | | | | | Repeats | | | | | | | | | |
| MER4E1_dup958 | Multi | No | — | — | LTR | ERV1 | chr19: 24265482-24265627 | + | 40 | 146 | ZNF254 | Proximal | 0 | Not documented | 2475 |
| MER1A_dup3035 | Multi | No | — | — | DNA | DNA | chr19: 24356525-24357021 | − | 74 | 497 | ZNF254 | Distal | 43872 | Not documented | 76 |
| ALR/Alpha_dup1169 | Multi | No | — | — | Other | Other | chr19: 24488848-24494826 | + | 64 | 5979 | ZNF254 | Distal | 176195 | Not documented | 77 |
| | | | | | | Repeats | | | | | | | | | |
| L1PA4_dup11340 | Uniquely | No | — | — | LINE | L1PA\|B\|x | chr19: 28186347-28192495 | − | 33 | 6149 | UQCRFS1 | Distal | 1505679 | EVE annotated | 78 |
| LTR22C_dup368 | Uniquely | No | — | — | LTR | ERVK | chr19: 28236732-28237193 | + | 100 | 462 | UQCRFS1 | Distal | 1460981 | Not documented | 79 |
| L1ME4a_dup40628 | Multi | No | — | — | LINE | Other L1 | chr19: 30106305-30106629 | + | 160 | 325 | POP4 | Proximal | 0 | Not documented | 80 |
| MER2_dup8714 | Multi | No | — | — | DNA | DNA | chr19: 30192144-30192487 | − | 85 | 344 | C19orf12 | Proximal | 0 | Not documented | 81 |
| Tigger1_dup11269 | Multi | No | — | — | DNA | DNA | chr19: 30192561-30192706 | + | 74 | 146 | C19orf12 | Proximal | 0 | Not documented | 82 |
| Tigger1_dup11270 | Multi | No | — | — | DNA | DNA | chr19: 30192695-30192904 | + | 70 | 210 | C19orf12 | Proximal | 0 | Not documented | 83 |
| Tigger13a_dup2934 | Multi | No | — | — | DNA | DNA | chr19: 32975623-32976061 | + | 120 | 439 | DPY19L3 | Proximal | 0 | Not documented | 84 |
| AluSg_dup37590 | Multi | No | — | — | SINE | Alu | chr19: 33203283-33203594 | − | 44 | 312 | NUDT19 | Proximal | 0 | Not documented | 85 |
| AluSx1_dup100093 | Uniquely | No | — | — | SINE | Alu | chr19: 33469772-33470065 | + | 63 | 294 | RHPN2 | Proximal | 0 | Not documented | 86 |
| AluJb_dup131698 | Multi | No | — | — | SINE | Alu | chr19: 34891933-34892128 | − | 67 | 196 | RP11-618P17.4 | Proximal | 0 | Not documented | 87 |
| AluY_dup109813 | Multi/ | No | — | — | SINE | Alu | chr19: 34892129-34892424 | − | 35 | 296 | RP11-618P17.4 | Proximal | 0 | Not documented | 88 |
| | Uniquely | | | | | | | | | | | | | | |
| AluJb_dup131699 | Multi | No | — | — | SINE | Alu | chr19: 34892425-34892543 | − | 67 | 119 | RP11-618P17.4 | Proximal | 0 | Not documented | 89 |
| AluJo_dup65780 | Multi | No | — | — | SINE | Alu | chr19: 34892553-34892713 | − | 100 | 161 | RP11-618P17.4 | Proximal | 0 | Not documented | 90 |
| AluY_dup109814 | Multi | No | — | — | SINE | Alu | chr19: 34892723-34893012 | − | 25 | 290 | RP11-618P17.4 | Proximal | 0 | Not documented | 91 |
| MER51A_dup887 | Multi | No | — | — | LTR | ERV1 | chr19: 34893105-34893406 | + | 82 | 302 | RP11-618P17.4 | Proximal | 0 | Not documented | 92 |
| LTR12_dup527 | Uniquely | No | — | — | LTR | ERV1 | chr19: 35166562-35167201 | − | 51 | 640 | SCGB2B2 | Proximal | 0 | Not documented | 93 |
| AluSz_dup89569 | Multi/ | No | — | — | SINE | Alu | chr19: 35169057-35169134 | − | 47 | 78 | ZNF302 | Proximal | 0 | Not documented | 94 |
| | Uniquely | | | | | | | | | | | | | | |
| AluSx3_dup26791 | Multi | No | — | — | SINE | Alu | chr19: 35169135-35169355 | + | 47 | 221 | ZNF302 | Proximal | 0 | Not documented | 95 |
| AluJr_dup70791 | Multi | No | — | — | SINE | Alu | chr19: 35469602-35469907 | − | 64 | 306 | ZNF792 | Distal | 14650 | Not documented | 96 |
| MLT1E2_dup3676 | Multi | No | — | — | LTR | ERVL- | chr19: 35573164-35573729 | − | 110 | 566 | HPN | Distal | 15690 | Not documented | 97 |
| | | | | | | MaLR | | | | | | | | | |
| L2a_dup158183 | Multi | No | — | — | LINE | L2 | chr19: 35641320-35641989 | − | 140 | 670 | FXYD7 | Proximal | 0 | Not documented | 98 |
| FLAM_C_dup20527 | Multi | No | — | — | SINE | Alu | chr19: 35791939-35792072 | − | 75 | 134 | MAG | Proximal | 0 | Not documented | 99 |
| MER49_dup1250 | Multi | No | — | — | LTR | ERV1 | chr19: 35890087-35890709 | + | 57 | 623 | GPR42 | Distal | 26233 | Not documented | 2500 |
| Charlie1b_dup2830 | Multi | No | — | — | DNA | DNA | chr19: 35903621-35903683 | + | 93 | 63 | FFAR2 | Distal | 31127 | Not documented | 1 |
| LTR42_dup256 | Multi | No | — | — | LTR | ERVL | chr19: 35929462-35929904 | + | 72 | 443 | FFAR2 | Distal | 4906 | Not documented | 2 |
| L2a_dup158232 | Multi | No | — | — | LINE | L2 | chr19: 35963265-35963538 | + | 130 | 274 | KRTDAP | Distal | 14689 | Not documented | 3 |
| AluSx_dup129936 | Multi | No | — | — | SINE | Alu | chr19: 36010989-36011260 | + | 47 | 272 | SBSN | Distal | 3010 | Not documented | 4 |
| MIRb_dup209371 | Multi | No | — | — | SINE | MIR | chr19: 36024931-36025074 | − | 170 | 144 | GAPDHS | Proximal | 0 | Not documented | 5 |
| MER4D1_dup1408 | Multi | No | — | — | LTR | ERV1 | chr19: 36030200-36030383 | − | 52 | 184 | GAPDHS | Proximal | 0 | Not documented | 6 |
| L2b_dup90313 | Multi | No | — | — | LINE | L2 | chr19: 36039808-36039951 | − | 110 | 144 | ATP4A | Proximal | 995 | Not documented | 7 |
| L1M5_dup59948 | Multi | No | — | — | LINE | Other L1 | chr19: 36081071-36081415 | − | 150 | 345 | HAUS5 | Distal | 22232 | Not documented | 8 |
| AluSz_dup89640 | Multi | No | — | — | SINE | Alu | chr19: 36106937-36107232 | + | 49 | 296 | HAUS5 | Proximal | 0 | Not documented | 9 |
| L1MC5_dup19047 | Multi | No | — | — | LINE | Other L1 | chr19: 36117047-36117213 | + | 120 | 16 | HAUS5 | Proximal | 797 | Not documented | 10 |
| AluSq_dup19843 | Multi | No | — | — | SINE | Alu | chr19: 36233992-36234304 | + | 50 | 313 | U2AF1L4 | Proximal | 0 | Not documented | 11 |
| MSR1_dup14 | Multi | No | — | — | Other | Other | chr19: 36236916-36237169 | − | 130 | 254 | PSENEN | Proximal | 0 | Not documented | 12 |
| | | | | | | Repeats | | | | | | | | | |
| AluYf5_dup163 | Multi | No | — | — | SINE | Alu | chr19: 36313157-36313461 | + | 21 | 305 | NPHS1 | Distal | 3406 | Not documented | 13 |
| L2_dup53144 | Multi | No | — | — | LINE | L2 | chr19: 36506527-36506611 | − | 160 | 85 | CLIP3 | Proximal | 0 | Not documented | 14 |
| AluJb_dup131922 | Multi | No | — | — | SINE | Alu | chr19: 36716652-36716971 | − | 61 | 320 | ZNF146 | Proximal | 0 | Not documented | 15 |
| L2_dup53148 | Multi | No | — | — | LINE | L2 | chr19: 36717009-36717172 | + | 150 | 164 | ZNF146 | Proximal | 0 | Not documented | 16 |
| L1ME3C_dup11672 | Multi | No | — | — | LINE | Other L1 | chr19: 36728417-36728601 | + | 140 | 185 | ZNF146 | Proximal | 0 | Not documented | 17 |
| L1ME3C_dup11673 | Multi | No | — | — | LINE | Other L1 | chr19: 36728637-36728827 | + | 140 | 191 | ZNF146 | Proximal | 0 | Not documented | 18 |
| L1ME3C_dup11674 | Multi | No | — | — | LINE | Other L1 | chr19: 36728928-36729357 | + | 120 | 430 | ZNF146 | Proximal | 0 | Not documented | 19 |
| L1ME4a_dup40728 | Multi | No | — | — | LINE | Other L1 | chr19: 36729375-36729490 | + | 110 | 116 | ZNF146 | Proximal | 0 | Not documented | 20 |
| LTR6B_dup141 | Multi/ | No | — | — | LTR | ERV1 | chr19: 36815775-36816331 | − | 25 | 557 | ZFP14 | Distal | 10832 | Not documented | 21 |
| | Uniquely | | | | | | | | | | | | | | |
| HERVS71-int_{—} | Multi | No | — | — | LTR | ERV1 | chr19: 36816332-36816467 | − | 47 | 136 | ZFP14 | Distal | 10696 | EVE annotated | 22 |
| dup153 | | | | | | | | | | | | | | | |
| HERVS71-int_{—} | Multi | No | — | — | LTR | ERV1 | chr19: 36816444-36818252 | − | 45 | 1809 | ZFP14 | Distal | 8911 | EVE annotated | 23 |
| dup154 | | | | | | | | | | | | | | | |
| AluSp_dup45165 | Multi | No | — | — | SINE | Alu | chr19: 37002145-37002269 | + | 25 | 125 | ZNF260 | Proximal | 0 | Not documented | 24 |
| L2c_dup133108 | Uniquely | No | — | — | LINE | L2 | chr19: 37318551-37318659 | − | 140 | 109 | ZNF790 | Proximal | 0 | Not documented | 2525 |
| AluSp_dup45198 | Multi | No | — | — | SINE | Alu | chr19: 37346350-37346653 | − | 48 | 304 | ZNF345 | Proximal | 0 | Not documented | 26 |
| AluY_dup109992 | Uniquely | No | — | — | SINE | Alu | chr19: 37815674-37815978 | − | 58 | 305 | HKR1 | Proximal | 0 | Not documented | 27 |
| LTR27_dup395 | Multi | No | — | — | LTR | ERV1 | chr19: 37854939-37855554 | + | 100 | 616 | HKR1 | Proximal | 0 | Not documented | 28 |
| L2a_dup158372 | Uniquely | No | — | — | LINE | L2 | chr19: 37955668-37956356 | + | 120 | 689 | ZNF569 | Proximal | 0 | Not documented | 29 |
| AluSx_dup130424 | Multi | No | — | — | SINE | Alu | chr19: 39150560-39150861 | − | 53 | 302 | ACTN4 | Proximal | 0 | Not documented | 30 |
| MIRb_dup209521 | Multi | No | — | — | SINE | MIR | chr19: 39423432-39423477 | + | 120 | 46 | MRPS12 | Proximal | 0 | Not documented | 31 |
| MER91B_dup1464 | Multi | No | — | — | DNA | DNA | chr19: 39423583-39423661 | − | 120 | 79 | MRPS12 | Proximal | 0 | Not documented | 32 |
| AluJb_dup132262 | Multi | No | — | — | SINE | Alu | chr19: 39432899-39433202 | − | 61 | 304 | CTC-360G5.8 | Proximal | 0 | Not documented | 33 |
| MLT2C1_dup2402 | Multi | No | — | — | LTR | ERVL | chr19: 39889660-39889891 | − | 96 | 232 | MED29 | Proximal | 0 | Not documented | 34 |
| AluSx3_dup26923 | Multi | No | — | — | SINE | Alu | chr19: 39889893-39890188 | + | 34 | 296 | MED29 | Proximal | 0 | Not documented | 35 |
| ERVL-int_dup759 | Multi | No | — | — | LTR | ERVL | chr 19: 39890196-39890343 | − | 89 | 148 | MED29 | Proximal | 0 | Not documented | 36 |
| L2a_dup158600 | Multi | No | — | — | LINE | L2 | chr19: 39890628-39890715 | − | 99 | 88 | MED29 | Proximal | 0 | Not documented | 37 |
| FLAM_C_dup20625 | Uniquely | No | — | — | SINE | Alu | chr19: 40022613-40022763 | + | 42 | 151 | EID2B | Proximal | 0 | Not documented | 38 |
| AluSz_dup90093 | Uniquely | No | — | — | SINE | Alu | chr19: 40976208-40976513 | − | 54 | 306 | SPTBN4 | Proximal | 0 | Not documented | 39 |
| L1MEg2_dup696 | Multi | No | — | — | LINE | Other L1 | chr19: 41246580-41246617 | + | 38 | 38 | ITPKC | Proximal | 0 | Not documented | 40 |
| LTR41_dup1653 | Multi | No | — | — | LTR | ERVL | chr19: 41937306-41937575 | − | 110 | 270 | ATP5SL | Proximal | 0 | Not documented | 41 |
| LTR33_dup8680 | Multi | No | — | — | LTR | ERVL | chr19: 41937777-41937847 | − | 130 | 71 | ATP5SL | Proximal | 0 | Not documented | 42 |
| LTR33A_dup1553 | Multi | No | — | — | LTR | ERVL | chr19: 42882260-42882539 | − | 100 | 280 | MEGF8 | Proximal | 0 | Not documented | 43 |
| L2_dup53309 | Uniquely | No | — | — | LINE | L2 | chr19: 44645088-44645378 | + | 130 | 291 | ZNF234 | Proximal | 333 | Not documented | 44 |
| L2a_dup158958 | Multi | No | — | — | LINE | L2 | chr19: 44679260-44679408 | − | 140 | 149 | ZNF226 | Proximal | 0 | Not documented | 45 |
| MER91A_dup3383 | Uniquely | No | — | — | DNA | DNA | chr19: 44721747-44721914 | + | 160 | 168 | ZNF227 | Proximal | 0 | Not documented | 46 |
| MSR1_dup98 | Multi | No | — | — | Other | Other | chr19: 45404109-45404218 | − | 65 | 110 | TOMM40 | Proximal | 0 | Not documented | 47 |
| | | | | | | Repeats | | | | | | | | | |
| MIR_dup163590 | Multi | No | — | — | SINE | MIR | chr19: 45953278-45953433 | − | 120 | 156 | ERCC1 | Proximal | 0 | Not documented | 48 |
| AluSx_dup131291 | Multi | No | — | — | SINE | Alu | chr19: 45953746-45954057 | + | 35 | 312 | ERCC1 | Proximal | 0 | Not documented | 49 |
| L2b_dup90912 | Multi | No | — | — | LINE | L2 | chr19: 45979620-45979982 | − | 140 | 363 | ERCC1 | Proximal | 0 | Not documented | 2550 |
| AluSx1_dup101257 | Multi | No | — | — | SINE | Alu | chr19: 45979992-45980318 | + | 45 | 327 | ERCC1 | Proximal | 0 | Not documented | 51 |
| AluJr_dup71536 | Multi | No | — | — | SINE | Alu | chr19: 45980768-45980930 | + | 64 | 163 | ERCC1 | Proximal | 0 | Not documented | 52 |
| L2a_dup159110 | Uniquely | No | — | — | LINE | L2 | chr19: 45982448-45982545 | − | 100 | 98 | ERCC1 | Proximal | 363 | Not documented | 53 |
| MIR3_dup85063 | Multi | No | — | — | SINE | MIR | chr19: 46286802-46286872 | + | 140 | 71 | AC011530.4 | Proximal | 0 | Not documented | 54 |
| MIR3_dup85064 | Multi | No | — | — | SINE | MIR | chr19: 46287891-46287981 | + | 100 | 91 | AC011530.4 | Proximal | 0 | Not documented | 55 |
| AluSg_dup37996 | Uniquely | No | — | — | SINE | Alu | chr19: 46568567-46568863 | − | 51 | 297 | IGFL4 | Proximal | 0 | Not documented | 56 |
| L2a_dup159395 | Multi/ | No | — | — | LINE | L2 | chr19: 48244965-48245119 | − | 100 | 155 | EHD2 | Proximal | 0 | Not documented | 57 |
| | Uniquely | | | | | | | | | | | | | | |
| AluSx_dup131733 | Multi | No | — | — | SINE | Alu | chr19: 48245536-48245827 | − | 44 | 292 | EHD2 | Proximal | 0 | Not documented | 58 |
| AluSz_dup90846 | Multi | No | — | — | SINE | Alu | chr19: 48956595-48956898 | − | 50 | 304 | GRWD1 | Proximal | 0 | Not documented | 59 |
| MSR1_dup140 | Multi | No | — | — | Other | Other | chr19: 49337598-49339036 | − | 35 | 1439 | HSD17B14 | Proximal | 0 | Not documented | 60 |
| | | | | | | Repeats | | | | | | | | | |
| HERVIP10FH- | Multi | No | — | — | LTR | ERV1 | chr19: 49371679-49371929 | − | 91 | 251 | PLEKHA4 | Proximal | 0 | Not documented | 61 |
| int_dup634 | | | | | | | | | | | | | | | |
| MIRc_dup97194 | Multi | No | — | — | SINE | MIR | chr19: 50138730-50138777 | − | 47 | 48 | RRAS | Proximal | 0 | Not documented | 62 |
| AluSx1_dup101944 | Multi | No | — | — | SINE | Alu | chr19: 50320899-50321208 | + | 35 | 310 | FUZ | Proximal | 267 | Not documented | 63 |
| AluSz_dup91011 | Multi | No | — | — | SINE | Alu | chr19: 50410791-50411088 | − | 35 | 298 | NUP62 | Proximal | 0 | Not documented | 64 |
| AluSc8_dup20164 | Uniquely | No | — | — | SINE | Alu | chr19: 51399531-51399827 | − | 51 | 297 | KLK4 | Distal | 9782 | Not documented | 65 |
| L3_dup42953 | Multi | No | — | — | LINE | CR1 | chr19: 51853606-51853668 | + | 120 | 63 | ETFB | Proximal | 0 | Not documented | 66 |
| L2b_dup91336 | Multi | No | — | — | LINE | L2 | chr19: 52719061-52719091 | − | 59 | 31 | PPP2R1A | Proximal | 0 | Not documented | 67 |
| AluSx3_dup27195 | Uniquely | No | — | — | SINE | Alu | chr19: 52794730-52795029 | + | 42 | 300 | ZNF766 | Proximal | 0 | Not documented | 68 |
| AluJo_dup67002 | Multi | No | — | — | SINE | Alu | chr19: 52850779-52851075 | − | 89 | 29 | ZNF610 | Proximal | 0 | Not documented | 69 |
| AluJo_dup67006 | Uniquely | No | — | — | SINE | Alu | chr19: 52877717-52877888 | − | 77 | 172 | ZNF880 | Proximal | 0 | Not documented | 70 |
| AluSx_dup132452 | Uniquely | No | — | — | SINE | Alu | chr19: 52882650-52882995 | − | 54 | 346 | ZNF880 | Proximal | 0 | Not documented | 71 |
| AluSq2_dup50992 | Uniquely | No | — | — | SINE | Alu | chr19: 53060524-53060817 | − | 55 | 294 | ZNF701 | Proximal | 0 | Not documented | 72 |
| AluSq2_dup50999 | Multi | No | — | — | SINE | Alu | chr19: 53147986-53148284 | + | 59 | 299 | ZNF83 | Proximal | 0 | Not documented | 73 |
| AluSp_dup46022 | Multi | No | — | — | SINE | Alu | chr19: 53745177-53745480 | − | 36 | 304 | ZNF677 | Proximal | 0 | Not documented | 74 |
| AluY_dup111393 | Uniquely | No | — | — | SINE | Alu | chr19: 54609501-54609775 | − | 30 | 275 | NDUFA3 | Proximal | 0 | Not documented | 2575 |
| L2c_dup133599 | Multi | No | — | — | LINE | L2 | chr19: 54697391-54697519 | + | 160 | 129 | TSEN34 | Proximal | 0 | Not documented | 76 |
| MIRc_dup97306 | Multi | No | — | — | SINE | MIR | chr19: 56154492-56154590 | + | 150 | 99 | ZNF580 | Proximal | 0 | Not documented | 77 |
| MIRb_dup210808 | Multi | No | — | — | SINE | MIR | chr19: 56154607-56154714 | + | 130 | 108 | ZNF580 | Proximal | 0 | Not documented | 78 |
| MIRc_dup96183 | Multi | No | — | — | SINE | MIR | chr19: 5688214-5688265 | − | 92 | 52 | HSD11B1L | Proximal | 0 | Not documented | 79 |
| AluJb_dup134530 | Multi | No | — | — | SINE | Alu | chr19: 56909114-56909335 | − | 76 | 222 | ZNF583 | Proximal | 1 | Not documented | 80 |
| LTR9_dup1893 | Multi | No | — | — | LTR | ERV1 | chr19: 56909336-56909959 | − | 78 | 624 | ZNF583 | Proximal | 0 | Not documented | 81 |
| MER83_dup424 | Multi | No | — | — | LTR | ERV1 | chr19: 56910100-56910609 | + | 71 | 510 | ZNF583 | Proximal | 0 | Not documented | 82 |
| L1MA5_dup4253 | Uniquely | No | — | — | LINE | Other L1 | chr19: 56961072-56962956 | + | 65 | 1885 | ZNF667 | Proximal | 0 | Not documented | 83 |
| L2_dup53542 | Multi/ | No | — | — | LINE | L2 | chr19: 57005757-57005861 | + | 120 | 105 | ZNF471 | Distal | 13352 | Not documented | 84 |
| | Uniquely | | | | | | | | | | | | | | |
| L1MB3_dup16104 | Multi/ | No | — | — | LINE | Other L1 | chr19: 57005910-57006359 | − | 65 | 450 | ZNF471 | Distal | 12854 | Not documented | 85 |
| | Uniquely | | | | | | | | | | | | | | |
| LTR47B_dup341 | Multi/ | No | — | — | LTR | ERVL | chr19: 57006434-57006889 | + | 91 | 456 | ZNF471 | Distal | 12324 | Not documented | 86 |
| | Uniquely | | | | | | | | | | | | | | |
| L1ME4a_dup40868 | Multi | No | — | — | LINE | Other L1 | chr19: 57321527-57321661 | + | 110 | 135 | PEG3 | Proximal | 0 | Not documented | 87 |
| AluJr_dup72175 | Multi | No | — | — | SINE | Alu | chr19: 57808674-57809027 | − | 81 | 354 | ZNF460 | Distal | 3738 | Not documented | 88 |
| L1MA5_dup4261 | Multi | No | — | — | LINE | Other L1 | chr19: 57809028-57809835 | − | 75 | 808 | ZNF460 | Distal | 4092 | Not documented | 89 |
| MLT1J-int_dup1400 | Multi | No | — | — | LTR | ERVL- | chr19: 57819695-57819859 | + | 130 | 165 | ZNF543 | Distal | 12019 | Not documented | 90 |
| | | | | | | MaLR | | | | | | | | | |
| L1MB2_dup8465 | Multi | No | — | — | LINE | Other L1 | chr19: 57911243-57911790 | − | 78 | 548 | ZNF548 | Proximal | 0 | Not documented | 91 |
| L1M1_dup9071 | Multi/ | No | — | — | LINE | Other L1 | chr19: 57975158-57977873 | − | 94 | 2716 | AC004076.9 | Proximal | | Not documented | 92 |
| | Uniquely | | | | | | | | | | | | | | |
| L1M4b_dup6079 | Multi/ | No | — | — | LINE | Other L1 | chr19: 58005800-58006136 | − | 110 | 337 | AC003005.4 | Proximal | 0 | Not documented | 93 |
| | Uniquely | | | | | | | | | | | | | | |
| HERVK3-int_dup295 | Uniquely | No | — | — | LTR | ERVK | chr19: 58024740-58029437 | + | 78 | 4698 | ZNF773 | Proximal | 0 | EVE annotated | 94 |
| AluJo_dup67244 | Uniquely | No | — | — | SINE | Alu | chr19: 58268225-58268503 | − | 100 | 279 | ZNF776 | Proximal | 0 | Not documented | 95 |
| HERVK14-int_{—} | Uniquely | No | — | — | LTR | ERVK | chr19: 58412503-58414029 | + | 100 | 1527 | ZNF417 | Proximal | 0 | EVE annotated | 96 |
| dup357 | | | | | | | | | | | | | | | |
| MER112_dup4161 | Multi/ | No | — | — | DNA | DNA | chr19: 58595262-58595487 | − | 120 | 226 | ZNF135 | Proximal | 0 | Not documented | 97 |
| | Uniquely | | | | | | | | | | | | | | |
| AluJo_dup67263 | Uniquely | No | — | — | SINE | Alu | chr19: 58599004-58599306 | − | 63 | 303 | ZSCAN18 | Proximal | 0 | Not documented | 98 |
| AluJr_dup72221 | Multi/ | No | — | — | SINE | Alu | chr19: 58759629-58759898 | − | 76 | 270 | ZNF544 | Proximal | 0 | Not documented | 99 |
| | Uniquely | | | | | | | | | | | | | | |
| L1MC1_dup12533 | Multi | No | — | — | LINE | Other L1 | chr19: 58759899-58760049 | − | 90 | 151 | ZNF544 | Proximal | 0 | Not documented | 2600 |
| MER51A_dup903 | Multi/ | No | — | — | LTR | ERV1 | chr19: 58760050-58760579 | − | 59 | 530 | ZNF544 | Proximal | 0 | Not documented | 1 |
| | Uniquely | | | | | | | | | | | | | | |
| HERV4_I-int_{—} | Multi/ | No | — | — | LTR | ERV1 | chr19: 58760581-58761957 | − | 130 | 1377 | ZNF544 | Proximal | 0 | Not documented | 2 |
| dup324 | Uniquely | | | | | | | | | | | | | | |
| MLT1D_dup19275 | Multi | No | — | — | LTR | ERVL- | chr19: 58770769-58770984 | − | 110 | 216 | ZNF544 | Proximal | 0 | Not documented | 3 |
| | | | | | | MaLR | | | | | | | | | |
| MER41C_dup780 | Uniquely | No | — | — | LTR | ERV1 | chr19: 58789310-58789824 | + | 28 | 515 | CTD-3138B18.4 | Proximal | 0 | Not documented | 4 |
| HERVK3-int_dup296 | Multi | No | — | — | LTR | ERVK | chr19: 58817484-58821622 | + | 84 | 4139 | AC010642.1 | Proximal | 0 | EVE annotated | 5 |
| HERVK3-int_dup299 | Multi | No | — | — | LTR | ERVK | chr19: 58826017-58826205 | + | 83 | 189 | AC010642.1 | Proximal | 0 | Not documented | 6 |
| LTR3_dup82 | Multi | No | — | — | LTR | ERVK | chr19: 58826206-58826633 | + | 78 | 428 | AC010642.1 | Proximal | 0 | Not documented | 7 |
| L1MB7_dup21723 | Multi/ | No | — | — | LINE | Other L1 | chr19: 58826693-58827054 | − | 75 | 362 | AC010642.1 | Proximal | 131 | Not documented | 8 |
| | Uniquely | | | | | | | | | | | | | | |
| L2a_dup160239 | Multi | No | — | — | LINE | L2 | chr19: 58836601-58836739 | + | 160 | 139 | ZSCAN22 | Proximal | 1647 | Not documented | 9 |
| L2c_dup133706 | Uniquely | No | — | — | LINE | L2 | chr19: 58865718-58865979 | − | 110 | 262 | ZNF497 | Proximal | 0 | Not documented | 10 |
| MLT1L_dup11302 | Multi | No | — | — | LTR | ERVL- | chr19: 58929481-58929578 | + | 130 | 98 | ZNF584 | Proximal | 0 | Not documented | 11 |
| | | | | | | MaLR | | | | | | | | | |
| MIRc_dup96199 | Multi | No | — | — | SINE | MIR | chr19: 5901421-5901501 | + | 150 | 81 | NDUFA11 | Proximal | 0 | Not documented | 12 |
| MIRb_dup210958 | Multi | No | — | — | SINE | MIR | chr19: 59073306-59073409 | − | 130 | 104 | MZF1 | Proximal | 0 | Not documented | 13 |
| AluYc_dup7855 | Multi | No | — | — | SINE | Alu | chr19: 59093573-59093619 | + | 9.5 | 47 | MZF1 | Distal | 8632 | Not documented | 14 |
| MER31-int_dup1932 | Multi | No | — | — | LTR | ERV1 | chr19: 59110887-59111333 | − | 96 | 447 | MZF1 | Distal | 25946 | Not documented | 15 |
| MER58A_dup12388 | Uniquely | No | — | — | DNA | DNA | chr19: 6043509-6043724 | + | 91 | 216 | RFX2 | Proximal | 0 | Not documented | 16 |
| LTR87_dup598 | Multi | No | — | — | LTR | ERVL | chr19: 6211036-6211120 | − | 130 | 85 | MLLT1 | Proximal | 1847 | Not documented | 17 |
| MIRc_dup96211 | Multi | No | — | — | SINE | MIR | chr19: 6414481-6414548 | − | 120 | 68 | KHSRP | Proximal | 0 | Not documented | 18 |
| AluSz_dup87652 | Multi | No | — | — | SINE | Alu | chr19: 8439377-8439674 | + | 63 | 298 | ANGPTL4 | Proximal | 121 | Not documented | 19 |
| MLT1F_dup3894 | Multi | No | — | — | LTR | ERVL- | chr19: 8921341-8921879 | + | 120 | 539 | ZNF558 | Proximal | 0 | Not documented | 20 |
| | | | | | | MaLR | | | | | | | | | |
| AluSg_dup36525 | Multi | No | — | — | SINE | Alu | chr19: 893586-893894 | − | 55 | 309 | MED16 | Proximal | 369 | Not documented | 21 |
| MER20_dup15075 | Multi | No | — | — | DNA | DNA | chr19: 9272786-9272989 | + | 110 | 204 | ZNF317 | Proximal | 0 | Not documented | 22 |
| L1MA9_dup15711 | Uniquely | No | — | — | LINE | Other L1 | chr19: 9483546-9486561 | − | 71 | 3016 | ZNF177 | Proximal | 0 | Not documented | 23 |
| AluSz_dup87771 | Multi | No | — | — | SINE | Alu | chr19: 9638662-9638942 | − | 45 | 281 | ZNF426 | Proximal | 0 | Not documented | 24 |
| L1MC4_dup26965 | Multi | No | — | — | LINE | Other L1 | chr19: 9671573-9672280 | + | 130 | 708 | ZNF121 | Proximal | 0 | Not documented | 2625 |
| HERVI-int_dup134 | Uniquely | No | — | — | LTR | ERV1 | chr19: 9738586-9745083 | + | 120 | 6498 | C19orf82 | Proximal | 0 | EVE annotated | 26 |
| MER11C_dup788 | Multi | No | — | — | LTR | ERVK | chr19: 9759673-9760731 | + | 26 | 1059 | ZNF562 | Proximal | 0 | Not documented | 27 |
| MER74B_dup103 | Uniquely | No | — | — | LTR | ERVL | chr2: 100890910-100891377 | + | 96 | 468 | LONRF2 | Proximal | 0 | Not documented | 28 |
| HERVL74-int_dup43 | Uniquely | No | — | — | LTR | ERVL | chr2: 100892579-100894938 | + | 96 | 2360 | LONRF2 | Proximal | 0 | Not documented | 29 |
| L1ME3_dup1101 | Uniquely | No | — | — | LINE | Other L1 | chr2: 100932810-100934846 | − | 110 | 2037 | LONRF2 | Proximal | 0 | Not documented | 30 |
| L4_dup1771 | Multi | No | — | — | LINE | RTE | chr2: 101206638-101206703 | − | 140 | 66 | PDCL3 | Distal | 13442 | Not documented | 31 |
| L1ME3A_dup1240 | Uniquely | No | — | — | LINE | Other L1 | chr2: 10297461-10297904 | − | 120 | 444 | C2orf48 | Proximal | 0 | Not documented | 32 |
| HUERS-P1-int_{—} | Uniquely | No | — | — | LTR | ERV1 | chr2: 104093127-104095347 | − | 100 | 2221 | TMEM182 | Distal | 632776 | Not documented | 33 |
| dup54 | | | | | | | | | | | | | | | |
| HUERS-P1-int_{—} | Uniquely | No | — | — | LTR | ERV1 | chr2: 104095662-104096155 | − | 100 | 494 | TMEM182 | Distal | 635311 | Not documented | 34 |
| dup55 | | | | | | | | | | | | | | | |
| HUERS-P1-int_{—} | Multi/ | No | — | — | LTR | ERV1 | chr2: 104096158-104096839 | − | 57 | 682 | TMEM182 | Distal | 635807 | Not documented | 35 |
| dup56 | Uniquely | | | | | | | | | | | | | | |
| MER41B_dup286 | Multi/ | No | — | — | LTR | ERV1 | chr2: 104096840-104097468 | − | 52 | 629 | TMEM182 | Distal | 636489 | Not documented | 36 |
| | Uniquely | | | | | | | | | | | | | | |
| MIR_dup21689 | Uniquely | No | — | — | SINE | MIR | chr2: 105123589-105123804 | − | 110 | 216 | POU3F3 | Distal | 348166 | Not documented | 37 |
| MER58A_dup1389 | Multi/ | No | — | — | DNA | DNA | chr2: 105423895-105424112 | − | 93 | 218 | POU3F3 | Distal | 47858 | Not documented | 38 |
| | Uniquely | | | | | | | | | | | | | | |
| L1ME3A_dup1757 | Multi/ | No | — | — | LINE | Other L1 | chr2: 105428626-105429037 | + | 100 | 412 | POU3F3 | Distal | 42933 | Not documented | 39 |
| | Uniquely | | | | | | | | | | | | | | |
| L4_dup1792 | Multi | No | — | — | LINE | RTE | chr2: 105450668-105450721 | + | 100 | 54 | POU3F3 | Distal | 21249 | Not documented | 40 |
| AluSx1_dup9184 | Multi | No | — | — | SINE | Alu | chr2: 10830259-10830566 | + | 28 | 308 | NOL10 | Proximal | 159 | Not documented | 41 |
| AluY_dup13922 | Multi/ | No | — | — | SINE | Alu | chr2: 109004252-109004556 | − | 30 | 305 | SULT1C4 | Proximal | 0 | Not documented | 42 |
| | Uniquely | | | | | | | | | | | | | | |
| L2_dup7205 | Multi/ | No | — | — | LINE | L2 | chr2: 109004760-109005210 | + | 150 | 451 | SULT1C4 | Proximal | 248 | Not documented | 43 |
| | Uniquely | | | | | | | | | | | | | | |
| Tigger4b_dup304 | Multi | No | — | — | DNA | DNA | chr2: 110301378-110301693 | − | 67 | 316 | sept-10 | Proximal | 0 | Not documented | 44 |
| L1M4c_dup623 | Uniquely | No | — | — | LINE | Other L1 | chr2: 110890391-110892793 | + | 77 | 2403 | NPHP1 | Proximal | 0 | Not documented | 45 |
| L1M2_dup910 | Multi | No | — | — | LINE | Other L1 | chr2: 112089275-112090485 | − | 70 | 1211 | BCL2L11 | Distal | 163252 | Not documented | 46 |
| L1MDa_dup812 | Multi | No | — | — | LINE | Other L1 | chr2: 112101490-112101806 | − | 120 | 317 | BCL2L11 | Distal | 175467 | Not documented | 47 |
| AluYa5_dup481 | Multi | No | — | — | SINE | Alu | chr2: 112242227-112242518 | + | 7.7 | 292 | ANAPC1 | Distal | 281331 | Not documented | 48 |
| AluYa5_dup482 | Multi | No | — | — | SINE | Alu | chr2: 112399486-112399797 | + | 4.5 | 312 | ANAPC1 | Distal | 124052 | Not documented | 49 |
| L2b_dup13547 | Multi | No | — | — | LINE | L2 | chr2: 114023120-114023387 | + | 140 | 268 | PAX8 | Proximal | 0 | Not documented | 2650 |
| MER31-int_dup245 | Multi | No | — | — | LTR | ERV1 | chr2: 114368825-114369271 | + | 100 | 447 | RABL2A | Distal | 15536 | Not documented | 51 |
| AluSc5_dup792 | Multi | No | — | — | SINE | Alu | chr2: 114400213-114400502 | − | 28 | 290 | RABL2A | Proximal | 0 | Not documented | 52 |
| L2_dup5465 | Uniquely | No | — | — | LINE | L2 | chr2: 11465679-11467698 | − | 160 | 2020 | ROCK2 | Proximal | 0 | Not documented | 53 |
| MER131_dup65 | Multi | No | — | — | SINE | SINE | chr2: 118867293-118867429 | − | 160 | 137 | INSIG2 | Proximal | | Not documented | 54 |
| L2a_dup22113 | Multi | No | — | — | LINE | L2 | chr2: 120125421-120125545 | + | 130 | 125 | DB | Proximal | 0 | Not documented | 55 |
| MIRb_dup31476 | Uniquely | No | — | — | SINE | MIR | chr2: 120439465-120439674 | + | 160 | 210 | TMEM177 | Proximal | 0 | Not documented | 56 |
| L1ME1_dup4016 | Uniquely | No | — | — | LINE | Other L1 | chr2: 121512727-121514170 | − | 110 | 1444 | GLI2 | Proximal | 0 | Not documented | 57 |
| AluJo_dup8985 | Multi | No | — | — | SINE | Alu | chr2: 122523898-122524029 | + | 52 | 132 | TSN | Proximal | 0 | Not documented | 58 |
| L1MC_dup1343 | Multi | No | — | — | LINE | Other L1 | chr2: 128608253-128608349 | + | 110 | 97 | POLR2D | Proximal | 0 | Not documented | 59 |
| L3_dup6525 | Multi | No | — | — | LINE | CR1 | chr2: 130930188-130930242 | − | 110 | 55 | SMPD4 | Proximal | 0 | Not documented | 60 |
| L1MA9_dup1775 | Multi | No | — | — | LINE | Other L1 | chr2: 131104497-131105081 | − | 75 | 585 | IMP4 | Proximal | 0 | Not documented | 61 |
| MLT1A0_dup2518 | Multi | No | — | — | LTR | ERVL- | chr2: 131105083-131105416 | + | 78 | 334 | IMP4 | Proximal | 0 | Not documented | 62 |
| | | | | | | MaLR | | | | | | | | | |
| MIRc_dup11187 | Uniquely | No | — | — | SINE | MIR | chr2: 13144002-13144092 | + | 150 | 91 | TRIB2 | Distal | 261143 | Not documented | 63 |
| AluSq_dup2730 | Multi | No | — | — | SINE | Alu | chr2: 132227382-132227675 | − | 43 | 294 | MZT2A | Proximal | 0 | Not documented | 64 |
| AluSx3_dup3778 | Multi | No | — | — | SINE | Alu | chr2: 132553830-132554149 | − | 58 | 320 | C2orf27B | Proximal | 0 | Not documented | 65 |
| TAR1_dup21 | Multi | No | — | — | Other | Other | chr2: 132560215-132560696 | + | 71 | 482 | C2orf27B | Proximal | 982 | Not documented | 66 |
| | | | | | | Repeats | | | | | | | | | |
| L1PB_dup175 | Multi | No | — | — | LINE | L1PA\|B\|x | chr2: 132561092-132561536 | − | 37 | 445 | C2orf27B | Proximal | 1859 | Not documented | 67 |
| TAR1_dup22 | Multi | No | — | — | Other | Other | chr2: 132570743-132571233 | − | 76 | 491 | C2orf27B | Distal | 11510 | Not documented | 68 |
| | | | | | | Repeats | | | | | | | | | |
| L1MA4_dup1100 | Multi | No | — | — | LINE | Other L1 | chr2: 132709922-132711670 | − | 83 | 1749 | C2orf27B | Distal | 150689 | Not documented | 69 |
| AluSq2_dup7015 | Multi | No | — | — | SINE | Alu | chr2: 132713093-132713371 | − | 55 | 279 | C2orf27B | Distal | 153860 | Not documented | 70 |
| L1M4_dup2000 | Multi | No | — | — | LINE | Other L1 | chr2: 132732715-132735569 | + | 120 | 2855 | ANKRD30BL | Distal | 169596 | Not documented | 71 |
| MLT1A0_dup2527 | Multi | No | — | — | LTR | ERVL- | chr2: 132755503-132755888 | + | 96 | 386 | ANKRD30BL | Distal | 149277 | Not documented | 72 |
| | | | | | | MaLR | | | | | | | | | |
| L1PA16_dup1488 | Multi | No | — | — | LINE | L1PA\|B\|x | chr2: 132760103-132761264 | − | 63 | 1162 | ANKRD30BL | Distal | 143901 | Not documented | 73 |
| MER77_dup131 | Multi | No | — | — | LTR | ERVL | chr2: 132764598-132765208 | − | 120 | 611 | ANKRD30BL | Distal | 139957 | Not documented | 74 |
| CER_dup5 | Multi | No | — | — | Other | Other | chr2: 132826613-132836513 | + | 57 | 9901 | ANKRD30BL | Distal | 68652 | Not documented | 2675 |
| | | | | | | Repeats | | | | | | | | | |
| L1MA9_dup1783 | Multi | No | — | — | LINE | Other L1 | chr2: 132846401-132848533 | − | 100 | 2133 | ANKRD30BL | Distal | 56632 | Not documented | 76 |
| MSTB_dup1003 | Multi | No | — | — | LTR | ERVL- | chr2: 132852207-132852618 | + | 100 | 412 | ANKRD30BL | Distal | 52547 | Not documented | 77 |
| | | | | | | MaLR | | | | | | | | | |
| L2a_dup22714 | Multi | No | — | — | LINE | L2 | chr2: 132892485-132892812 | − | 150 | 328 | ANKRD30BL | Distal | 12353 | Not documented | 78 |
| LTR10A_dup42 | Multi | No | — | — | LTR | ERV1 | chr2: 132905124-132905636 | − | 79 | 513 | ANKRD30BL | Proximal | 0 | Not documented | 79 |
| AluSp_dup6548 | Multi | No | — | — | SINE | Alu | chr2: 132939403-132939716 | + | 51 | 314 | ANKRD30BL | Proximal | 0 | Not documented | 80 |
| ALR/Alpha_dup67 | Multi | No | — | — | Other | Other | chr2: 132966375-132977849 | + | 63 | 11475 | ANKRD30BL | Proximal | 0 | Not documented | 81 |
| | | | | | | Repeats | | | | | | | | | |
| MER45C_dup161 | Multi | No | — | — | DNA | DNA | chr2: 133011227-133011381 | − | 110 | 155 | ANKRD30BL | Proximal | 0 | Not documented | 82 |
| AluY_dup14974 | Multi | No | — | — | SINE | Alu | chr2: 133015979-133016280 | + | 42 | 302 | ANKRD30BL | Proximal | 438 | Not documented | 83 |
| AluSq2_dup7020 | Multi | No | — | — | SINE | Alu | chr2: 133050673-133050964 | + | 64 | 292 | ANKRD30BL | Distal | 35132 | Not documented | 84 |
| L1MD2_dup1230 | Multi | No | — | — | LINE | Other L1 | chr2: 133086622-133087681 | + | 95 | 1060 | ANKRD30BL | Distal | 71081 | Not documented | 85 |
| LTR50_dup311 | Multi | No | — | — | LTR | ERVL | chr2: 133102676-133102912 | − | 110 | 237 | GPR39 | Distal | 71236 | Not documented | 86 |
| TAR1_dup23 | Multi | No | — | — | Other | Other | chr2: 133109768-133110293 | − | 78 | 526 | GPR39 | Distal | 63855 | Not documented | 87 |
| | | | | | | Repeats | | | | | | | | | |
| L1PA8_dup897 | Multi | No | — | — | LINE | L1PA\|B\|x | chr2: 133121635-133123314 | + | 45 | 1680 | GPR39 | Distal | 50834 | Not documented | 88 |
| L1M7_dup519 | Multi | No | — | — | LINE | Other L1 | chr2: 133209279-133210061 | − | 110 | 783 | GPR39 | Proximal | 0 | Not documented | 89 |
| MER46C_dup335 | Multi | No | — | — | DNA | DNA | chr2: 133283601-133283892 | + | 110 | 292 | GPR39 | Proximal | 0 | Not documented | 90 |
| L1PA8_dup902 | Multi | No | — | — | LINE | L1PA\|B\|x | chr2: 133295853-133297084 | − | 75 | 1232 | GPR39 | Proximal | 0 | Not documented | 91 |
| LTR21A_dup12 | Multi | No | — | — | LTR | ERV1 | chr2: 133315194-133315601 | − | 100 | 408 | GPR39 | Proximal | 0 | Not documented | 92 |
| L2c_dup21674 | Multi | No | — | — | LINE | L2 | chr2: 135816931-135817062 | − | 140 | 132 | RAB3GAP1 | Proximal | 0 | Not documented | 93 |
| L1ME4a_dup5649 | Multi | No | — | — | LINE | Other L1 | chr2: 136541589-136541848 | + | 130 | 260 | UBXN4 | Proximal | 0 | Not documented | 94 |
| AluJo_dup9260 | Multi | No | — | — | SINE | Alu | chr2: 136664809-136664874 | − | 55 | 66 | DARS | Proximal | 0 | Not documented | 95 |
| L1PB4_dup743 | Multi | No | — | — | LINE | L1PA\|B\|x | chr2: 142128774-142134140 | − | 99 | 5367 | LRP1B | Proximal | 0 | Not documented | 96 |
| L1MB1_dup683 | Multi | No | — | — | LINE | Other L1 | chr2: 142174794-142176736 | − | 77 | 1943 | LRP1B | Proximal | 0 | Not documented | 97 |
| L1M1_dup996 | Multi | No | — | — | LINE | Other L1 | chr2: 142500123-142502203 | − | 77 | 2081 | LRP1B | Proximal | 0 | Not documented | 98 |
| L1MC4_dup3672 | Uniquely | No | — | — | LINE | Other L1 | chr2: 142629808-142630716 | + | 130 | 909 | LRP1B | Proximal | 0 | Not documented | 99 |
| MER20_dup1813 | Multi | No | — | — | DNA | DNA | chr2: 142767633-142767842 | + | 120 | 210 | LRP1B | Proximal | 0 | Not documented | 2700 |
| AluY_dup15301 | Multi | No | — | — | SINE | Alu | chr2: 142773281-142773581 | + | 21 | 301 | LRP1B | Proximal | 0 | Not documented | 1 |
| L2a_dup23255 | Uniquely | No | — | — | LINE | L2 | chr2: 142776923-142777679 | + | 130 | 757 | LRP1B | Proximal | 0 | Not documented | 2 |
| AluSx_dup18329 | Multi | No | — | — | SINE | Alu | chr2: 142837069-142837378 | − | 59 | 310 | LRP1B | Proximal | 0 | Not documented | 3 |
| MLT1A0_dup1709 | Multi/ | No | — | — | LTR | ERVL- | chr2: 14789881-14790233 | + | 84 | 353 | AC011897.1 | Proximal | 0 | Not documented | 4 |
| | Uniquely | | | | | MaLR | | | | | | | | | |
| L1ME4a_dup5867 | Uniquely | No | — | — | LINE | Other L1 | chr2: 152236140-152236628 | − | 110 | 489 | TNFAIP6 | Proximal | 0 | Not documented | 5 |
| L1MC3_dup1629 | Uniquely | No | — | — | LINE | Other L1 | chr2: 159853521-159854516 | + | 110 | 996 | TANC1 | Proximal | 0 | Not documented | 6 |
| AluJr4_dup2572 | Uniquely | No | — | — | SINE | Alu | chr2: 159922638-159922939 | + | 65 | 302 | TANC1 | Proximal | 0 | Not documented | 7 |
| L1MB7_dup3075 | Uniquely | No | — | — | LINE | Other L1 | chr2: 159962612-159963402 | − | 83 | 791 | TANC1 | Proximal | 0 | Not documented | 8 |
| AluJo_dup9591 | Multi/ | No | — | — | SINE | Alu | chr2: 159989856-159990034 | − | 74 | 179 | TANC1 | Proximal | 0 | Not documented | 9 |
| | Uniquely | | | | | | | | | | | | | | |
| MARNA_dup477 | Multi | No | — | — | DNA | DNA | chr2: 160088189-160088272 | − | 100 | 84 | TANC1 | Proximal | 0 | Not documented | 10 |
| L1MA6_dup687 | Uniquely | No | — | — | LINE | Other L1 | chr2: 166709932-166711873 | − | 84 | 1942 | TTC21B | Distal | 2113 | Not documented | 11 |
| L1MEg1_dup147 | Uniquely | No | — | — | LINE | Other L1 | chr2: 168196835-168197676 | + | 130 | 842 | XIRP2 | Distal | 80573 | Not documented | 12 |
| AluY_dup16043 | Multi/ | No | — | — | SINE | Alu | chr2: 168728402-168728711 | − | 10 | 310 | B3GALT1 | Proximal | 0 | Not documented | 13 |
| | Uniquely | | | | | | | | | | | | | | |
| AluSq_dup1863 | Uniquely | No | — | — | SINE | Alu | chr2: 1693273-1693571 | + | 56 | 299 | PXDN | Proximal | 0 | Not documented | 14 |
| THE1A-int_dup206 | Uniquely | No | — | — | LTF | ERVL- | chr2: 170543726-170545414 | − | 40 | 1689 | CCDC173 | Proximal | 0 | Not documented | 15 |
| | | | | | | MaLR | | | | | | | | | |
| AluJb_dup20216 | Uniquely | No | — | — | SINE | Alu | chr2: 170662478-170662774 | − | 77 | 297 | SSB | Proximal | 0 | Not documented | 16 |
| L1PA6_dup772 | Uniquely | No | — | — | LINE | L1PA\|B\|x | chr2: 170672860-170674431 | + | 29 | 1572 | METTL5 | Proximal | 0 | Not documented | 17 |
| L2_dup8175 | Uniquely | No | — | — | LINE | L2 | chr2: 171866495-171867112 | − | 160 | 618 | TLK1 | Proximal | 0 | Not documented | 18 |
| MLT1A_dup1186 | Uniquely | No | — | — | LTR | ERVL- | chr2: 171874528-171874865 | + | 87 | 338 | TLK1 | Proximal | 0 | Not documented | 19 |
| | | | | | | MaLR | | | | | | | | | |
| AluSq2_dup7552 | Uniquely | No | — | — | SINE | Alu | chr2: 175261243-175261543 | + | 33 | 301 | SCRN3 | Proximal | 0 | Not documented | 20 |
| MIRb_dup35373 | Multi | No | — | — | SINE | MIR | chr2: 176793021-176793157 | − | 130 | 137 | KIAA1715 | Proximal | 0 | Not documented | 21 |
| AluJr_dup10246 | Uniquely | No | — | — | SINE | Alu | chr2: 177494960-177495185 | + | 66 | 226 | MTX2 | Distal | 292208 | Not documented | 22 |
| AluJo_dup10012 | Multi | No | — | — | SINE | Alu | chr2: 178087254-178087517 | + | 78 | 264 | HNRNPA3 | Proximal | 0 | Not documented | 23 |
| L1M3f_dup81 | Uniquely | No | — | — | LINE | Other L1 | chr2: 179288966-179291775 | − | 79 | 2810 | PRKRA | Distal | 4367 | Not documented | 24 |
| MER58C_dup385 | Multi/ | No | — | — | DNA | DNA | chr2: 183642015-183642232 | − | 110 | 218 | DNAJC10 | Proximal | 0 | Not documented | 2725 |
| | Uniquely | | | | | | | | | | | | | | |
| AluJo_dup10082 | Multi | No | — | — | SINE | Alu | chr2: 183800703-183800993 | + | 94 | 291 | NCKAP1 | Proximal | 0 | Not documented | 26 |
| AluSz_dup13399 | Uniquely | No | — | — | SINE | Alu | chr2: 183801599-183801870 | + | 45 | 272 | NCKAP1 | Proximal | 0 | Not documented | 27 |
| L1PA15_dup1016 | Multi | No | — | — | LINE | L1PA\|B\|x | chr2: 183858255-183858586 | + | 50 | 332 | NCKAP1 | Proximal | 0 | Not documented | 28 |
| L1ME2z_dup992 | Multi/ | No | — | — | LINE | Other L1 | chr2: 183858630-183858744 | + | 100 | 115 | NCKAP1 | Proximal | 0 | Not documented | 29 |
| | Uniquely | | | | | | | | | | | | | | |
| MIRb_dup35814 | Multi | No | — | — | SINE | MIR | chr2: 183858985-183859083 | + | 120 | 99 | NCKAP1 | Proximal | 0 | Not documented | 30 |
| AluSz_dup13403 | Multi/ | No | — | — | SINE | Alu | chr2: 183859084-183859394 | + | 53 | 311 | NCKAP1 | Proximal | 0 | Not documented | 31 |
| | Uniquely | | | | | | | | | | | | | | |
| AluSx3_dup4169 | Multi | No | — | — | SINE | Alu | chr2: 186810550-186810854 | + | 46 | 305 | FSIP2 | Distal | 112534 | Not documented | 32 |
| L1MA7_dup1035 | Uniquely | No | — | — | LINE | Other L1 | chr2: 186976070-186979187 | − | 110 | 3118 | FSIP2 | Distal | 278054 | Not documented | 33 |
| AluJb_dup20970 | Uniquely | No | — | — | SINE | Alu | chr2: 187321463-187321770 | + | 87 | 308 | ZC3H15 | Distal | 29114 | Not documented | 34 |
| L1MB2_dup1142 | Uniquely | No | — | — | LINE | Other L1 | chr2: 187391400-187392919 | − | 72 | 1520 | ZC3H15 | Distal | 17311 | Not documented | 35 |
| L1MA3_dup663 | Uniquely | No | — | — | LINE | Other L1 | chr2: 187563241-187564956 | − | 45 | 1716 | FAM171B | Proximal | 0 | Not documented | 36 |
| AluJb_dup21009 | Multi/ | No | — | — | SINE | Alu | chr2: 188329954-188330229 | + | 68 | 276 | TFPI | Proximal | 0 | Not documented | 37 |
| | Uniquely | | | | | | | | | | | | | | |
| L2_dup8495 | Multi | No | — | — | LINE | L2 | chr2: 188330317-188330419 | − | 180 | 103 | TFPI | Proximal | 0 | Not documented | 38 |
| MER58B_dup970 | Multi | No | — | — | DNA | DNA | chr2: 191069508-191069812 | − | 91 | 305 | HIBCH | Proximal | 0 | Not documented | 39 |
| LTR33_dup1242 | Uniquely | No | — | — | LTR | ERVL | chr2: 197714630-197715038 | + | 130 | 409 | PGAP1 | Proximal | 0 | Not documented | 40 |
| MER124_dup104 | Multi | No | — | — | DNA | DNA | chr2: 198436330-198436573 | − | 120 | 244 | RFTN2 | Proximal | 0 | Not documented | 41 |
| L1MDb_dup144 | Multi/ | No | — | — | LINE | Other L1 | chr2: 200820720-200820848 | + | 120 | 129 | C2orf47 | Proximal | 0 | Not documented | 42 |
| | Uniquely | | | | | | | | | | | | | | |
| AluSx_dup19969 | Multi | No | — | — | SINE | Alu | chr2: 201343618-201343925 | − | 53 | 308 | SPATS2L | Proximal | 0 | Not documented | 43 |
| MLT1K_dup2297 | Multi | No | — | — | LTR | ERVL- | chr2: 201343926-201344291 | − | 120 | 366 | SPATS2L | Proximal | 0 | Not documented | 44 |
| | | | | | | MaLR | | | | | | | | | |
| MER65A_dup226 | Uniquely | No | — | — | LTR | ERV1 | chr2: 202485152-202485584 | − | 58 | 433 | TMEM237 | Proximal | 0 | Not documented | 45 |
| AluJb_dup21578 | Uniquely | No | — | — | SINE | Alu | chr2: 202624764-202625059 | + | 77 | 296 | ALS2 | Proximal | 0 | Not documented | 46 |
| Tigger14a_dup186 | Multi | No | — | — | DNA | DNA | chr2: 203070992-203071098 | − | 87 | 107 | SUMO1 | Proximal | 0 | Not documented | 47 |
| Tigger3b_dup933 | Uniquely | Nc | — | — | DNA | DNA | chr2: 204216583-204217852 | + | 58 | 1270 | ABI2 | Proximal | 0 | Not documented | 48 |
| AluSg_dup6073 | Multi | No | — | — | SINE | Alu | chr2: 204249547-204249854 | − | 40 | 308 | ABI2 | Proximal | 0 | Not documented | 49 |
| AluYf4_dup216 | Multi | No | — | — | SINE | Alu | chr2: 204249860-204250153 | − | 26 | 294 | ABI2 | Proximal | 0 | Not documented | 2750 |
| AluSx1_dup15091 | Uniquely | No | — | — | SINE | Alu | chr2: 204251364-204251662 | − | 55 | 299 | ABI2 | Proximal | 0 | Not documented | 51 |
| AluSx_dup20281 | Multi | No | — | — | SINE | Alu | chr2: 204253124-204253407 | + | 42 | 284 | ABI2 | Proximal | 0 | Not documented | 52 |
| AluSz_dup13960 | Multi | No | — | — | SINE | Alu | chr2: 204264803-204265111 | − | 66 | 309 | ABI2 | Proximal | 0 | Not documented | 53 |
| AluYb8_dup382 | Multi/ | No | — | — | SINE | Alu | chr2: 204273553-204273860 | − | 5.9 | 308 | ABI2 | Proximal | 0 | Not documented | 54 |
| | Uniquely | | | | | | | | | | | | | | |
| MIRb_dup36842 | Uniquely | No | — | — | SINE | MIR | chr2: 204274416-204274642 | − | 150 | 227 | ABI2 | Proximal | 0 | Not documented | 55 |
| AluSc_dup4951 | Multi | No | — | — | SINE | Alu | chr2: 204294200-204294493 | + | 40 | 294 | ABI2 | Proximal | 0 | Not documented | 56 |
| AluY_dup17396 | Uniquely | No | — | — | SINE | Alu | chr2: 205581347-205581644 | − | 27 | 298 | PARD3B | Proximal | 0 | Not documented | 57 |
| L1PREC2_dup1040 | Uniquely | No | — | — | LINE | L1PA\|B\|x | chr2: 205673053-205675966 | − | 50 | 2914 | PARD3B | Proximal | 0 | Not documented | 58 |
| LFSINE_Vert_{—} | Multi/ | No | — | — | SINE | SINE | chr2: 207025571-207025803 | − | 82 | 233 | EEF1B2 | Proximal | 0 | Not documented | 59 |
| dup156 | Uniquely | | | | | | | | | | | | | | |
| L1MD3_dup778 | Multi | No | — | — | LINE | Other L1 | chr2: 208446314-208447425 | − | 91 | 1112 | METTL21A | Proximal | 0 | Not documented | 60 |
| MIRb_dup37265 | Multi | No | — | — | SINE | MIR | chr2: 210885187-210885417 | + | 150 | 231 | RPE | Proximal | 0 | Not documented | 61 |
| MIRc_dup17730 | Multi | No | — | — | SINE | MIR | chr2: 210885450-210885603 | − | 150 | 154 | RPE | Proximal | 0 | Not documented | 62 |
| L1MA3_dup1243 | Uniquely | No | — | — | LINE | Other L1 | chr2: 210980701-210982390 | + | 65 | 1690 | KANSL1L | Proximal | 0 | Not documented | 63 |
| L2a_dup27009 | Uniquely | No | — | — | LINE | L2 | chr2: 213116035-213117449 | − | 130 | 1415 | ERBB4 | Proximal | 0 | Not documented | 64 |
| MLT1D_dup2742 | Uniquely | No | — | — | LTR | ERVL- | chr2: 213314942-213315420 | + | 100 | 479 | ERBB4 | Proximal | 0 | Not documented | 65 |
| | | | | | | MaLR | | | | | | | | | |
| L1MC1_dup2026 | Multi/ | No | — | — | LINE | Other L1 | chr2: 214182496-214182695 | + | 55 | 200 | SPAG16 | Proximal | 0 | Not documented | 66 |
| | Uniquely | | | | | | | | | | | | | | |
| MLT1F1_dup453 | Uniquely | No | — | — | LTR | ERVL- | chr2: 216978217-216978776 | − | 120 | 560 | XRCC5 | Proximal | 0 | Not documented | 67 |
| | | | | | | MaLR | | | | | | | | | |
| L1ME1_dup5076 | Uniquely | No | — | — | LINE | Other L1 | chr2: 218835791-218836411 | − | 95 | 621 | TNS1 | Proximal | 0 | Not documented | 68 |
| Charlie16a_dup339 | Multi/ | No | — | — | DNA | DNA | chr2: 220420495-220420613 | + | 130 | 119 | OBSL1 | Proximal | 0 | Not documented | 69 |
| | Uniquely | | | | | | | | | | | | | | |
| MER102c_dup482 | Multi/ | No | — | — | DNA | DNA | chr2: 220426475-220426797 | − | 130 | 323 | OBSL1 | Proximal | 0 | Not documented | 70 |
| | Uniquely | | | | | | | | | | | | | | |
| MIRb_dup38164 | Uniquely | No | — | — | SINE | MIR | chr2: 222390244-222390431 | + | 130 | 188 | EPHA4 | Proximal | 0 | Not documented | 71 |
| AluY_dup18114 | Uniquely | No | — | — | SINE | Alu | chr2: 225229337-225229635 | + | 21 | 299 | FAM124B | Distal | 13781 | Not documented | 72 |
| MER20_dup2199 | Uniquely | No | — | — | DNA | DNA | chr2: 231912221-231912408 | + | 110 | 188 | C2orf72 | Proximal | 0 | Not documented | 73 |
| MIR_dup17638 | Uniquely | No | — | — | SINE | MIR | chr2: 23614804-23615036 | + | 120 | 233 | KLHL29 | Proximal | 0 | Not documented | 74 |
| L2_dup9415 | Uniquely | No | — | — | LINE | L2 | chr2: 236847967-236849119 | + | 140 | 1153 | AGAP1 | Proximal | 0 | Not documented | 2775 |
| AluJo_dup11151 | Multi | No | — | — | SINE | Alu | chr2: 237996291-237996612 | + | 66 | 322 | COPS8 | Proximal | 0 | Not documented | 76 |
| L3_dup8122 | Multi | No | — | — | LINE | CR1 | chr2: 238007182-238007413 | − | 140 | 232 | COPS8 | Proximal | 0 | Not documented | 77 |
| L3_dup8154 | Multi | No | — | — | LINE | CR1 | chr2: 240961576-240961632 | − | 95 | 57 | NDUFA10 | Proximal | 0 | Not documented | 78 |
| L1ME3C_dup2043 | Uniquely | No | — | — | LINE | Other L1 | chr2: 242014221-242016008 | − | 140 | 1788 | MTERFD2 | Proximal | 0 | Not documented | 79 |
| LTR78_dup441 | Multi | No | — | — | LTR | ERV1 | chr2: 24390291-24390824 | − | 130 | 534 | RP11-507M3.1 | Proximal | 0 | Not documented | 80 |
| MIR3_dup10024 | Uniquely | No | — | — | SINE | MIR | chr2: 26468416-26468568 | − | 120 | 153 | HADHB | Proximal | 0 | Not documented | 81 |
| AluY_dup10707 | Uniquely | No | — | — | SINE | Alu | chr2: 27171445-27171745 | + | 32 | 301 | DPYSL5 | Proximal | 0 | Not documented | 82 |
| L2a_dup17654 | Multi | No | — | — | LINE | L2 | chr2: 27532541-27532573 | − | 55 | 33 | MPV17 | Proximal | 0 | Not documented | 83 |
| L4_dup1359 | Multi | No | — | — | LINE | RTE | chr2: 27873501-27873534 | − | 28 | 34 | GPN1 | Proximal | 0 | Not documented | 84 |
| L2c_dup17231 | Multi | No | — | — | LINE | L2 | chr2: 27885074-27885251 | − | 120 | 178 | SUPT7L | Proximal | 0 | Not documented | 85 |
| L1PB3_dup260 | Multi | No | — | — | LINE | L1PA\|B\|x | chr2: 27916099-27916572 | − | 95 | 474 | SLC4A1AP | Proximal | 0 | Not documented | 86 |
| L1ME3_dup855 | Multi | No | — | — | LINE | Other L1 | chr2: 28994217-28994900 | + | 120 | 684 | PPP1CB | Proximal | 0 | Not documented | 87 |
| Tigger12c_dup123 | Multi | No | — | — | DNA | DNA | chr2: 29024744-29024864 | + | 110 | 121 | PPP1CB | Proximal | 0 | Not documented | 88 |
| Charlie1a_dup569 | Uniquely | No | — | — | DNA | DNA | chr2: 32676532-32677577 | + | 98 | 1046 | BIRC6 | Proximal | 0 | Not documented | 89 |
| L1MB8_dup1309 | Multi | No | — | — | LINE | Other L1 | chr2: 37326766-37327285 | + | 64 | 520 | EIF2AK2 | Proximal | 0 | Not documented | 90 |
| AluSz_dup9540 | Multi | No | — | — | SINE | Alu | chr2: 37429507-37429847 | + | 50 | 341 | AC007390.5 | Proximal | 0 | Not documented | 91 |
| AluSc_dup3278 | Uniquely | No | — | — | SINE | Alu | chr2: 37431414-37431718 | − | 42 | 305 | AC007390.5 | Proximal | 0 | Not documented | 92 |
| AluJb_dup14925 | Multi | No | — | — | SINE | Alu | chr2: 37431719-37431768 | − | 56 | 50 | AC007390.5 | Proximal | 0 | Not documented | 93 |
| AluSc8_dup2037 | Uniquely | No | — | — | SINE | Alu | chr2: 38974225-38974283 | + | 110 | 59 | SRSF7 | Proximal | 0 | Not documented | 94 |
| L1MEd_dup1090 | Multi | No | — | — | LINE | Other L1 | chr2: 44545919-44546125 | + | 130 | 207 | PREPL | Proximal | 0 | Not documented | 95 |
| MIR_dup18758 | Multi | No | — | — | SINE | MIR | chr2: 44546126-44546196 | − | 130 | 71 | PREPL | Proximal | 0 | Not documented | 96 |
| L1MEd_dup1091 | Multi | Nc | — | — | LINE | Other L1 | chr2: 44546426-44546527 | + | 110 | 102 | PREPL | Proximal | 0 | Not documented | 97 |
| L1MEc_dup2141 | Uniquely | No | — | — | LINE | Other L1 | chr2: 46760713-46762438 | − | 130 | 1726 | ATP6V1E2 | Proximal | 0 | Not documented | 98 |
| L1PA16_dup1078 | Multi/ | No | — | — | LINE | L1PA\|B\|x | chr2: 46853079-46853966 | − | 49 | 888 | CRIPT | Proximal | 199 | Not documented | 99 |
| | Uniquely | | | | | | | | | | | | | | |
| L1PA16_dup1079 | Uniquely | No | — | — | LINE | L1PA\|B\|x | chr2: 46854272-46854580 | − | 43 | 309 | CRIPT | Proximal | 1392 | Not documented | 2800 |
| THE1A_dup416 | Multi | No | — | — | LTR | ERVL- | chr2: 47130142-47130492 | + | 25 | 351 | MCFD2 | Proximal | 0 | Not documented | 1 |
| | | | | | | MaLR | | | | | | | | | |
| THE1A-int_dup131 | Multi | No | — | — | LTR | ERVL- | chr2: 47130493-47132008 | + | 34 | 1516 | MCFD2 | Proximal | 0 | Not documented | 2 |
| | | | | | | MaLR | | | | | | | | | |
| THE1A_dup417 | Multi | No | — | — | LTR | ERVL- | chr2: 47132009-47132359 | + | 25 | 351 | MCFD2 | Proximal | 0 | Not documented | 3 |
| | | | | | | MaLR | | | | | | | | | |
| MIRb_dup27132 | Multi | No | — | — | SINE | MIR | chr2: 47399408-47399594 | + | 110 | 187 | CALM2 | Proximal | 0 | Not documented | 4 |
| L3_dup5310 | Multi | No | — | — | LINE | CR1 | chr2: 47637248-47637289 | − | 120 | 42 | MSH2 | Proximal | 0 | Not documented | 5 |
| AluYc_dup829 | Multi/ | No | — | — | SINE | Alu | chr2: 50844279-50844581 | − | 50 | 303 | NRXN1 | Proximal | 0 | Not documented | 6 |
| | Uniquely | | | | | | | | | | | | | | |
| Tigger15a_dup572 | Multi/ | No | — | — | DNA | DNA | chr2: 50910400-50910488 | + | 120 | 89 | NRXN1 | Proximal | 0 | Not documented | 7 |
| | Uniquely | | | | | | | | | | | | | | |
| AluY_dup11751 | Multi/ | No | — | — | SINE | Alu | chr2: 50910489-50910784 | + | 40 | 296 | NRXN1 | Proximal | 0 | Not documented | 8 |
| | Uniquely | | | | | | | | | | | | | | |
| Tigger4_dup174 | Multi/ | No | — | — | DNA | DNA | chr2: 51017787-51018122 | − | 91 | 336 | NRXN1 | Proximal | 0 | Not documented | 9 |
| | Uniquely | | | | | | | | | | | | | | |
| L4_dup1512 | Multi | No | — | — | LINE | RTE | chr2: 51018416-51018639 | + | 130 | 224 | NRXN1 | Proximal | 0 | Not documented | 10 |
| MIRc_dup13163 | Multi/ | No | — | — | SINE | MIR | chr2: 51061704-51061841 | + | 140 | 138 | NRXN1 | Proximal | 0 | Not documented | 11 |
| | Uniquely | | | | | | | | | | | | | | |
| MER5A_dup3171 | Uniquely | No | — | — | DNA | DNA | chr2: 51061914-51062007 | − | 140 | 94 | NRXN1 | Proximal | 0 | Not documented | 12 |
| L1MA7_dup676 | Uniquely | No | — | — | LINE | Other L1 | chr2: 51063342-51063894 | − | 69 | 553 | NRXN1 | Proximal | 0 | Not documented | 13 |
| THE1C_dup892 | Multi/ | No | — | — | LTR | ERVL- | chr2: 51605019-51605395 | + | 59 | 377 | NRXN1 | Distal | 345346 | Not documented | 14 |
| | Uniquely | | | | | MaLR | | | | | | | | | |
| L1MC2_dup554 | Uniquely | No | — | — | LINE | Other L1 | chr2: 51659870-51661759 | + | 110 | 1890 | NRXN1 | Distal | 400197 | Not documented | 15 |
| HERV17-int_dup93 | Uniquely | No | — | — | LTR | ERV1 | chr2: 53986012-53987331 | + | 28 | 1320 | ASB3 | Proximal | 0 | EVE annotated | 16 |
| MER1A_dup273 | Multi | No | — | — | DNA | DNA | chr2: 54184302-54184801 | − | 58 | 500 | PSME4 | Proximal | | Not documented | 17 |
| L1MC5_dup1722 | Multi | No | — | — | LINE | Other L1 | chr2: 54184802-54184945 | + | 100 | 144 | PSME4 | Proximal | 0 | Not documented | 18 |
| AluSz_dup10117 | Multi | No | — | — | SINE | Alu | chr2: 54185096-54185343 | + | 44 | 248 | PSME4 | Proximal | 0 | Not documented | 19 |
| AluSx_dup14849 | Multi | No | — | — | SINE | Alu | chr2: 54194508-54194816 | + | 44 | 309 | PSME4 | Proximal | 0 | Not documented | 20 |
| LTR7B_dup91 | Multi | No | — | — | LTR | ERV1 | chr2: 54200476-54200939 | + | 25 | 464 | ACYP2 | Proximal | 0 | Not documented | 21 |
| AluJo_dup7516 | Multi | No | — | — | SINE | Alu | chr2: 54277912-54278209 | − | 95 | 298 | ACYP2 | Proximal | 0 | Not documented | 22 |
| AluJo_dup7522 | Multi | No | — | — | SINE | Alu | chr2: 54379253-54379560 | − | 75 | 308 | ACYP2 | Proximal | 0 | Not documented | 23 |
| L1MC2_dup563 | Multi | No | — | — | LINE | Other L1 | chr2: 54379561-54379963 | − | 70 | 403 | ACYP2 | Proximal | 0 | Not documented | 24 |
| L1ME2_dup1332 | Multi | No | — | — | LINE | Other L1 | chr2: 55262271-55263455 | + | 100 | 1185 | RTN4 | Proximal | 0 | Not documented | 2825 |
| L1PREC2_dup656 | Multi | No | — | — | LINE | L1PA\|B\|x | chr2: 55268389-55269180 | + | 140 | 792 | RTN4 | Proximal | 0 | Not documented | 26 |
| L1PREC2_dup657 | Multi | No | — | — | LINE | L1PA\|B\|x | chr2: 55269261-55269588 | + | 130 | 328 | RTN4 | Proximal | 0 | Not documented | 27 |
| L2c_dup18570 | Multi | No | — | — | LINE | L2 | chr2: 55269888-55270110 | − | 150 | 223 | RTN4 | Proximal | 0 | Not documented | 28 |
| AluJb_dup15890 | Multi | No | — | — | SINE | Alu | chr2: 55270607-55270739 | + | 87 | 133 | RTN4 | Proximal | 0 | Not documented | 29 |
| AluSx_dup14905 | Multi | No | — | — | SINE | Alu | chr2: 55270740-55271048 | + | 53 | 309 | RTN4 | Proximal | 0 | Not documented | 30 |
| AluJo_dup7547 | Multi | No | — | — | SINE | Alu | chr2: 55271063-55271335 | + | 77 | 273 | RTN4 | Proximal | 0 | Not documented | 31 |
| AluJb_dup15892 | Multi | No | — | — | SINE | Alu | chr2: 55271336-55271563 | + | 87 | 228 | RTN4 | Proximal | 0 | Not documented | 32 |
| AluJr_dup7674 | Multi | No | — | — | SINE | Alu | chr2: 55271566-55271671 | + | 69 | 106 | RTN4 | Proximal | 0 | Not documented | 33 |
| L4_dup1530 | Uniquely | No | — | — | LINE | RTE | chr2: 55402211-55402737 | + | 160 | 527 | CLHC1 | Proximal | 0 | Not documented | 34 |
| L2a_dup19256 | Uniquely | No | — | — | LINE | L2 | chr2: 55457229-55458065 | − | 100 | 837 | CLHC1 | Proximal | 0 | Not documented | 35 |
| L1MC1_dup1338 | Uniquely | No | — | — | LINE | Other L1 | chr2: 55766100-55767864 | − | 51 | 1765 | CCDC104 | Proximal | 0 | Not documented | 36 |
| MER91C_dup127 | Multi | No | — | — | DNA | DNA | chr2: 5835430-5835520 | − | 140 | 91 | SOX11 | Proximal | 0 | Not documented | 37 |
| L1P2_dup165 | Uniquely | No | — | — | LINE | L1PA\|B\|x | chr2: 61248198-61249617 | + | 34 | 1420 | PEX13 | Proximal | 0 | Not documented | 38 |
| LTR6A_dup22 | Multi | No | — | — | LTR | ERV1 | chr2: 62373518-62373547 | − | 15 | 30 | COMMD1 | Proximal | 0 | Not documented | 39 |
| AluY_dup12368 | Uniquely | No | — | — | SINE | Alu | chr2: 68358047-68358349 | − | 35 | 303 | WDR92 | Proximal | 0 | Not documented | 40 |
| AluSz6_dup5053 | Multi | No | — | — | SINE | Alu | chr2: 68402411-68402692 | − | 58 | 282 | PNO1 | Proximal | 0 | Not documented | 41 |
| MER117_dup437 | Uniquely | No | — | — | DNA | DNA | chr2: 69474216-69474377 | − | 120 | 162 | ANTXR1 | Proximal | 0 | Not documented | 42 |
| Tigger14a_dup122 | Multi/ | No | — | — | DNA | DNA | chr2: 69475971-69476216 | − | 110 | 246 | ANTXR1 | Proximal | 0 | Not documented | 43 |
| | Uniquely | | | | | | | | | | | | | | |
| MER5A_dup3430 | Uniquely | No | — | — | DNA | DNA | chr2: 70507562-70507732 | − | 110 | 171 | PCYOX1 | Proximal | 0 | Not documented | 44 |
| L2b_dup12515 | Multi | No | — | — | LINE | L2 | chr2: 71213067-71213320 | − | 140 | 254 | AC007040.11 | Proximal | 0 | Not documented | 45 |
| L2b_dup12516 | Multi | No | — | — | LINE | L2 | chr2: 71213417-71214255 | − | 140 | 839 | TEX261 | Proximal | 0 | Not documented | 46 |
| AluSx3_dup3216 | Multi | No | — | — | SINE | Alu | chr2: 71638123-71638427 | − | 52 | 305 | ZNF638 | Proximal | 0 | Not documented | 47 |
| MIR3_dup11748 | Multi | No | — | — | SINE | MIR | chr2: 73170973-73171093 | − | 170 | 121 | SFXN5 | Proximal | 0 | Not documented | 48 |
| AluJo_dup8092 | Uniquely | No | — | — | SINE | Alu | chr2: 73744374-73744674 | − | 80 | 301 | ALMS1 | Proximal | 0 | Not documented | 49 |
| AluSq2_dup6064 | Multi | No | — | — | SINE | Alu | chr2: 73959557-73959855 | + | 41 | 299 | TPRKB | Proximal | 0 | Not documented | 2850 |
| L1MC4_dup3003 | Multi | No | — | — | LINE | Other L1 | chr2: 74089644-74089749 | − | 80 | 106 | STAMBP | Proximal | 0 | Not documented | 51 |
| L2_dup6663 | Uniquely | No | — | — | LINE | L2 | chr2: 74375489-74375767 | − | 160 | 279 | BOLA3 | Proximal | 369 | Not documented | 52 |
| L2c_dup19585 | Uniquely | No | — | — | LINE | L2 | chr2: 75325819-75326909 | + | 160 | 1091 | TACR1 | Proximal | 0 | Not documented | 53 |
| MamRep605_dup538 | Multi | No | — | — | Other | Other | chr2: 75882609-75882719 | − | 150 | 111 | MRPL19 | Proximal | 0 | Not documented | 54 |
| | | | | | | Repeats | | | | | | | | | |
| L1ME3B_dup898 | Multi | No | — | — | LINE | Other L1 | chr2: 75882720-75882998 | − | 120 | 279 | MRPL19 | Proximal | 0 | Not documented | 55 |
| 7SK_dup75 | Multi | No | — | — | Other | Other | chr2: 76672296-76672536 | − | 7.7 | 241 | LRRTM4 | Distal | 302310 | Not documented | 56 |
| | | | | | | Repeats | | | | | | | | | |
| AluSx1_dup11644 | Multi | No | — | — | SINE | Alu | chr2: 79067359-79067688 | − | 55 | 330 | REG3G | Distal | 185125 | Not documented | 57 |
| L2a_dup20561 | Uniquely | No | — | — | LINE | L2 | chr2: 80140092-80140813 | − | 150 | 722 | CTNNA2 | Proximal | 0 | Not documented | 58 |
| AluSz6_dup5231 | Uniquely | Nc | — | — | SINE | Alu | chr2: 80157081-80157368 | + | 58 | 288 | CTNNA2 | Proximal | 0 | Not documented | 59 |
| MER47A_dup297 | Uniquely | No | — | — | DNA | DNA | chr2: 80167825-80168094 | − | 71 | 270 | CTNNA2 | Proximal | 0 | Not documented | 60 |
| Charlie22a_dup144 | Multi | No | — | — | DNA | DNA | chr2: 80232949-80233128 | − | 120 | 180 | CTNNA2 | Proximal | 0 | Not documented | 61 |
| AluJr_dup8327 | Multi | No | — | — | SINE | Alu | chr2: 80254812-80255127 | + | 68 | 316 | CTNNA2 | Proximal | 0 | Not documented | 62 |
| AluJb_dup17147 | Multi | No | — | — | SINE | Alu | chr2: 80260409-80260724 | + | 72 | 316 | CTNNA2 | Proximal | 0 | Not documented | 63 |
| L1MC4a_dup2778 | Multi | No | — | — | LINE | Other L1 | chr2: 80260725-80261311 | + | 140 | 587 | CTNNA2 | Proximal | 0 | Not documented | 64 |
| MER5A1_dup1540 | Multi/ | No | — | — | DNA | DNA | chr2: 80280699-80280803 | − | 100 | 105 | CTNNA2 | Proximal | 0 | Not documented | 65 |
| | Uniquely | | | | | | | | | | | | | | |
| MLT1H2_dup458 | Uniquely | No | — | — | LTR | ERVL- | chr2: 80291568-80292050 | − | 110 | 483 | CTNNA2 | Proximal | 0 | Not documented | 66 |
| | | | | | | MaLR | | | | | | | | | |
| MLT1F_dup463 | Multi | No | — | — | LTR | ERVL- | chr2: 80293173-80293304 | + | 100 | 132 | CTNNA2 | Proximal | 0 | Not documented | 67 |
| | | | | | | MaLR | | | | | | | | | |
| L1MA8_dup977 | Multi | No | — | — | LINE | Other L1 | chr2: 80293364-80294456 | + | 55 | 1093 | CTNNA2 | Proximal | 0 | Not documented | 68 |
| L1PA4_dup1138 | Uniquely | No | — | — | LINE | L1PA\|B\|x | chr2: 80320128-80326280 | − | 21 | 6153 | CTNNA2 | Proximal | 0 | Not documented | 69 |
| MER58A_dup1294 | Uniquely | Nc | — | — | DNA | DNA | chr2: 80343187-80343392 | − | 100 | 206 | CTNNA2 | Proximal | 0 | Not documented | 70 |
| LTR16B1_dup108 | Uniquely | No | — | — | LTR | ERVL | chr2: 80356166-80356574 | − | 120 | 409 | CTNNA2 | Proximal | 0 | Not documented | 71 |
| MIR_dup20772 | Uniquely | No | — | — | SINE | MIR | chr2: 80356728-80356970 | − | 160 | 243 | CTNNA2 | Proximal | 0 | Not documented | 72 |
| MLT1C_dup1771 | Uniquely | No | — | — | LTR | ERVL- | chr2: 80360056-80360521 | + | 80 | 466 | CTNNA2 | Proximal | 0 | Not documented | 73 |
| | | | | | | MaLR | | | | | | | | | |
| L2b_dup12811 | Uniquely | No | — | — | LINE | L2 | chr2: 80401733-80402558 | + | 170 | 826 | CTNNA2 | Proximal | 0 | Not documented | 74 |
| AluSx1_dup11671 | Multi | No | — | — | SINE | Alu | chr2: 80416070-80416378 | − | 49 | 309 | CTNNA2 | Proximal | 0 | Not documented | 2875 |
| MIRb_dup29174 | Uniquely | No | — | — | SINE | MIR | chr2: 80424505-80424728 | − | 140 | 224 | CTNNA2 | Proximal | 0 | Not documented | 76 |
| THE1B-int_dup417 | Uniquely | No | — | — | LTR | ERVL- | chr2: 80430317-80431894 | − | 43 | 1578 | CTNNA2 | Proximal | 0 | Not documented | 77 |
| | | | | | | MaLR | | | | | | | | | |
| L1MEd_dup875 | Uniquely | No | — | — | LINE | Other L1 | chr2: 8582392-8582875 | + | 160 | 484 | ID2 | Distal | 236101 | Not documented | 78 |
| MER5A_dup3661 | Multi | No | — | — | DNA | DNA | chr2: 85835436-85835507 | − | 130 | 72 | C2orf68 | Proximal | 0 | Not documented | 79 |
| L1PREC2_dup754 | Multi | No | — | — | LINE | L1PA\|B\|x | chr2: 86730898-86731190 | + | 40 | 293 | CHMP3 | Proximal | 0 | Not documented | 80 |
| FLAM_C_dup2762 | Multi | No | — | — | SINE | Alu | chr2: 86731635-86731769 | − | 77 | 135 | CHMP3 | Proximal | 0 | Not documented | 81 |
| MIR_dup21071 | Multi | No | — | — | SINE | MIR | chr2: 86731882-86731958 | + | 110 | 77 | CHMP3 | Proximal | 0 | Not documented | 82 |
| TAR1_dup11 | Multi | No | — | — | Other | Other | chr2: 87575814-87576578 | + | 89 | 765 | PLGLB1 | Distal | 326840 | Not documented | 83 |
| | | | | | | Repeats | | | | | | | | | |
| L1MDa_dup656 | Multi | No | — | — | LINE | Other L1 | chr2: 87906120-87906436 | + | 120 | 317 | PLGLB2 | Distal | 141171 | Not documented | 84 |
| AluJr4_dup2238 | Uniquely | No | — | — | SINE | Alu | chr2: 88928047-88928340 | − | 70 | 294 | EIF2AK3 | Proximal | 954 | Not documented | 85 |
| TAR1_dup8 | Multi | No | — | — | Other | Other | chr2: 91750391-91751008 | − | 80 | 618 | RP11-685N3.1 | Distal | 1211995 | Not documented | 86 |
| | | | | | | Repeats | | | | | | | | | |
| MLT1H1_dup367 | Multi/ | No | — | — | LTR | ERVL- | chr2: 91805820-91806248 | − | 120 | 429 | RP11-685N3.1 | Distal | 1267424 | Not documented | 87 |
| | Uniquely | | | | | MaLR | | | | | | | | | |
| MLT1J2_dup786 | Multi/ | No | — | — | LTR | ERVL- | chr2: 91824937-91825072 | − | 140 | 136 | RP11-685N3.1 | Distal | 1286541 | Not documented | 88 |
| | Uniquely | | | | | MaLR | | | | | | | | | |
| L1MEc_dup2413 | Multi | No | — | — | LINE | Other L1 | chr2: 91838304-91839549 | − | 86 | 1246 | RP11-685N3.1 | Distal | 1299908 | Not documented | 89 |
| TAR1_dup14 | Multi | No | — | — | Other | Other | chr2: 91847958-91848503 | + | 74 | 546 | RP11-685N3.1 | Distal | 1309562 | Not documented | 90 |
| | | | | | | Repeats | | | | | | | | | |
| MIRb_dup23630 | Multi | No | — | — | SINE | MIR | chr2: 9562855-9563068 | − | 140 | 214 | ITGB1BP1 | Proximal | 0 | Not documented | 91 |
| AluJb_dup17648 | Multi/ | No | — | — | SINE | Alu | chr2: 96851847-96851916 | + | 52 | 70 | STARD7 | Proximal | 0 | Not documented | 92 |
| | Uniquely | | | | | | | | | | | | | | |
| MER106A_dup77 | Multi | No | — | — | DNA | DNA | chr2: 96937757-96937932 | + | 99 | 176 | CIAO1 | Proximal | 0 | Not documented | 93 |
| Charlie1a_dup729 | Multi | No | — | — | DNA | DNA | chr2: 96938088-96938161 | + | 78 | 74 | CIAO1 | Proximal | 0 | Not documented | 94 |
| AluSp_dup6023 | Multi | No | — | — | SINE | Alu | chr2: 96938273-96938563 | + | 39 | 291 | CIAO1 | Proximal | 0 | Not documented | 95 |
| Charlie1_dup243 | Multi | No | — | — | DNA | DNA | chr2: 96938564-96939120 | + | 89 | 557 | CIAO1 | Proximal | 0 | Not documented | 96 |
| AluSg4_dup899 | Multi | No | — | — | SINE | Alu | chr2: 96939121-96939424 | + | 35 | 304 | CIAO1 | Proximal | 35 | Not documented | 97 |
| Charlie1_dup244 | Multi | No | — | — | DNA | DNA | chr2: 96939425-96939664 | + | 89 | 240 | CIAO1 | Proximal | 339 | Not documented | 98 |
| AluSz6_dup5383 | Multi | Nc | — | — | SINE | Alu | chr2: 96939665-96939794 | + | 66 | 130 | SNRNP200 | Proximal | 281 | Not documented | 99 |
| L1PA7_dup1257 | Uniquely | No | — | — | LINE | L1PA\|B\|x | chr2: 98509366-98513152 | − | 39 | 3787 | TMEM131 | Proximal | 0 | EVE annotated | 2900 |
| MLT1K_dup1755 | Multi/ | No | — | — | LTR | ERVL- | chr2: 99216373-99216674 | + | 150 | 302 | COA5 | Proximal | 0 | Not documented | 1 |
| | Uniquely | | | | | MaLR | | | | | | | | | |
| MIR3_dup85367 | Multi | No | — | — | SINE | MIR | chr20: 1146922-1147038 | + | 160 | 117 | PSMF1 | Proximal | 0 | Not documented | 2 |
| Tigger1_dup11418 | Uniquely | No | — | — | DNA | DNA | chr20: 13430613-13432973 | − | 66 | 2361 | TASP1 | Proximal | 0 | Not documented | 3 |
| L1MB8_dup15815 | Multi/ | No | — | — | LINE | Other L1 | chr20: 23607651-23608723 | − | 90 | 1073 | CST3 | Proximal | 0 | Not documented | 4 |
| | Uniquely | | | | | | | | | | | | | | |
| MLT1K_dup17055 | Multi | No | — | — | LTR | ERVL- | chr20: 23609241-23609362 | − | 140 | 122 | CST3 | Proximal | 0 | Not documented | 5 |
| | | | | | | MaLR | | | | | | | | | |
| AluJr_dup72845 | Multi | No | — | — | SINE | Alu | chr20: 23609363-23609520 | − | 80 | 158 | CST3 | Proximal | 0 | Not documented | 6 |
| MLT1K_dup17056 | Multi | No | — | — | LTR | ERVL- | chr20: 23609521-23609907 | − | 140 | 387 | CST3 | Proximal | 0 | Not documented | 7 |
| | | | | | | MaLR | | | | | | | | | |
| L1MC4_dup27902 | Uniquely | No | — | — | LINE | Other L1 | chr20: 23617497-23617820 | + | 130 | 324 | CST3 | Proximal | 0 | Not documented | 8 |
| MER57A-int_{—} | Multi | No | — | — | LTR | ERV1 | chr20: 25277484-25277852 | + | 120 | 369 | PYGB | Proximal | 0 | Not documented | 9 |
| dup1845 | | | | | | | | | | | | | | | |
| MLT1A1_dup6438 | Multi | No | — | — | LTR | ERVL- | chr20: 25654805-25655216 | − | 89 | 412 | ZNF337 | Proximal | 0 | Not documented | 10 |
| | | | | | | MaLR | | | | | | | | | |
| LTR16B2_dup1486 | Multi | No | — | — | LTR | ERVL | chr20: 25655313-25655392 | − | 96 | 80 | ZNF337 | Proximal | 0 | Not documented | 11 |
| AluSx1_dup103716 | Multi | No | — | — | SINE | Alu | chr20: 25785050-25785335 | − | 62 | 286 | FAM182B | Proximal | 0 | Not documented | 12 |
| L1ME3F_dup4682 | Multi | No | — | — | LINE | Other L1 | chr20: 25785336-25785820 | − | 120 | 485 | FAM182B | Proximal | 0 | Not documented | 13 |
| SST1_dup554 | Multi/ | No | — | — | Other | Other | chr20: 25843554-25844836 | − | 130 | 1283 | FAM182B | Proximal | 0 | Not documented | 14 |
| | Uniquely | | | | | Repeats | | | | | | | | | |
| AluSx1_dup103740 | Multi | No | — | — | SINE | Alu | chr20: 26031843-26032109 | + | 65 | 267 | FAM182B | Distal | 182983 | Not documented | 15 |
| MER58A_dup12612 | Multi | No | — | — | DNA | DNA | chr20: 3028820-3029018 | + | 100 | 199 | MRPS26 | Proximal | 0 | Not documented | 16 |
| L2c_dup134679 | Multi | No | — | — | LINE | L2 | chr20: 30532762-30532796 | − | 52 | 35 | PDRG1 | Proximal | 0 | Not documented | 17 |
| L2a_dup162075 | Multi | No | — | — | LINE | L2 | chr20: 30824986-30825708 | − | 120 | 723 | POFUT1 | Proximal | 0 | Not documented | 18 |
| AluSx_dup134721 | Multi | No | — | — | SINE | Alu | chr20: 30921154-30921461 | + | 53 | 308 | KIF3B | Proximal | 0 | Not documented | 19 |
| AluSx1_dup103854 | Multi | No | — | — | SINE | Alu | chr20: 30987553-30987864 | − | 52 | 312 | ASXL1 | Proximal | 0 | Not documented | 20 |
| L1MEc_dup17917 | Multi | No | — | — | LINE | Other L1 | chr20: 30987865-30988771 | − | 94 | 907 | ASXL1 | Proximal | 0 | Not documented | 21 |
| AluSg_dup38881 | Multi | No | — | — | SINE | Alu | chr20: 31444485-31444787 | − | 50 | 303 | EFCAB8 | Proximal | 1943 | Not documented | 22 |
| Tigger11a_dup412 | Multi | No | — | — | DNA | DNA | chr20: 3204353-3204523 | − | 140 | 171 | ITPA | Proximal | 0 | Not documented | 23 |
| MIR3_dup86301 | Multi | No | — | — | SINE | MIR | chr20: 32245307-32245392 | − | 89 | 86 | NECAB3 | Proximal | 0 | Not documented | 24 |
| MIR_dup164657 | Multi/ | No | — | — | SINE | MIR | chr20: 329846-330012 | − | 160 | 167 | NRSN2 | Proximal | 0 | Not documented | 2925 |
| | Uniquely | | | | | | | | | | | | | | |
| AluJb_dup136343 | Multi | No | — | — | SINE | Alu | chr20: 33107223-33107307 | + | 80 | 85 | DYNLRB1 | Proximal | 0 | Not documented | 26 |
| Tigger15a_dup4938 | Uniquely | No | — | — | DNA | DNA | chr20: 33448952-33449071 | − | 130 | 120 | GGT7 | Proximal | 0 | Not documented | 27 |
| MIR3_dup85285 | Multi/ | No | — | — | SINE | MIR | chr20: 334566-334643 | + | 140 | 78 | NRSN2 | Proximal | 0 | Not documented | 28 |
| | Uniquely | | | | | | | | | | | | | | |
| MIRb_dup210983 | Multi/ | No | — | — | SINE | MIR | chr20: 334791-334965 | − | 130 | 175 | NRSN2 | Proximal | 0 | Not documented | 29 |
| | Uniquely | | | | | | | | | | | | | | |
| MER21B_dup2640 | Uniquely | No | — | — | LTR | ERVL | chr20: 33932497-33933319 | + | 70 | 823 | UQCC1 | Proximal | 0 | Not documented | 30 |
| MIRc_dup98551 | Multi | No | — | — | SINE | MIR | chr20: 35156915-35157046 | + | 73 | 132 | DLGAP4 | Proximal | 0 | Not documented | 31 |
| AluJb_dup136672 | Multi | No | — | — | SINE | Alu | chr20: 35380440-35380756 | − | 63 | 317 | DSN1 | Proximal | 0 | Not documented | 32 |
| MARNA_dup3249 | Multi | No | — | — | DNA | DNA | chr20: 35380828-35381076 | + | 120 | 249 | DSN1 | Proximal | 0 | Not documented | 33 |
| AluJb_dup136783 | Multi/ | No | — | — | SINE | Alu | chr20: 35927145-35927444 | − | 80 | 300 | MANBAL | Proximal | 0 | Not documented | 34 |
| | Uniquely | | | | | | | | | | | | | | |
| L2c_dup135115 | Multi | No | — | — | LINE | L2 | chr20: 36151850-36152015 | + | 120 | 166 | NNAT | Proximal | 0 | Not documented | 35 |
| AluSx_dup133742 | Multi | No | — | — | SINE | Alu | chr20: 3805298-3805594 | + | 54 | 297 | AP551 | Proximal | 0 | Not documented | 36 |
| L2b_dup93021 | Multi | No | — | — | LINE | L2 | chr20: 38214839-38214961 | + | 170 | 123 | DHX35 | Distal | 546474 | Not documented | 37 |
| MLT1J_dup14221 | Multi | No | — | — | LTR | ERVL- | chr20: 390955-391309 | − | 140 | 355 | RBCK1 | Proximal | 0 | Not documented | 38 |
| | | | | | | MaLR | | | | | | | | | |
| L1MD1_dup6464 | Multi | No | — | — | LINE | Other L1 | chr20: 3953877-3956204 | + | 77 | 2328 | RNF24 | Proximal | 0 | Not documented | 39 |
| L2b_dup93163 | Uniquely | No | — | — | LINE | L2 | chr20: 39799355-39799440 | − | 140 | 86 | PLCG1 | Proximal | 0 | Not documented | 40 |
| AluSx1_dup104476 | Uniquely | No | — | — | SINE | Alu | chr20: 39799945-39800249 | + | 30 | 305 | PLCG1 | Proximal | 0 | Not documented | 41 |
| AluSx_dup135659 | Multi/ | No | — | — | SINE | Alu | chr20: 39808272-39808569 | − | 29 | 298 | PLCG1 | Proximal | 0 | Not documented | 42 |
| | Uniquely | | | | | | | | | | | | | | |
| L1MA4A_dup6059 | Multi/ | No | — | — | LINE | Other L1 | chr20: 39817337-39818787 | − | 72 | 1451 | ZHX3 | Proximal | 0 | Not documented | 43 |
| | Uniquely | | | | | | | | | | | | | | |
| L1MB4_dup8872 | Multi/ | No | — | — | LINE | Other L1 | chr20: 39826936-39828342 | − | 110 | 1407 | ZHX3 | Proximal | 0 | Not documented | 44 |
| | Uniquely | | | | | | | | | | | | | | |
| L2a_dup162888 | Uniquely | No | — | — | LINE | L2 | chr20: 39896078-39896529 | − | 120 | 452 | ZHX3 | Proximal | 0 | Not documented | 45 |
| AluSz_dup93165 | Multi | No | — | — | SINE | Alu | chr20: 39987762-39988075 | − | 44 | 314 | LPIN3 | Proximal | 0 | Not documented | 46 |
| MIRc_dup99001 | Uniquely | No | — | — | SINE | MIR | chr20: 42853720-42853944 | + | 140 | 225 | OSER1 | Distal | 14290 | Not documented | 47 |
| MIR3_dup86988 | Uniquely | No | — | — | SINE | MIR | chr20: 43119011-43119092 | + | 130 | 82 | TTPAL | Proximal | 0 | Not documented | 48 |
| AluSg4_dup7082 | Uniquely | No | — | — | SINE | Alu | chr20: 43119438-43119740 | + | 40 | 303 | TTPAL | Proximal | 0 | Not documented | 49 |
| MER3_dup10511 | Multi | No | — | — | DNA | DNA | chr20: 44054599-44054792 | − | 99 | 194 | PIGT | Proximal | 0 | Not documented | 2950 |
| FLAM_A_dup15517 | Uniquely | No | — | — | SINE | Alu | chr20: 44470649-44470778 | − | 80 | 130 | SNX21 | Proximal | 0 | Not documented | 51 |
| LTR16D2_dup258 | Uniquely | No | — | — | LTR | ERVL | chr20: 45137921-45138455 | − | 120 | 535 | ZNF334 | Proximal | 0 | Not documented | 52 |
| L2_dup54492 | Uniquely | No | — | — | LINE | L2 | chr20: 45138693-45139082 | − | 170 | 390 | ZNF334 | Proximal | 0 | Not documented | 53 |
| MER63C_dup863 | Uniquely | No | — | — | DNA | DNA | chr20: 45363955-45364874 | + | 97 | 920 | SLC2A10 | Proximal | 0 | Not documented | 54 |
| AluJb_dup137564 | Multi/ | No | — | — | SINE | Alu | chr20: 48251115-48251419 | + | 58 | 305 | B4GALT5 | Proximal | 0 | Not documented | 55 |
| | Uniquely | | | | | | | | | | | | | | |
| AluY_dup113714 | Multi | No | — | — | SINE | Alu | chr20: 49367881-49368180 | − | 29 | 300 | PARD6B | Proximal | 0 | Not documented | 56 |
| AluJb_dup137727 | Uniquely | No | — | — | SINE | Alu | chr20: 49557644-49557756 | + | 52 | 113 | DPM1 | Proximal | 0 | Not documented | 57 |
| MLT1J_dup14649 | Uniquely | No | — | — | LTR | ERVL- | chr20: 50035762-50036195 | + | 120 | 434 | NFATC2 | Proximal | 0 | Not documented | 58 |
| | | | | | | MaLR | | | | | | | | | |
| L2b_dup93871 | Uniquely | No | — | — | LINE | L2 | chr20: 50059521-50059921 | + | 150 | 401 | NFATC2 | Proximal | 0 | Not documented | 59 |
| AluJo_dup68933 | Uniquely | No | — | — | SINE | Alu | chr20: 50156012-50156337 | − | 78 | 326 | NFATC2 | Proximal | 0 | Not documented | 60 |
| AluY_dup113746 | Multi | No | — | — | SINE | Alu | chr20: 50160515-50160825 | − | 26 | 311 | NFATC2 | Proximal | 0 | Not documented | 61 |
| MER5B_dup24162 | Uniquely | No | — | — | DNA | DNA | chr20: 50161194-50161376 | + | 83 | 183 | NFATC2 | Proximal | 0 | Not documented | 62 |
| MLT1C_dup18739 | Multi | No | — | — | LTR | ERVL- | chr20: 50172412-50172870 | + | 120 | 459 | NFATC2 | Proximal | 0 | Not documented | 63 |
| | | | | | | MaLR | | | | | | | | | |
| L2a_dup164290 | Multi/ | No | — | — | LINE | L2 | chr20: 50172871-50173111 | + | 150 | 241 | NFATC2 | Proximal | 0 | Not documented | 64 |
| | Uniquely | | | | | | | | | | | | | | |
| MIRb_dup216176 | Uniquely | No | — | — | SINE | MIR | chr20: 50173679-50173817 | + | 130 | 139 | NFATC2 | Proximal | 0 | Not documented | 65 |
| MIR_dup168800 | Multi/ | No | — | — | SINE | MIR | chr20: 50176039-50176231 | + | 130 | 193 | NFATC2 | Proximal | 0 | Not documented | 66 |
| | Uniquely | | | | | | | | | | | | | | |
| MIR3_dup87417 | Multi | No | — | — | SINE | MIR | chr20: 50176253-50176354 | + | 130 | 102 | NFATC2 | Proximal | 0 | Not documented | 67 |
| MIRb_dup216179 | Multi | No | — | — | SINE | MIR | chr20: 50176355-50176491 | − | 140 | 137 | NFATC2 | Proximal | 0 | Not documented | 68 |
| MIR_dup168801 | Multi/ | No | — | — | SINE | MIR | chr20: 50176661-50176873 | − | 120 | 213 | NFATC2 | Proximal | 0 | Not documented | 69 |
| | Uniquely | | | | | | | | | | | | | | |
| AluSz_dup94008 | Multi | No | — | — | SINE | Alu | chr20: 54942413-54942704 | + | 44 | 292 | FAM210B | Proximal | 0 | Not documented | 70 |
| AluSx1_dup105421 | Multi | No | — | — | SINE | Alu | chr20: 56940716-56941003 | − | 28 | 288 | RAB22A | Proximal | 0 | Not documented | 71 |
| L1MA4_dup9731 | Multi | No | — | — | LINE | Other L1 | chr20: 56941386-56941680 | + | 78 | 295 | RAB22A | Proximal | 0 | Not documented | 72 |
| L1MD3_dup5024 | Multi | No | — | — | LINE | Other L1 | chr20: 627273-627575 | − | 65 | 303 | SRXN1 | Proximal | 0 | Not documented | 73 |
| MLT1J_dup14225 | Multi | No | — | — | LTR | ERVL- | chr20: 628762-629018 | + | 150 | 257 | SRXN1 | Proximal | 0 | Not documented | 74 |
| | | | | | | MaLR | | | | | | | | | |
| AluY_dup112189 | Multi | No | — | — | SINE | Alu | chr20: 8397722-8397937 | − | 31 | 216 | PLCB1 | Proximal | 0 | Not documented | 2975 |
| L2c_dup134056 | Multi | No | — | — | LINE | L2 | chr20: 8398183-8398267 | − | 160 | 85 | PLCB1 | Proximal | 0 | Not documented | 76 |
| L1MB1_dup6015 | Multi | No | — | — | LINE | Other L1 | chr21: 10003065-10003684 | + | 68 | 620 | TPTE | Distal | 902518 | Not documented | 77 |
| L1MEf_dup13522 | Multi | No | — | — | LINE | Other L1 | chr21: 10005329-10006715 | − | 140 | 1387 | TPTE | Distal | 899487 | Not documented | 78 |
| L1PA4_dup11589 | Uniquely | No | — | — | LINE | L1PA\|B\|x | chr21: 10021922-10028052 | − | 26 | 6131 | TPTE | Distal | 878150 | EVE annotated | 79 |
| L2b_dup94566 | Multi | No | — | — | LINE | L2 | chr21: 10118613-10118822 | − | 160 | 210 | TPTE | Distal | 787380 | Not documented | 80 |
| LTR16A_dup6750 | Multi | No | — | — | LTR | ERVL | chr21: 10132838-10133236 | + | 140 | 399 | TPTE | Distal | 772966 | Not documented | 81 |
| AluSx1_dup105631 | Multi | No | — | — | SINE | Alu | chr21: 10191880-10192196 | + | 49 | 317 | TPTE | Distal | 714006 | Not documented | 82 |
| L1MCa_dup7316 | Multi | No | — | — | LINE | Other L1 | chr21: 10197517-10198958 | − | 85 | 1442 | TPTE | Distal | 707244 | Not documented | 83 |
| CER_dup39 | Multi | No | — | — | Other | Other | chr21: 10199089-10200505 | − | 49 | 1417 | TPTE | Distal | 705697 | Not documented | 84 |
| | | | | | | Repeats | | | | | | | | | |
| Tigger1_dup11625 | Multi | No | — | — | DNA | DNA | chr21: 10366923-10368944 | − | 70 | 2022 | TPTE | Distal | 537258 | Not documented | 85 |
| L1MA6_dup5287 | Multi | No | — | — | LINE | Other L1 | chr21: 10417616-10418219 | + | 89 | 604 | TPTE | Distal | 487983 | Not documented | 86 |
| SST1_dup588 | Multi | No | — | — | Other | Other | chr21: 10597119-10598373 | − | 32 | 1255 | TPTE | Distal | 307829 | Not documented | 87 |
| | | | | | | Repeats | | | | | | | | | |
| L1MDa_dup6824 | Multi | No | — | — | LINE | Other L1 | chr21: 11071057-11072231 | + | 120 | 1175 | TPTE | Distal | 41339 | Not documented | 88 |
| MLT1A0_dup19886 | Uniquely | No | — | — | LTR | ERVL- | chr21: 17618821-17619157 | − | 92 | 337 | USP25 | Distal | 366445 | Not documented | 89 |
| | | | | | | MaLR | | | | | | | | | |
| AluSz_dup94326 | Uniquely | No | — | — | SINE | Alu | chr21: 17647423-17647722 | + | 65 | 300 | USP25 | Distal | 395047 | Not documented | 90 |
| LTR78_dup4636 | Uniquely | No | — | — | LTR | ERV1 | chr21: 17670471-17671157 | − | 160 | 687 | USP25 | Distal | 418095 | Not documented | 91 |
| L2a_dup165638 | Uniquely | No | — | — | LINE | L2 | chr21: 17692085-17692538 | − | 150 | 454 | USP25 | Distal | 439709 | Not documented | 92 |
| L4_dup16342 | Multi | No | — | — | LINE | RTE | chr21: 17791734-17791794 | + | 140 | 61 | USP25 | Distal | 539358 | Not documented | 93 |
| L1MA1_dup4138 | Uniquely | No | — | — | LINE | Other L1 | chr21: 17849534-17852261 | − | 47 | 2728 | USP25 | Distal | 597158 | Not documented | 94 |
| L1PA16_dup13687 | Uniquely | No | — | — | LINE | L1PA\|B\|x | chr21: 17886197-17888439 | − | 56 | 2243 | USP25 | Distal | 633821 | Not documented | 95 |
| L1HS_dup1510 | Multi | No | — | — | LINE | L1PA\|B\|x | chr21: 17916705-17917238 | − | 2.7 | 534 | USP25 | Distal | 664329 | Not documented | 96 |
| AluSx1_dup105740 | Uniquely | No | — | — | SINE | Alu | chr21: 17918362-17918656 | + | 51 | 295 | USP25 | Distal | 665986 | Not documented | 97 |
| AluSz_dup94331 | Uniquely | No | — | — | SINE | Alu | chr21: 17930581-17930884 | + | 72 | 304 | USP25 | Distal | 678205 | Not documented | 98 |
| L2c_dup136709 | Multi/ | No | — | — | LINE | L2 | chr21: 17979512-17979578 | + | 89 | 67 | USP25 | Distal | 727136 | Not documented | 99 |
| | Uniquely | | | | | | | | | | | | | | |
| L2a_dup165651 | Multi/ | No | — | — | LINE | L2 | chr21: 17979709-17980366 | + | 130 | 658 | USP25 | Distal | 727333 | Not documented | 3000 |
| | Uniquely | | | | | | | | | | | | | | |
| MER77B_dup1222 | Uniquely | No | — | — | LTR | ERVL | chr21: 17989633-17989918 | − | 100 | 286 | USP25 | Distal | 737257 | Not documented | 1 |
| AluY_dup114501 | Multi | No | — | — | SINE | Alu | chr21: 17992222-17992488 | − | 19 | 267 | USP25 | Distal | 739846 | Not documented | 2 |
| L1MD2_dup10682 | Multi/ | No | — | — | LINE | Other L1 | chr21: 17992725-17993500 | − | 87 | 776 | USP25 | Distal | 740349 | Not documented | 3 |
| | Uniquely | | | | | | | | | | | | | | |
| MER33_dup9200 | Multi | No | — | — | DNA | DNA | chr21: 17993501-17993557 | + | 65 | 57 | USP25 | Distal | 741125 | Not documented | 4 |
| MIR_dup170119 | Multi/ | No | — | — | SINE | MIR | chr21: 17993752-17993953 | + | 130 | 202 | USP25 | Distal | 741376 | Not documented | 5 |
| | Uniquely | | | | | | | | | | | | | | |
| L2b_dup94640 | Multi | No | — | — | LINE | L2 | chr21: 17993967-17994061 | + | 150 | 95 | USP25 | Distal | 741591 | Not documented | 6 |
| THE1B_dup21743 | Multi/ | No | — | — | LTR | ERVL- | chr21: 17994062-17994430 | − | 51 | 369 | USP25 | Distal | 741686 | Not documented | 7 |
| | Uniquely | | | | | MaLR | | | | | | | | | |
| L2b_dup94641 | Multi | No | — | — | LINE | L2 | chr21: 17994431-17994554 | + | 150 | 124 | USP25 | Distal | 742055 | Not documented | 8 |
| AluSx1_dup105819 | Uniquely | No | — | — | SINE | Alu | chr21: 22440445-22440745 | − | 48 | 301 | NCAM2 | Proximal | 0 | Not documented | 9 |
| AluSg_dup39585 | Multi | No | — | — | SINE | Alu | chr21: 22440777-22441044 | − | 47 | 268 | NCAM2 | Proximal | 0 | Not documented | 10 |
| MER50_dup2468 | Uniquely | No | — | — | LTR | ERV1 | chr21: 22453103-22453802 | − | 64 | 700 | NCAM2 | Proximal | 0 | Not documented | 11 |
| AluSz_dup94464 | Multi | No | — | — | SINE | Alu | chr21: 27088291-27088606 | − | 49 | 316 | JAM2 | Proximal | 0 | Not documented | 12 |
| MER58A_dup13146 | Multi/ | No | — | — | DNA | DNA | chr21: 27088853-27089067 | − | 88 | 215 | ATP5J | Proximal | 0 | Not documented | 13 |
| | Uniquely | | | | | | | | | | | | | | |
| MIR_dup170447 | Multi | No | — | — | SINE | MIR | chr21: 27099729-27099915 | − | 110 | 187 | ATP5J | Proximal | 0 | Not documented | 14 |
| L1M5_dup62402 | Multi | No | — | — | LINE | Other L1 | chr21: 27518678-27518838 | − | 100 | 161 | APP | Proximal | 0 | Not documented | 15 |
| AluSz_dup94514 | Uniquely | No | — | — | SINE | Alu | chr21: 28213525-28213821 | + | 46 | 297 | ADAMTS1 | Proximal | 0 | Not documented | 16 |
| AluJb_dup138937 | Multi/ | No | — | — | SINE | Alu | chr21: 33641107-33641288 | − | 80 | 182 | MIS18A | Proximal | 0 | Not documented | 17 |
| | Uniquely | | | | | | | | | | | | | | |
| MIRc_dup100306 | Multi/ | No | — | — | SINE | MIR | chr21: 33766064-33766172 | + | 160 | 109 | C21orf119 | Proximal | 0 | Not documented | 18 |
| | Uniquely | | | | | | | | | | | | | | |
| L1P4a_dup556 | Uniquely | No | — | — | LINE | L1PA\|B\|x | chr21: 33936552-33939507 | − | 83 | 2956 | TCP10L | Distal | 9356 | Not documented | 19 |
| MER102c_dup3418 | Multi | No | — | — | DNA | DNA | chr21: 34163224-34163396 | + | 110 | 173 | C21orf62 | Proximal | 0 | Not documented | 20 |
| AluSp_dup47788 | Multi/ | No | — | — | SINE | Alu | chr21: 34164205-34164476 | − | 33 | 272 | C21orf62 | Proximal | 0 | Not documented | 21 |
| | Uniquely | | | | | | | | | | | | | | |
| MamRep1161_{—} | Multi | No | — | — | DNA | DNA | chr21: 34164653-34164777 | + | 140 | 125 | C21orf62 | Proximal | 0 | Not documented | 22 |
| dup1719 | | | | | | | | | | | | | | | |
| AluSp_dup47789 | Multi | No | — | — | SINE | Alu | chr21: 34165213-34165290 | − | 41 | 78 | C21orf62 | Proximal | 0 | Not documented | 23 |
| AluSx_dup137854 | Multi/ | No | — | — | SINE | Alu | chr21: 34165291-34165567 | − | 33 | 277 | C21orf62 | Proximal | 0 | Not documented | 24 |
| | Uniquely | | | | | | | | | | | | | | |
| L2_dup55197 | Multi/ | No | — | — | LINE | L2 | chr21: 34182871-34183127 | + | 140 | 257 | C21orf62 | Proximal | 0 | Not documented | 3025 |
| | Uniquely | | | | | | | | | | | | | | |
| FAM_dup4685 | Multi | No | — | — | SINE | Alu | chr21: 34634846-34635011 | − | 90 | 166 | IFNAR2 | Proximal | 0 | Not documented | 26 |
| AluSx1_dup106216 | Multi | No | — | — | SINE | Alu | chr21: 34822512-34822802 | − | 53 | 291 | TMEM50B | Proximal | 0 | Not documented | 27 |
| AluJb_dup139037 | Multi | No | — | — | SINE | Alu | chr21: 34896575-34896785 | + | 65 | 211 | GART | Proximal | 0 | Not documented | 28 |
| MARNA_dup3295 | Uniquely | No | — | — | DNA | DNA | chr21: 34967492-34967673 | + | 100 | 182 | CRYZL1 | Proximal | 0 | Not documented | 29 |
| MIR_dup170855 | Uniquely | No | — | — | SINE | MIR | chr21: 34967746-34967930 | + | 110 | 185 | CRYZL1 | Proximal | 0 | Not documented | 30 |
| AluSx_dup137979 | Multi | No | — | — | SINE | Alu | chr21: 35761084-35761398 | + | 48 | 315 | SMIM11 | Proximal | 0 | Not documented | 31 |
| Charlie15a_{—} | Multi/ | No | — | — | DNA | DNA | chr21: 35774676-35774833 | − | 140 | 158 | SMIM11 | Proximal | 0 | Not documented | 32 |
| dup3358 | Uniquely | | | | | | | | | | | | | | |
| AluSc8_dup20928 | Uniquely | No | — | — | SINE | Alu | chr21: 35891688-35891994 | − | 40 | 307 | RCAN1 | Proximal | 0 | Not documented | 33 |
| AluJb_dup139306 | Multi | No | — | — | SINE | Alu | chr21: 38596552-38596814 | + | 62 | 263 | DSCR3 | Proximal | 0 | Not documented | 34 |
| AluSg4_dup7204 | Multi | No | — | — | SINE | Alu | chr21: 38597005-38597292 | + | 40 | 288 | DSCR3 | Proximal | 0 | Not documented | 35 |
| MIRc_dup100515 | Multi/ | No | — | — | SINE | MIR | chr21: 40668486-40668703 | − | 95 | 218 | BRWD1 | Proximal | 0 | Not documented | 36 |
| | Uniquely | | | | | | | | | | | | | | |
| Charlie2b_dup3510 | Multi | No | — | — | DNA | DNA | chr21: 42801857-42802642 | + | 140 | 786 | MX1 | Proximal | 0 | Not documented | 37 |
| L1MB5_dup9525 | Multi/ | No | — | — | LINE | Other L1 | chr21: 44473012-44473559 | + | 92 | 548 | CBS | Proximal | 0 | Not documented | 38 |
| | Uniquely | | | | | | | | | | | | | | |
| L1MC3_dup13070 | Multi | No | — | — | LINE | Other L1 | chr21: 44493417-44493569 | + | 84 | 153 | CBS | Proximal | 0 | Not documented | 39 |
| AluSc8_dup21002 | Multi | No | — | — | SINE | Alu | chr21: 46190335-46190631 | − | 54 | 297 | UBE2G2 | Proximal | 0 | Not documented | 40 |
| L1M5_dup62832 | Multi/ | No | — | — | LINE | Other L1 | chr21: 46715858-46716712 | − | 150 | 855 | POFUT2 | Distal | 8046 | Not documented | 41 |
| | Uniquely | | | | | | | | | | | | | | |
| AluSg_dup39947 | Multi | No | — | — | SINE | Alu | chr21: 48018268-48018527 | − | 31 | 260 | S100B | Proximal | 349 | Not documented | 42 |
| L1M2_dup8885 | Multi/ | No | — | — | LINE | Other L1 | chr21: 48019159-48019208 | + | 110 | 50 | S100B | Proximal | 0 | Not documented | 43 |
| | Uniquely | | | | | | | | | | | | | | |
| AluJb_dup139741 | Multi/ | No | — | — | SINE | Alu | chr21: 48020173-48020480 | + | 66 | 308 | S100B | Proximal | 0 | Not documented | 44 |
| | Uniquely | | | | | | | | | | | | | | |
| L1M5_dup62907 | Multi | No | — | — | LINE | Other L1 | chr21: 48079369-48079509 | + | 130 | 141 | PRMT2 | Proximal | 0 | Not documented | 45 |
| L2a_dup167023 | Multi | No | — | — | LINE | L2 | chr21: 48084816-48084859 | + | 93 | 44 | PRMT2 | Proximal | 0 | Not documented | 46 |
| MER31-int_dup1977 | Multi | No | — | — | LTR | ERV1 | chr21: 48111224-48111670 | − | 98 | 447 | PRMT2 | Distal | 26189 | Not documented | 47 |
| L1M2_dup8781 | Multi | No | — | — | LINE | Other L1 | chr21: 9554486-9555191 | − | 91 | 706 | TPTE | Distal | 1351011 | Not documented | 48 |
| HERVL-int_dup2184 | Multi | No | — | — | LTR | ERVL | chr21: 9592473-9594904 | − | 54 | 2432 | TPTE | Distal | 1311298 | Not documented | 49 |
| AluSx_dup137177 | Multi | No | — | — | SINE | Alu | chr21: 9676211-9676504 | + | 62 | 294 | TPTE | Distal | 1229698 | Not documented | 3050 |
| L1MCa_dup7311 | Multi | No | — | — | LINE | Other L1 | chr21: 9681337-9682785 | − | 85 | 1449 | TPTE | Distal | 1223417 | Not documented | 51 |
| GSATII_dup173 | Multi | No | — | — | Other | Other | chr21: 9702682-9704227 | − | 59 | 1546 | TPTE | Distal | 1201975 | Not documented | 52 |
| | | | | | | Repeats | | | | | | | | | |
| L1M4_dup17297 | Multi | No | — | — | LINE | Other L1 | chr21: 9709237-9711653 | − | 94 | 2417 | TPTE | Distal | 1194549 | Not documented | 53 |
| L1PA10_dup6916 | Multi | No | — | — | LINE | L1PA\|B\|x | chr21: 9827579-9827850 | + | 72 | 272 | TPTE | Distal | 1078352 | Not documented | 54 |
| MER21B_dup2666 | Multi | No | — | — | LTR | ERVL | chr21: 9828046-9828304 | − | 130 | 259 | TPTE | Distal | 1077898 | Not documented | 55 |
| MER5A_dup33783 | Multi | No | — | — | DNA | DNA | chr21: 9828723-9828790 | − | 130 | 68 | TPTE | Distal | 1077412 | Not documented | 56 |
| L3_dup43801 | Multi | No | — | — | LINE | CR1 | chr21: 9837789-9838289 | + | 160 | 501 | TPTE | Distal | 1067913 | Not documented | 57 |
| MER65C_dup657 | Multi | No | — | — | LTR | ERV1 | chr21: 9848875-9849338 | − | 96 | 464 | TPTE | Distal | 1056864 | Not documented | 58 |
| MER61F_dup149 | Multi | No | — | — | LTR | ERV1 | chr21: 9862959-9863547 | − | 59 | 589 | TPTE | Distal | 1042655 | Not documented | 59 |
| GSATII_dup175 | Multi | No | — | — | Other | Other | chr21: 9880361-9881894 | − | 57 | 1534 | TPTE | Distal | 1024308 | Not documented | 60 |
| | | | | | | Repeats | | | | | | | | | |
| AluSp_dup47509 | Multi | No | — | — | SINE | Alu | chr21: 9883749-9883916 | − | 73 | 168 | TPTE | Distal | 1022286 | Not documented | 61 |
| L1PB_dup1708 | Multi | No | — | — | LINE | L1PA\|B\|x | chr21: 9883917-9885571 | − | 45 | 1655 | TPTE | Distal | 1020631 | Not documented | 62 |
| MLT2B3_dup3182 | Multi | No | — | — | LTR | ERVL | chr21: 9887977-9888372 | + | 90 | 396 | TPTE | Distal | 1017830 | Not documented | 63 |
| Tigger4_dup1397 | Multi | No | — | — | DNA | DNA | chr21: 9896052-9896524 | + | 79 | 473 | TPTE | Distal | 1009678 | Not documented | 64 |
| AluSz_dup94239 | Multi | No | — | — | SINE | Alu | chr21: 9927681-9927977 | − | 57 | 297 | TPTE | Distal | 978225 | Not documented | 65 |
| MSTA-int_dup2997 | Multi | No | — | — | LTR | ERVL- | chr21: 9933455-9933706 | + | 71 | 252 | TPTE | Distal | 972496 | Not documented | 66 |
| | | | | | | MaLR | | | | | | | | | |
| CER_dup38 | Multi | No | — | — | Other | Other | chr21: 9935221-9939398 | + | 46 | 4178 | TPTE | Distal | 966804 | Not documented | 67 |
| | | | | | | Repeats | | | | | | | | | |
| AluSx_dup137188 | Multi | No | — | — | SINE | Alu | chr21: 9948752-9949052 | + | 60 | 301 | TPTE | Distal | 957150 | Not documented | 68 |
| L1MB3_dup16599 | Multi | No | — | — | LINE | Other L1 | chr21: 9951150-9951589 | + | 92 | 440 | TPTE | Distal | 954613 | Not documented | 69 |
| MER52A_dup1751 | Multi | No | — | — | LTR | ERV1 | chr21: 9957780-9958988 | + | 90 | 1209 | TPTE | Distal | 947214 | Not documented | 70 |
| MER57-int_dup1171 | Multi | No | — | — | LTR | ERV1 | chr21: 9958989-9959905 | + | 59 | 917 | TPTE | Distal | 946297 | Not documented | 71 |
| MER57-int_dup1174 | Multi | No | — | — | LTR | ERV1 | chr21: 9962008-9962960 | + | 55 | 953 | TPTE | Distal | 943242 | Not documented | 72 |
| MER57A1_dup1007 | Multi | No | — | — | LTR | ERV1 | chr21: 9964332-9964730 | + | 70 | 399 | TPTE | Distal | 941472 | Not documented | 73 |
| MER66A_dup304 | Multi | No | — | — | LTR | ERV1 | chr21: 9969796-9970174 | + | 100 | 379 | TPTE | Distal | 936028 | Not documented | 74 |
| AluSq_dup20797 | Multi | No | — | — | SINE | Alu | chr21: 9985587-9985875 | − | 49 | 289 | TPTE | Distal | 920327 | Not documented | 3075 |
| LTR49-int_dup2049 | Multi | No | — | — | LTR | ERV1 | chr21: 9986238-9986713 | − | 75 | 476 | TPTE | Distal | 919489 | Not documented | 76 |
| LTR49-int_dup2053 | Multi | No | — | — | LTR | ERV1 | chr21: 9988145-9988248 | − | 130 | 104 | TPTE | Distal | 917954 | Not documented | 77 |
| MER9a2_dup297 | Multi | No | — | — | LTR | ERVK | chr21: 9992671-9993127 | − | 29 | 457 | TPTE | Distal | 913075 | Not documented | 78 |
| HERVK14-int_{—} | Multi | No | — | — | LTR | ERVK | chr21: 9993128-9994811 | − | 38 | 1684 | TPTE | Distal | 911391 | Not documented | 79 |
| dup359 | | | | | | | | | | | | | | | |
| HERVK14-int_{—} | Multi | No | — | — | LTR | ERVK | chr21: 9994806-9994906 | − | 50 | 101 | TPTE | Distal | 911296 | Not documented | 80 |
| dup360 | | | | | | | | | | | | | | | |
| AluJb_dup139875 | Uniquely | No | — | — | SINE | Alu | chr22: 18060749-18061044 | − | 60 | 296 | SLC25A18 | Proximal | 0 | Not documented | 81 |
| MIRb_dup219210 | Multi | No | — | — | SINE | MIR | chr22: 18062477-18062610 | − | 120 | 134 | SLC25A18 | Proximal | 0 | Not documented | 82 |
| AluSx_dup139123 | Multi | No | — | — | SINE | Alu | chr22: 21304678-21305001 | − | 45 | 324 | CRKL | Proximal | 0 | Not documented | 83 |
| TAR1_dup153 | Multi | No | — | — | Other | Other | chr22: 22652106-22652554 | − | 75 | 449 | VPREB1 | Distal | 52180 | Not documented | 84 |
| | | | | | | Repeats | | | | | | | | | |
| AluSc8_dup21135 | Multi | No | — | — | SINE | Alu | chr22: 22674449-22674740 | − | 48 | 292 | VPREB1 | Distal | 74523 | Not documented | 85 |
| AluSz_dup95209 | Multi | No | — | — | SINE | Alu | chr22: 22675348-22675462 | − | 59 | 115 | VPREB1 | Distal | 75422 | Not documented | 86 |
| MLT1H2_dup4614 | Uniquely | No | — | — | LTR | ERVL- | chr22: 26584189-26584502 | − | 110 | 314 | SEZ6L | Proximal | 0 | Not documented | 87 |
| | | | | | | MaLR | | | | | | | | | |
| HAL1b_dup4768 | Multi | No | — | — | LINE | Other L1 | chr22: 26956921-26957126 | + | 140 | 206 | TPST2 | Proximal | 0 | Not documented | 88 |
| L1MA2_dup7452 | Uniquely | No | — | — | LINE | Other L1 | chr22: 28552774-28555361 | + | 39 | 2588 | TTC28 | Proximal | 0 | Not documented | 89 |
| AluSq2_dup53610 | Multi | No | — | — | SINE | Alu | chr22: 28962923-28963227 | + | 48 | 305 | TTC28 | Proximal | 0 | Not documented | 90 |
| AluSg_dup40219 | Multi | No | — | — | SINE | Alu | chr22: 29153194-29153498 | + | 57 | 305 | HSCB | Proximal | 0 | Not documented | 91 |
| AluSp_dup48381 | Uniquely | No | — | — | SINE | Alu | chr22: 29452095-29452388 | − | 42 | 294 | ZNRF3 | Proximal | 0 | Not documented | 92 |
| MIRc_dup101304 | Multi | No | — | — | SINE | MIR | chr22: 29663345-29663445 | + | 140 | 101 | RHBDD3 | Proximal | 0 | Not documented | 93 |
| MER30_dup4068 | Multi | No | — | — | DNA | DNA | chr22: 30166250-30166470 | − | 54 | 221 | UQCR10 | Proximal | 0 | Not documented | 94 |
| MER11C_dup841 | Multi/ | No | — | — | LTR | ERVK | chr22: 36586041-36587115 | − | 32 | 1075 | APOL4 | Proximal | 0 | Not documented | 95 |
| | Uniquely | | | | | | | | | | | | | | |
| AluY_dup117463 | Multi | No | — | — | SINE | Alu | chr22: 36623080-36623387 | + | 30 | 308 | APOL2 | Proximal | 0 | Not documented | 96 |
| LTR10A_dup305 | Multi | No | — | — | LTR | ERV1 | chr22: 36883200-36883685 | − | 46 | 486 | FOXRED2 | Proximal | 0 | Not documented | 97 |
| MLT1D_dup20378 | Multi | No | — | — | LTR | ERVL- | chr22: 38226818-38227278 | − | 110 | 461 | ANKRD54 | Proximal | 0 | Not documented | 98 |
| | | | | | | MaLR | | | | | | | | | |
| MIR3_dup89858 | Multi | No | — | — | SINE | MIR | chr22: 42070584-42070658 | − | 90 | 75 | NHP2L1 | Proximal | 0 | Not documented | 99 |
| L1MC4a_dup27276 | Multi | No | — | — | LINE | Other L1 | chr22: 44888477-44889045 | + | 130 | 569 | LDOC1L | Proximal | 0 | Not documented | 3100 |
| AluSc5_dup6774 | Multi | No | — | — | SINE | Alu | chr22: 51206401-51206690 | + | 27 | 290 | RABL2B | Proximal | 0 | Not documented | 1 |
| MER31-int_dup2040 | Multi | No | — | — | LTR | ERV1 | chr22: 51237636-51238082 | − | 97 | 447 | RABL2B | Distal | 15546 | Not documented | 2 |
| MER68_dup275 | Multi | No | — | — | LTR | ERVL | chr3: 111711727-111712276 | + | 79 | 550 | ABHD10 | Proximal | 0 | Not documented | 3 |
| MIRb_dup40720 | Uniquely | No | — | — | SINE | MIR | chr3: 11207605-11207714 | − | 140 | 110 | HRH1 | Proximal | 0 | Not documented | 4 |
| MIR3_dup19606 | Multi | No | — | — | SINE | MIR | chr3: 112302735-112302799 | − | 110 | 65 | SLC35A5 | Proximal | 0 | Not documented | 5 |
| MARNA_dup606 | Multi | No | — | — | DNA | DNA | chr3: 11302659-11302950 | + | 140 | 292 | HRH1 | Proximal | 0 | Not documented | 6 |
| MIRb_dup40741 | Multi | No | — | — | SINE | MIR | chr3: 11303022-11303182 | − | 130 | 161 | HRH1 | Proximal | 0 | Not documented | 7 |
| AluSz6_dup7422 | Multi | No | — | — | SINE | Alu | chr3: 11303241-11303533 | + | 59 | 293 | HRH1 | Proximal | 0 | Not documented | 8 |
| MARNA_dup607 | Multi | No | — | — | DNA | DNA | chr3: 11303667-11303761 | + | 130 | 95 | HRH1 | Proximal | 0 | Not documented | 9 |
| L1M1_dup1649 | Uniquely | No | — | — | LINE | Other L1 | chr3: 113402614-113405304 | − | 74 | 2691 | KIAA2018 | Proximal | 0 | Not documented | 10 |
| LTR12_dup121 | Uniquely | No | — | — | LTR | ERV1 | chr3: 11389721-11390760 | − | 39 | 1040 | ATG7 | Proximal | 0 | Not documented | 11 |
| L4_dup3360 | Multi | No | — | — | LINE | RTE | chr3: 114045078-114045117 | − | 80 | 40 | ZBTB20 | Distal | 11825 | Not documented | 12 |
| MIRc_dup22808 | Multi | No | — | — | SINE | MIR | chr3: 114046679-114046739 | + | 130 | 61 | ZBTB20 | Distal | 10203 | Not documented | 13 |
| MIR3_dup19655 | Multi/ | No | — | — | SINE | MIR | chr3: 114099650-114099848 | + | 80 | 199 | ZBTB20 | Proximal | 0 | Not documented | 14 |
| | Uniquely | | | | | | | | | | | | | | |
| MIR3_dup19658 | Uniquely | No | — | — | SINE | MIR | chr3: 114122699-114122841 | + | 130 | 143 | ZBTB20 | Proximal | 0 | Not documented | 15 |
| MIRc_dup22818 | Multi | No | — | — | SINE | MIR | chr3: 114124480-114124538 | − | 120 | 59 | ZBTB20 | Proximal | 0 | Not documented | 16 |
| L2c_dup31601 | Multi/ | No | — | — | LINE | L2 | chr3: 114185810-114185954 | − | 190 | 145 | ZBTB20 | Proximal | 0 | Not documented | 17 |
| | Uniquely | | | | | | | | | | | | | | |
| L2a_dup35753 | Multi/ | No | — | — | LINE | L2 | chr3: 114186679-114186738 | − | 130 | 60 | ZBTB20 | Proximal | 0 | Not documented | 18 |
| | Uniquely | | | | | | | | | | | | | | |
| L1M5_dup12548 | Multi | No | — | — | LINE | Other L1 | chr3: 114187393-114187558 | − | 120 | 166 | ZBTB20 | Proximal | 0 | Not documented | 19 |
| MER102c_dup726 | Multi | No | — | — | DNA | DNA | chr3: 114187655-114188023 | − | 110 | 369 | ZBTB20 | Proximal | 0 | Not documented | 20 |
| AluY_dup22854 | Uniquely | No | — | — | SINE | Alu | chr3: 114268786-114269084 | − | 45 | 299 | ZBTB20 | Proximal | 0 | Not documented | 21 |
| Tigger1_dup2474 | Uniquely | No | — | — | DNA | DNA | chr3: 114281307-114281993 | − | 60 | 687 | ZBTB20 | Proximal | 0 | Not documented | 22 |
| AluSp_dup9488 | Multi/ | No | — | — | SINE | Alu | chr3: 114312220-114312530 | − | 42 | 311 | ZBTB20 | Proximal | 0 | Not documented | 23 |
| | Uniquely | | | | | | | | | | | | | | |
| AluSc8_dup4131 | Multi/ | No | — | — | SINE | Alu | chr3: 114313111-114313373 | − | 43 | 263 | ZBTB20 | Proximal | 0 | Not documented | 24 |
| | Uniquely | | | | | | | | | | | | | | |
| AluJr_dup14125 | Uniquely | No | — | — | SINE | Alu | chr3: 114337086-114337404 | − | 74 | 319 | ZBTB20 | Proximal | 0 | Not documented | 3125 |
| AluSp_dup9490 | Multi | No | — | — | SINE | Alu | chr3: 114339130-114339437 | − | 47 | 308 | ZBTB20 | Proximal | 0 | Not documented | 26 |
| LTR41_dup422 | Uniquely | No | — | — | LTR | ERVL | chr3: 114349003-114349702 | − | 110 | 700 | ZBTB20 | Proximal | 0 | Not documented | 27 |
| L1ME2_dup2804 | Multi | No | — | — | LINE | Other L1 | chr3: 114371440-114374084 | − | 120 | 2645 | ZBTB20 | Proximal | 0 | Not documented | 28 |
| L1ME2_dup2805 | Multi/ | No | — | — | LINE | Other L1 | chr3: 114374399-114375581 | − | 120 | 1183 | ZBTB20 | Proximal | 0 | Not documented | 29 |
| | Uniquely | | | | | | | | | | | | | | |
| L1ME2_dup2807 | Uniquely | No | — | — | LINE | Other L1 | chr3: 114376218-114376670 | − | 140 | 453 | ZBTB20 | Proximal | 0 | Not documented | 30 |
| L1ME4a_dup8989 | Multi | No | — | — | LINE | Other L1 | chr3: 114410452-114410734 | + | 130 | 283 | ZBTB20 | Proximal | 0 | Not documented | 31 |
| L2c_dup31619 | Multi | No | — | — | LINE | L2 | chr3: 114410749-114410817 | − | 160 | 69 | ZBTB20 | Proximal | 0 | Not documented | 32 |
| MIR_dup36508 | Multi/ | No | — | — | SINE | MIR | chr3: 114412305-114412398 | + | 160 | 94 | ZBTB20 | Proximal | 0 | Not documented | 33 |
| | Uniquely | | | | | | | | | | | | | | |
| MLT1B_dup3361 | Uniquely | No | — | — | LTR | ERVL- | chr3: 114449269-114449648 | + | 87 | 380 | ZBTB20 | Proximal | 0 | Not documented | 34 |
| | | | | | | MaLR | | | | | | | | | |
| MIR3_dup19690 | Uniquely | No | — | — | SINE | MIR | chr3: 114784514-114784666 | − | 140 | 153 | ZBTB20 | Proximal | 0 | Not documented | 35 |
| L2c_dup31646 | Multi | No | — | — | LINE | L2 | chr3: 114785086-114785592 | + | 160 | 507 | ZBTB20 | Proximal | 0 | Not documented | 36 |
| L2c_dup31700 | Multi/ | No | — | — | LINE | L2 | chr3: 115346992-115348191 | + | 170 | 1200 | GAP43 | Proximal | 0 | Not documented | 37 |
| | Uniquely | | | | | | | | | | | | | | |
| L2c_dup31701 | Multi/ | No | — | — | LINE | L2 | chr3: 115348292-115348593 | + | 150 | 302 | GAP43 | Proximal | 0 | Not documented | 38 |
| | Uniquely | | | | | | | | | | | | | | |
| L2_dup11475 | Uniquely | No | — | — | LINE | L2 | chr3: 115356236-115357293 | + | 160 | 1058 | GAP43 | Proximal | 0 | Not documented | 39 |
| FLAM_C_dup4330 | Multi/ | No | — | — | SINE | Alu | chr3: 115359882-115360011 | − | 66 | 130 | GAP43 | Proximal | 0 | Not documented | 40 |
| | Uniquely | | | | | | | | | | | | | | |
| Charlie15a_dup761 | Multi/ | No | — | — | DNA | DNA | chr3: 115360676-115360797 | − | 130 | 122 | GAP43 | Proximal | 0 | Not documented | 41 |
| | Uniquely | | | | | | | | | | | | | | |
| MIRb_dup48752 | Multi/ | No | — | — | SINE | MIR | chr3: 115383271-115383453 | − | 150 | 183 | GAP43 | Proximal | 0 | Not documented | 42 |
| | Uniquely | | | | | | | | | | | | | | |
| L2a_dup35855 | Multi/ | No | — | — | LINE | L2 | chr3: 115436500-115436598 | + | 130 | 99 | GAP43 | Proximal | 0 | Not documented | 43 |
| | Uniquely | | | | | | | | | | | | | | |
| HERV17-int_dup196 | Uniquely | No | — | — | LTR | ERV1 | chr3: 115463422-115464840 | + | 28 | 1419 | GAP43 | Distal | 23086 | EVE annotated | 44 |
| MIR3_dup19714 | Uniquely | No | — | — | SINE | MIR | chr3: 115523149-115523322 | − | 120 | 174 | LSAMP | Proximal | 0 | Not documented | 45 |
| LTR12 _{——} dup97 | Uniquely | No | — | — | LTR | ERV1 | chr3: 115658717-115659382 | − | 34 | 666 | LSAMP | Proximal | | Not documented | 46 |
| L1PB2_dup526 | Uniquely | No | — | — | LINE | L1PA\|B\|x | chr3: 115668118-115670301 | + | 60 | 2184 | LSAMP | Proximal | 0 | Not documented | 47 |
| L2_dup11488 | Uniquely | No | — | — | LINE | L2 | chr3: 115702546-115703234 | − | 170 | 689 | LSAMP | Proximal | 0 | Not documented | 48 |
| MIRb_dup40780 | Multi | No | — | — | SINE | MIR | chr3: 11579841-11579970 | + | 130 | 130 | ATG7 | Proximal | 0 | Not documented | 49 |
| AluJb_dup23972 | Multi | No | — | — | SINE | Alu | chr3: 11580036-11580369 | + | 75 | 334 | ATG7 | Proximal | 0 | Not documented | 3150 |
| HERVH-int_dup1229 | Multi/ | No | — | — | LTR | ERV1 | chr3: 115826494-115829645 | − | 42 | 3152 | LSAMP | Proximal | 0 | EVE annotated | 51 |
| | Uniquely | | | | | | | | | | | | | | |
| MIR_dup36588 | Uniquely | No | — | — | SINE | MIR | chr3: 115834087-115834312 | − | 130 | 226 | LSAMP | Proximal | 0 | Not documented | 52 |
| CR1_Mam_dup374 | Multi | No | — | — | LINE | CR1 | chr3: 115903666-115904160 | − | 150 | 495 | LSAMP | Proximal | 0 | Not documented | 53 |
| AluY_dup22894 | Multi/ | No | — | — | SINE | Alu | chr3: 115952012-115952281 | + | 27 | 270 | LSAMP | Proximal | 0 | Not documented | 54 |
| | Uniquely | | | | | | | | | | | | | | |
| Tigger10_dup191 | Uniquely | No | — | — | DNA | DNA | chr3: 115977444-115978199 | − | 140 | 756 | LSAMP | Proximal | 0 | Not documented | 55 |
| AluJo_dup13505 | Multi/ | No | — | — | SINE | Alu | chr3: 115993922-115994199 | − | 82 | 278 | LSAMP | Proximal | 0 | Not documented | 56 |
| | Uniquely | | | | | | | | | | | | | | |
| L2a_dup35891 | Uniquely | No | — | — | LINE | L2 | chr3: 116024903-116025035 | − | 150 | 133 | LSAMP | Proximal | 0 | Not documented | 57 |
| L1MB3_dup3438 | Uniquely | No | — | — | LINE | Other L1 | chr3: 116048932-116050675 | + | 79 | 1744 | LSAMP | Proximal | 0 | Not documented | 58 |
| MLT1G3_dup559 | Uniquely | No | — | — | LTR | ERVL- | chr3: 116058344-116058851 | + | 140 | 508 | LSAMP | Proximal | 0 | Not documented | 59 |
| | | | | | | MaLR | | | | | | | | | |
| AluSz_dup18376 | Multi/ | No | — | — | SINE | Alu | chr3: 116065168-116065467 | − | 73 | 300 | LSAMP | Proximal | 0 | Not documented | 60 |
| | Uniquely | | | | | | | | | | | | | | |
| L1MB3_dup3443 | Uniquely | No | — | — | LINE | Other L1 | chr3: 116089592-116092054 | + | 85 | 2463 | LSAMP | Proximal | 0 | Not documented | 61 |
| MIRb_dup48810 | Multi | No | — | — | SINE | MIR | chr3: 116104802-116105006 | − | 120 | 205 | LSAMP | Proximal | 0 | Not documented | 62 |
| L2c_dup31758 | Multi | No | — | — | LINE | L2 | chr3: 116109201-116109419 | − | 180 | 219 | LSAMP | Proximal | 0 | Not documented | 63 |
| AluSc8_dup4137 | Multi | No | — | — | SINE | Alu | chr3: 116109427-116109610 | + | 50 | 184 | LSAMP | Proximal | 0 | Not documented | 64 |
| L3_dup9863 | Uniquely | No | — | — | LINE | CR1 | chr3: 116149894-116150293 | − | 150 | 400 | LSAMP | Proximal | 0 | Not documented | 65 |
| L1ME1_dup6529 | Multi | No | — | — | LINE | Other L1 | chr3: 116264328-116264600 | + | 110 | 273 | LSAMP | Proximal | 0 | Not documented | 66 |
| AluSz_dup18378 | Multi/ | No | — | — | SINE | Alu | chr3: 116264601-116264899 | + | 61 | 299 | LSAMP | Proximal | 0 | Not documented | 67 |
| | Uniquely | | | | | | | | | | | | | | |
| L2c_dup31770 | Multi | No | — | — | LINE | L2 | chr3: 116302187-116302449 | − | 150 | 263 | LSAMP | Proximal | 0 | Not documented | 68 |
| MIR_dup36617 | Multi | No | — | — | SINE | MIR | chr3: 116303024-116303242 | − | 120 | 219 | LSAMP | Proximal | 0 | Not documented | 69 |
| MER102b_dup828 | Uniquely | No | — | — | DNA | DNA | chr3: 116428148-116428425 | − | 150 | 278 | LSAMP | Proximal | 0 | Not documented | 70 |
| MIR_dup36636 | Uniquely | No | — | — | SINE | MIR | chr3: 116617578-116617766 | − | 130 | 189 | LSAMP | Proximal | 0 | Not documented | 71 |
| AluSq10_dup362 | Uniquely | No | — | — | SINE | Alu | chr3: 11682310-11682612 | + | 40 | 303 | VGLL4 | Proximal | 0 | Not documented | 72 |
| AluSx_dup26325 | Multi/ | No | — | — | SINE | Alu | chr3: 116893682-116893987 | + | 42 | 306 | LSAMP | Proximal | 0 | Not documented | 73 |
| | Uniquely | | | | | | | | | | | | | | |
| MER4D1_dup244 | Uniquely | No | — | — | LTR | ERV1 | chr3: 117032941-117033921 | + | 59 | 981 | LSAMP | Proximal | 0 | Not documented | 74 |
| MER103C_dup1975 | Uniquely | No | — | — | DNA | DNA | chr3: 117153804-117153993 | − | 120 | 190 | LSAMP | Proximal | 0 | Not documented | 3175 |
| L2c_dup31827 | Uniquely | No | — | — | LINE | L2 | chr3: 117176048-117176533 | − | 160 | 486 | LSAMP | Proximal | 0 | Not documented | 76 |
| AluJb_dup28286 | Uniquely | No | — | — | SINE | Alu | chr3: 117353579-117353873 | − | 77 | 295 | LSAMP | Proximal | 0 | Not documented | 77 |
| L1MD3_dup1030 | Uniquely | No | — | — | LINE | Other L1 | chr3: 117375395-117375996 | − | 94 | 602 | LSAMP | Proximal | 0 | Not documented | 78 |
| L1P4a_dup89 | Uniquely | No | — | — | LINE | L1PA\|B\|x | chr3: 117666368-117668326 | − | 75 | 1959 | LSAMP | Proximal | 0 | Not documented | 79 |
| MIR3_dup19894 | Multi | No | — | — | SINE | MIR | chr3: 120114638-120114696 | − | 110 | 59 | FSTL1 | Proximal | 0 | Not documented | 80 |
| L1PB4_dup1251 | Uniquely | No | — | — | LINE | L1PA\|B\|x | chr3: 122132838-122133176 | + | 66 | 339 | WDR5B | Proximal | 0 | Not documented | 81 |
| AluJb_dup28474 | Multi | No | — | — | SINE | Alu | chr3: 122292674-122292983 | − | 84 | 310 | DTX3L | Proximal | 0 | Not documented | 82 |
| MIR_dup36970 | Multi | No | — | — | SINE | MIR | chr3: 122293354-122293577 | − | 110 | 224 | DTX3L | Proximal | 0 | Not documented | 83 |
| LTR81A_dup211 | Uniquely | No | — | — | LTR | Gypsy | chr3: 123768657-123769858 | − | 130 | 1202 | KALRN | Distal | 29013 | Not documented | 84 |
| MIRc_dup23279 | Uniquely | No | — | — | SINE | MIR | chr3: 124686464-124686618 | + | 110 | 155 | HEG1 | Proximal | 0 | Not documented | 85 |
| AluSx_dup26647 | Multi/ | No | — | — | SINE | Alu | chr3: 125491830-125492134 | + | 54 | 305 | ALG1L | Distal | 155985 | Not documented | 86 |
| | Uniquely | | | | | | | | | | | | | | |
| HERVK-int_dup43 | Multi/ | No | — | — | LTR | ERVK | chr3: 125610106-125617635 | + | 11 | 7530 | ALG1L | Distal | 30484 | EVE annotated | 87 |
| | Uniquely | | | | | | | | | | | | | | |
| AluSx3_dup5716 | Uniquely | No | — | — | SINE | Alu | chr3: 125869390-125869700 | − | 35 | 311 | ALDH1L1 | Proximal | 0 | Not documented | 88 |
| L2a_dup36393 | Uniquely | No | — | — | LINE | L2 | chr3: 125900228-125900638 | + | 120 | 411 | ALDH1L1 | Proximal | 0 | Not documented | 89 |
| Tigger15a_dup1171 | Uniquely | No | — | — | DNA | DNA | chr3: 126178778-126178929 | − | 120 | 152 | ZXDC | Proximal | 0 | Not documented | 90 |
| MIR3_dup20202 | Multi | No | — | — | SINE | MIR | chr3: 127789993-127790114 | − | 130 | 122 | SEC61A1 | Proximal | 0 | Not documented | 91 |
| L1MC3_dup2437 | Multi | No | — | — | LINE | Other L1 | chr3: 127799004-127799831 | + | 74 | 828 | RUVBL1 | Proximal | 0 | Not documented | 92 |
| L3_dup10133 | Multi/ | No | — | — | LINE | CR1 | chr3: 127823604-127823665 | − | 130 | 62 | RUVBL1 | Proximal | 0 | Not documented | 93 |
| | Uniquely | | | | | | | | | | | | | | |
| AluJb_dup24103 | Uniquely | No | — | — | SINE | Alu | chr3: 12876657-12876916 | + | 72 | 260 | RPL32 | Proximal | 0 | Not documented | 94 |
| MIR3_dup20242 | Multi | No | — | — | SINE | MIR | chr3: 128887076-128887140 | + | 130 | 65 | CNBP | Proximal | 1188 | Not documented | 95 |
| AluSx1_dup20219 | Multi | No | — | — | SINE | Alu | chr3: 128887212-128887472 | + | 49 | 261 | CNBP | Proximal | 856 | Not documented | 96 |
| AluJr4_dup3812 | Multi | No | — | — | SINE | Alu | chr3: 132277343-132277582 | − | 66 | 240 | ACAD11 | Proximal | 0 | Not documented | 97 |
| MER31A_dup292 | Uniquely | No | — | — | LTR | ERV1 | chr3: 133381802-133382205 | + | 66 | 404 | TOPBP1 | Proximal | 1066 | Not documented | 98 |
| Tigger12_dup96 | Multi | No | — | — | DNA | DNA | chr3: 133539108-133539299 | − | 130 | 192 | SRPRB | Proximal | 0 | Not documented | 99 |
| L2b_dup21834 | Multi/ | No | — | — | LINE | L2 | chr3: 134204159-134204329 | + | 170 | 171 | ANAPC13 | Proximal | 0 | Not documented | 3200 |
| | Uniquely | | | | | | | | | | | | | | |
| L3_dup10307 | Multi/ | No | — | — | LINE | CR1 | chr3: 137907290-137907505 | + | 170 | 216 | ARMC8 | Proximal | 0 | Not documented | 1 |
| | Uniquely | | | | | | | | | | | | | | |
| MIRb_dup50734 | Multi | No | — | — | SINE | MIR | chr3: 138123458-138123545 | + | 130 | 88 | MRAS | Proximal | 0 | Not documented | 2 |
| L1MC4a_dup5847 | Uniquely | No | — | — | LINE | Other L1 | chr3: 139324850-139326686 | − | 88 | 1837 | NMNAT3 | Proximal | 0 | Not documented | 3 |
| MER58A_dup2842 | Uniquely | No | — | — | DNA | DNA | chr3: 141012477-141012696 | − | 92 | 220 | ACPL2 | Proximal | 0 | Not documented | 4 |
| MIR_dup30471 | Multi | No | — | — | SINE | MIR | chr3: 14222826-14223071 | − | 87 | 246 | LSM3 | Proximal | 0 | Not documented | 5 |
| L2a_dup37675 | Multi/ | No | — | — | LINE | L2 | chr3: 147713521-147713655 | − | 180 | 135 | ZIC1 | Distal | 485442 | Not documented | 6 |
| | Uniquely | | | | | | | | | | | | | | |
| AluSq_dup4235 | Multi | No | — | — | SINE | Alu | chr3: 149237447-149237764 | + | 45 | 318 | WWTR1 | Proximal | 0 | Not documented | 7 |
| MIRb_dup51667 | Uniquely | No | — | — | SINE | MIR | chr3: 149456277-149456499 | − | 120 | 223 | COMMD2 | Proximal | 0 | Not documented | 8 |
| AluSc8_dup4370 | Multi | No | — | — | SINE | Alu | chr3: 149458826-149459151 | − | 46 | 326 | COMMD2 | Proximal | 0 | Not documented | 9 |
| L2b_dup18022 | Multi | No | — | — | LINE | L2 | chr3: 14984926-14985007 | − | 130 | 82 | NR2C2 | Distal | 4085 | Not documented | 10 |
| MER5B_dup4073 | Multi | No | — | — | DNA | DNA | chr3: 14985199-14985301 | + | 150 | 103 | NR2C2 | Distal | 3791 | Not documented | 11 |
| MIRb_dup41355 | Multi/ | No | — | — | SINE | MIR | chr3: 14985746-14985918 | + | 160 | 173 | NR2C2 | Distal | 3174 | Not documented | 12 |
| | Uniquely | | | | | | | | | | | | | | |
| AluSz_dup19357 | Multi/ | No | — | — | SINE | Alu | chr3: 150180412-150180724 | − | 30 | 313 | TSC22D2 | Proximal | 0 | Not documented | 13 |
| | Uniquely | | | | | | | | | | | | | | |
| L2c_dup33508 | Multi | No | — | — | LINE | L2 | chr3: 150182256-150182341 | − | 120 | 86 | TSC22D2 | Proximal | 0 | Not documented | 14 |
| L1MC5_dup4364 | Uniquely | No | — | — | LINE | Other L1 | chr3: 150282489-150283355 | − | 100 | 867 | EIF2A | Proximal | 0 | Not documented | 15 |
| Tigger4a_dup752 | Multi | No | — | — | DNA | DNA | chr3: 150346668-150346844 | − | 50 | 177 | SELT | Proximal | 0 | Not documented | 16 |
| L2c_dup27476 | Uniquely | No | — | — | LINE | L2 | chr3: 15138171-15138264 | − | 150 | 94 | ZFYVE20 | Proximal | 0 | Not documented | 17 |
| L1PBa_dup452 | Uniquely | No | — | — | LINE | L1PA\|B\|x | chr3: 152406045-152411911 | + | 46 | 5867 | PZRY1 | Distal | 140826 | Not documented | 18 |
| MER61B_dup55 | Multi | No | — | — | LTR | ERV1 | chr3: 153784-154149 | − | 88 | 366 | CHL1 | Distal | 84131 | Not documented | 19 |
| AluSp_dup10013 | Uniquely | No | — | — | SINE | Alu | chr3: 153837318-153837611 | + | 39 | 294 | ARHGEF26 | Proximal | 1182 | Not documented | 20 |
| AluSz_dup19462 | Multi/ | No | — | — | SINE | Alu | chr3: 153974044-153974321 | − | 55 | 278 | ARHGEF26 | Proximal | 0 | Not documented | 21 |
| | Uniquely | | | | | | | | | | | | | | |
| FLAM_C_dup3771 | Multi | No | — | — | SINE | Alu | chr3: 15483062-15483191 | + | 56 | 130 | EAF1 | Proximal | 0 | Not documented | 22 |
| AluSx1_dup20965 | Multi | No | — | — | SINE | Alu | chr3: 156259207-156259414 | − | 50 | 208 | SSR3 | Proximal | 0 | Not documented | 23 |
| Charlie17a_dup356 | Multi | No | — | — | DNA | DNA | chr3: 156259896-156260002 | + | 88 | 107 | SSR3 | Proximal | 0 | Not documented | 24 |
| AluJr4_dup3944 | Multi | No | — | — | SINE | Alu | chr3: 156417879-156418190 | − | 63 | 312 | TIPARP | Proximal | 0 | Not documented | 3225 |
| AluY_dup24364 | Multi | No | — | — | SINE | Alu | chr3: 158262979-158263210 | − | 33 | 232 | RSRC1 | Proximal | 0 | Not documented | 26 |
| L1MCa_dup1432 | Uniquely | No | — | — | LINE | Other L1 | chr3: 158298752-158299684 | + | 69 | 933 | MLF1 | Proximal | 0 | Not documented | 27 |
| Tigger14a_dup291 | Multi | No | — | — | DNA | DNA | chr3: 160803013-160803101 | + | 120 | 89 | B3GALNT1 | Proximal | 0 | Not documented | 28 |
| AluSx_dup22761 | Multi/ | No | — | — | SINE | Alu | chr3: 16269867-16270170 | + | 52 | 304 | GALNT15 | Proximal | 0 | Not documented | 29 |
| | Uniquely | | | | | | | | | | | | | | |
| MER3_dup1803 | Uniquely | No | — | — | DNA | DNA | chr3: 16270775-16270974 | − | 82 | 200 | GALNT15 | Proximal | 0 | Not documented | 30 |
| MLT2B4_dup942 | Uniquely | No | — | — | LTR | ERVL | chr3: 165177948-165178499 | + | 79 | 552 | SLITRK3 | Distal | 263052 | Not documented | 31 |
| L1MA4_dup2101 | Uniquely | No | — | — | LINE | Other L1 | chr3: 168447949-168453738 | + | 87 | 5790 | MECOM | Distal | 347550 | Not documented | 32 |
| MER82_dup664 | Multi | No | — | — | DNA | DNA | chr3: 169713456-169713984 | + | 77 | 529 | SEC62 | Proximal | 0 | Not documented | 33 |
| HERVH-int_dup1416 | Uniquely | No | — | — | LTR | ERV1 | chr3: 170403448-170406593 | − | 44 | 3146 | CLDN11 | Proximal | 0 | EVE annotated | 34 |
| MER58B_dup1516 | Uniquely | No | — | — | DNA | DNA | chr3: 171040654-171040990 | + | 110 | 337 | TNIK | Proximal | 0 | Not documented | 35 |
| L2a_dup38981 | Uniquely | No | — | — | LINE | L2 | chr3: 171063572-171063992 | − | 130 | 421 | TNIK | Proximal | 0 | Not documented | 36 |
| L2b_dup23002 | Multi/ | No | — | — | LINE | L2 | chr3: 171064250-171064971 | − | 140 | 722 | TNIK | Proximal | 0 | Not documented | 37 |
| | Uniquely | | | | | | | | | | | | | | |
| AluY_dup24895 | Multi | No | — | — | SINE | Alu | chr3: 173599210-173599486 | − | 26 | 277 | NLGN1 | Proximal | 0 | Not documented | 38 |
| LTR86B2_dup67 | Uniquely | No | — | — | LTR | ERVL | chr3: 173622552-173622996 | − | 140 | 445 | NLGN1 | Proximal | 0 | Not documented | 39 |
| AluSz_dup19897 | Multi | No | — | — | SINE | Alu | chr3: 173646463-173646759 | − | 52 | 297 | NLGN1 | Proximal | 0 | Not documented | 40 |
| LTR78_dup1150 | Uniquely | No | — | — | LTR | ERV1 | chr3: 173689577-173690165 | + | 150 | 589 | NLGN1 | Proximal | 0 | Not documented | 41 |
| MLT1L_dup2777 | Multi/ | No | — | — | LTR | ERVL- | chr3: 173707411-173707906 | − | 140 | 496 | NLGN1 | Proximal | 0 | Not documented | 42 |
| | Uniquely | | | | | MaLR | | | | | | | | | |
| MLT1B_dup3715 | Uniquely | No | — | — | LTR | ERVL- | chr3: 173724877-173725122 | + | 61 | 246 | NLGN1 | Proximal | 0 | Not documented | 43 |
| | | | | | | MaLR | | | | | | | | | |
| HAL1_dup6411 | Multi | No | — | — | LINE | Other L1 | chr3: 173748374-173750069 | + | 130 | 1696 | NLGN1 | Proximal | 0 | Not documented | 44 |
| L1MCa_dup1488 | Multi | No | — | — | LINE | Other L1 | chr3: 173750832-173752865 | + | 99 | 2034 | NLGN1 | Proximal | 0 | Not documented | 45 |
| L1PA16_dup2930 | Uniquely | No | — | — | LINE | L1PA\|B\|x | chr3: 173881222-173888019 | − | 75 | 6798 | NLGN1 | Proximal | 0 | Not documented | 46 |
| L1MA4_dup2134 | Uniquely | No | — | — | LINE | Other L1 | chr3: 174568122-174570873 | + | 74 | 2752 | NAALADL2 | Proximal | 0 | Not documented | 47 |
| L1MA1_dup859 | Uniquely | No | — | — | LINE | Other L1 | chr3: 174609036-174610439 | + | 85 | 1404 | NAALADL2 | Proximal | 0 | Not documented | 48 |
| L1PA4_dup2527 | Uniquely | No | — | — | LINE | L1PA\|B\|x | chr3: 175141055-175142530 | − | 18 | 1476 | NAALADL2 | Proximal | 0 | Not documented | 49 |
| MIRb_dup53253 | Multi/ | No | — | — | SINE | MIR | chr3: 175149862-175150068 | + | 160 | 207 | NAALADL2 | Proximal | 0 | Not documented | 3250 |
| | Uniquely | | | | | | | | | | | | | | |
| AluY_dup25017 | Uniquely | No | — | — | SINE | Alu | chr3: 177062160-177062469 | − | 30 | 310 | TBL1XR1 | Distal | 146900 | Not documented | 51 |
| L1MA2_dup1506 | Uniquely | No | — | — | LINE | Other L1 | chr3: 178606553-178610586 | + | 52 | 4034 | KCNMB2 | Distal | 44337 | Not documented | 52 |
| MIRc_dup25131 | Multi | No | — | — | SINE | MIR | chr3: 179050749-179050902 | − | 120 | 154 | ZNF639 | Proximal | 0 | Not documented | 53 |
| AluJb_dup30685 | Uniquely | No | — | — | SINE | Alu | chr3: 180701721-180701822 | + | 80 | 102 | DNAJC19 | Proximal | 0 | Not documented | 54 |
| L2c_dup35003 | Multi/ | No | — | — | LINE | L2 | chr3: 180702049-180702146 | + | 110 | 98 | DNAJC19 | Proximal | 0 | Not documented | 55 |
| | Uniquely | | | | | | | | | | | | | | |
| L2a_dup39571 | Multi | No | — | — | LINE | L2 | chr3: 181339430-181339689 | − | 130 | 260 | SOX2 | Distal | 90026 | Not documented | 56 |
| L2c_dup35056 | Multi | No | — | — | LINE | L2 | chr3: 181340463-181340711 | + | 150 | 249 | SOX2 | Distal | 89004 | Not documented | 57 |
| AluJo_dup14714 | Multi | No | — | — | SINE | Alu | chr3: 181341007-181341086 | + | 96 | 80 | SOX2 | Distal | 88629 | Not documented | 58 |
| Charlie1a_dup1319 | Uniquely | No | — | — | DNA | DNA | chr3: 181389388-181390529 | + | 84 | 1142 | SOX2 | Distal | 39186 | Not documented | 59 |
| AluSx_dup28803 | Multi | No | — | — | SINE | Alu | chr3: 183529740-183530027 | + | 44 | 288 | YEATS2 | Proximal | 0 | Not documented | 60 |
| L2a_dup39724 | Uniquely | No | — | — | LINE | L2 | chr3: 184018480-184018760 | + | 160 | 281 | PSMD2 | Proximal | 0 | Not documented | 61 |
| AluY_dup25374 | Multi | No | — | — | SINE | Alu | chr3: 184796788-184797092 | + | 34 | 305 | C3orf70 | Proximal | 0 | Not documented | 62 |
| AluSx1_dup21785 | Multi | No | — | — | SINE | Alu | chr3: 185009811-185010106 | + | 48 | 296 | MAP3K13 | Proximal | 0 | Not documented | 63 |
| MIRc_dup25375 | Multi | No | — | — | SINE | MIR | chr3: 185010173-185010412 | + | 120 | 240 | MAP3K13 | Proximal | 0 | Not documented | 64 |
| MER112_dup1127 | Multi | No | — | — | DNA | DNA | chr3: 185010664-185010871 | + | 110 | 208 | MAP3K13 | Proximal | 0 | Not documented | 65 |
| AluY_dup25449 | Multi | No | — | — | SINE | Alu | chr3: 186264337-186264647 | + | 23 | 311 | TBCCD1 | Proximal | 0 | Not documented | 66 |
| MIR3_dup21984 | Multi/ | No | — | — | SINE | MIR | chr3: 186952194-186952364 | − | 120 | 171 | MASP1 | Proximal | 0 | Not documented | 67 |
| | Uniquely | | | | | | | | | | | | | | |
| L3_dup11020 | Uniquely | No | — | — | LINE | CR1 | chr3: 186952945-186953083 | + | 130 | 139 | MASP1 | Proximal | 0 | Not documented | 68 |
| Ricksha_0_dup103 | Uniquely | No | — | — | DNA | DNA | chr3: 187013697-187015275 | + | 63 | 1579 | MASP1 | Distal | 3888 | Not documented | 69 |
| MIRc_dup25546 | Multi/ | No | — | — | SINE | MIR | chr3: 187453116-187453240 | − | 140 | 125 | BCL6 | Proximal | 0 | Not documented | 70 |
| | Uniquely | | | | | | | | | | | | | | |
| MIR3_dup22054 | Multi | No | — | — | SINE | MIR | chr3: 187455906-187455971 | − | 54 | 66 | BCL6 | Proximal | 0 | Not documented | 71 |
| MIR3_dup22162 | Multi | No | — | — | SINE | MIR | chr3: 187943131-187943215 | − | 92 | 85 | LPP | Proximal | 0 | Not documented | 72 |
| MIR3_dup22176 | Uniquely | No | — | — | SINE | MIR | chr3: 188022085-188022258 | − | 120 | 174 | LPP | Proximal | 0 | Not documented | 73 |
| AluJr_dup15598 | Multi | No | — | — | SINE | Alu | chr3: 188595352-188595525 | + | 60 | 174 | LPP | Proximal | 0 | Not documented | 74 |
| AluY_dup25655 | Multi/ | No | — | — | SINE | Alu | chr3: 193117366-193117656 | + | 35 | 291 | ATP13A4 | Distal | 2211 | Not documented | 3275 |
| | Uniquely | | | | | | | | | | | | | | |
| L1MC2_dup1353 | Uniquely | No | — | — | LINE | Other L1 | chr3: 193150002-193150527 | + | 76 | 526 | ATP13A4 | Proximal | 0 | Not documented | 76 |
| L1MC1_dup2968 | Multi | No | — | — | LINE | Other L1 | chr3: 193150962-193151123 | + | 89 | 162 | ATP13A4 | Proximal | 0 | Not documented | 77 |
| AluY_dup25658 | Uniquely | No | — | — | SINE | Alu | chr3: 193155615-193155920 | − | 35 | 306 | ATP13A4 | Proximal | 0 | Not documented | 78 |
| FLAM_C_dup4743 | Uniquely | No | — | — | SINE | Alu | chr3: 193180652-193180786 | + | 67 | 135 | ATP13A4 | Proximal | 0 | Not documented | 79 |
| MIRc_dup26094 | Uniquely | No | — | — | SINE | MIR | chr3: 193180943-193181095 | + | 140 | 153 | ATP13A4 | Proximal | 0 | Not documented | 80 |
| MSTA_dup4116 | Multi | No | — | — | LTR | ERVL- | chr3: 194361500-194361861 | − | 67 | 362 | LSG1 | Proximal | 0 | Not documented | 81 |
| | | | | | | MaLR | | | | | | | | | |
| L1MB8_dup3496 | Multi | No | — | — | LINE | Other L1 | chr3: 194361888-194362131 | − | 75 | 244 | LSG1 | Proximal | 0 | Not documented | 82 |
| AluSx3_dup6321 | Multi | No | — | — | SINE | Alu | chr3: 194362350-194362551 | − | 40 | 202 | LSG1 | Proximal | 0 | Not documented | 83 |
| L1M1_dup2051 | Uniquely | No | — | — | LINE | Other L1 | chr3: 195076666-195078462 | + | 74 | 1797 | ACAP2 | Proximal | 0 | Not documented | 84 |
| L2b_dup23899 | Multi | No | — | — | LINE | L2 | chr3: 195388563-195388684 | + | 120 | 122 | MUC20 | Distal | 59070 | Not documented | 85 |
| L2a_dup40352 | Uniquely | No | — | — | LINE | L2 | chr3: 195461911-195462761 | + | 130 | 851 | MUC20 | Proximal | 0 | Not documented | 86 |
| LTR5_Hs_dup150 | Multi | No | — | — | LTR | ERVK | chr3: 195654396-195655363 | − | 5 | 968 | TNK2 | Distal | 15581 | Not documented | 87 |
| AluSq2_dup11657 | Uniquely | No | — | — | SINE | Alu | chr3: 196433901-196434200 | − | 27 | 300 | CEP19 | Proximal | 0 | Not documented | 88 |
| AluSx1_dup22393 | Multi/ | No | — | — | SINE | Alu | chr3: 196461161-196461462 | + | 60 | 302 | PIGX | Proximal | 0 | Not documented | 89 |
| | Uniquely | | | | | | | | | | | | | | |
| AluSx_dup29723 | Multi | No | — | — | SINE | Alu | chr3: 196660479-196660772 | − | 43 | 294 | SENP5 | Proximal | 0 | Not documented | 90 |
| AluJr_dup15787 | Multi | No | — | — | SINE | Alu | chr3: 196663325-196663446 | − | 52 | 122 | NCBP2 | Proximal | 0 | Not documented | 91 |
| AluJb_dup31408 | Uniquely | No | — | — | SINE | Alu | chr3: 196670492-196670604 | − | 48 | 113 | NCBP2 | Proximal | 1025 | Not documented | 92 |
| L1M4c_dup1228 | Multi | No | — | — | LINE | Other L1 | chr3: 196883869-196884764 | + | 88 | 896 | DLG1 | Proximal | 0 | Not documented | 93 |
| L1M4c_dup1229 | Multi | No | — | — | LINE | Other L1 | chr3: 196884765-196885210 | + | 85 | 446 | DLG1 | Proximal | 0 | Not documented | 94 |
| MER20_dup3715 | Uniquely | No | — | — | DNA | DNA | chr3: 196955859-196956062 | + | 110 | 204 | DLG1 | Proximal | 0 | Not documented | 95 |
| Tigger3b_dup1502 | Uniquely | No | — | — | DNA | DNA | chr3: 196995509-196996270 | − | 72 | 762 | DLG1 | Proximal | 0 | Not documented | 96 |
| LTR8A_dup593 | Multi | No | — | — | LTR | ERV1 | chr3: 197340125-197340848 | − | 70 | 724 | BDH1 | Distal | 39932 | Not documented | 97 |
| MER4-int_dup577 | Multi | No | — | — | LTR | ERV1 | chr3: 197341324-197342796 | − | 44 | 1473 | BDH1 | Distal | 41131 | Not documented | 98 |
| AluJo_dup15104 | Uniquely | No | — | — | SINE | Alu | chr3: 197682860-197683121 | − | 89 | 262 | RPL35A | Proximal | 0 | Not documented | 99 |
| MER113_dup361 | Multi/ | No | — | — | DNA | DNA | chr3: 254555-254908 | − | 140 | 354 | CHL1 | Proximal | 0 | Not documented | 3300 |
| | Uniquely | | | | | | | | | | | | | | |
| MLT1H2_dup810 | Multi | No | — | — | LTR | ERVL- | chr3: 25508724-25509184 | − | 120 | 461 | RARB | Proximal | 0 | Not documented | 1 |
| | | | | | | MaLR | | | | | | | | | |
| L1MA6_dup800 | Uniquely | No | — | — | LINE | Other L1 | chr3: 256746-257365 | + | 72 | 620 | CHL1 | Proximal | 0 | Not documented | 2 |
| MIRb_dup42160 | Multi | No | — | — | SINE | MIR | chr3: 25778598-25778829 | − | 120 | 232 | NGLY1 | Proximal | 0 | Not documented | 3 |
| AluSz_dup16049 | Multi | No | — | — | SINE | Alu | chr3: 27675934-27676257 | + | 46 | 324 | EOMES | Distal | 81184 | Not documented | 4 |
| MER102a_dup384 | Uniquely | No | — | — | DNA | DNA | chr3: 304266-304563 | − | 150 | 298 | CHL1 | Proximal | 0 | Not documented | 5 |
| L2a_dup31099 | Multi | No | — | — | LINE | L2 | chr3: 33905589-33905643 | + | 83 | 55 | PDCD6IP | Proximal | 0 | Not documented | 6 |
| MER20B_dup758 | Multi | No | — | — | DNA | DNA | chr3: 37031148-37031317 | − | 120 | 170 | EPM2AIP1 | Proximal | 0 | Not documented | 7 |
| L1PA5_dup1667 | Uniquely | No | — | — | LINE | L1PA\|B\|x | chr3: 3907117-3910573 | + | 31 | 3457 | SUMF1 | Proximal | 0 | Not documented | 8 |
| LTR6A_dup37 | Multi | No | — | — | LTR | ERV1 | chr3: 39449151-39449180 | − | 15 | 30 | RPSA | Proximal | 0 | Not documented | 9 |
| L2a_dup31454 | Uniquely | No | — | — | LINE | L2 | chr3: 40491283-40491929 | + | 100 | 647 | RPL14 | Distal | 6855 | Not documented | 10 |
| L3_dup8184 | Multi | No | — | — | LINE | CR1 | chr3: 430900-430989 | + | 110 | 90 | CHL1 | Proximal | 0 | Not documented | 11 |
| AluSz6_dup7880 | Uniquely | No | — | — | SINE | Alu | chr3: 43749121-43749421 | − | 66 | 301 | ABHD5 | Proximal | 0 | Not documented | 12 |
| X7B_LINE_dup168 | Multi/ | No | — | — | LINE | CR1 | chr3: 43760330-43760437 | − | 110 | 108 | ABHD5 | Proximal | 0 | Not documented | 13 |
| | Uniquely | | | | | | | | | | | | | | |
| MER2_dup1674 | Uniquely | No | — | — | DNA | DNA | chr3: 44399883-44400215 | + | 69 | 333 | TCAIM | Proximal | 0 | Not documented | 14 |
| L1ME3C_dup2252 | Multi | No | — | — | LINE | Other L1 | chr3: 44547421-44548197 | + | 130 | 777 | ZNF852 | Proximal | 0 | Not documented | 15 |
| L1MD2_dup1789 | Uniquely | No | — | — | LINE | Other L1 | chr3: 44688271-44689546 | + | 81 | 1276 | ZNF197 | Proximal | 0 | Not documented | 16 |
| Tigger3_dup171 | Uniquely | No | — | — | DNA | DNA | chr3: 44722341-44724300 | − | 49 | 1960 | ZNF35 | Distal | 20059 | Not documented | 17 |
| LOR1-int_dup316 | Multi/ | No | — | — | LTR | ERV1 | chr3: 44792801-44793483 | + | 110 | 683 | KIAA1143 | Proximal | 0 | EVE annotated | 18 |
| | Uniquely | | | | | | | | | | | | | | |
| L1ME4a_dup8203 | Multi | No | — | — | LINE | Other L1 | chr3: 44794427-44794772 | + | 110 | 346 | KIAA1143 | Proximal | 0 | Not documented | 19 |
| MIRc_dup18784 | Multi | No | — | — | SINE | MIR | chr3: 450031-450230 | + | 160 | 200 | CHL1 | Proximal | 0 | Not documented | 20 |
| MIR3_dup18057 | Uniquely | No | — | — | SINE | MIR | chr3: 47323607-47323678 | + | 110 | 72 | KIF9 | Proximal | 0 | Not documented | 21 |
| Tigger9a_dup209 | Multi | No | — | — | DNA | DNA | chr3: 47857595-47857760 | − | 110 | 166 | DHX30 | Proximal | 0 | Not documented | 22 |
| L3_dup8974 | Multi | No | — | — | LINE | CR1 | chr3: 47893620-47893695 | + | 140 | 76 | MAP4 | Proximal | 0 | Not documented | 23 |
| L1MD3_dup933 | Uniquely | No | — | — | LINE | Other L1 | chr3: 48123061-48124014 | + | 91 | 954 | MAP4 | Proximal | 0 | Not documented | 24 |
| AluSg_dup7161 | Multi | No | — | — | SINE | Alu | chr3: 48335573-48335861 | − | 36 | 289 | NME6 | Proximal | 0 | Not documented | 3325 |
| AluSc8_dup3761 | Multi | No | — | — | SINE | Alu | chr3: 48962120-48962426 | − | 45 | 307 | ARIH2 | Proximal | 0 | Not documented | 26 |
| AluSg_dup7219 | Multi/ | No | — | — | SINE | Alu | chr3: 49452668-49452957 | + | 44 | 290 | TCTA | Proximal | 0 | Not documented | 27 |
| | Uniquely | | | | | | | | | | | | | | |
| MIR3_dup18119 | Multi | No | — | — | SINE | MIR | chr3: 50257859-50257993 | − | 130 | 135 | GNAI2 | Distal | 5732 | Not documented | 28 |
| AluSz_dup17013 | Multi | No | — | — | SINE | Alu | chr3: 51701186-51701479 | − | 46 | 294 | TEX264 | Proximal | 0 | Not documented | 29 |
| L1MA8_dup1661 | Multi | No | — | — | LINE | Other L1 | chr3: 51982586-51983078 | − | 67 | 493 | PARP3 | Proximal | 0 | Not documented | 30 |
| L2b_dup19214 | Multi | No | — | — | LINE | L2 | chr3: 52568839-52568894 | − | 140 | 56 | NT5DC2 | Proximal | 0 | Not documented | 31 |
| AluJb_dup26364 | Multi | No | — | — | SINE | Alu | chr3: 53850868-53851151 | − | 55 | 284 | CHDH | Proximal | 0 | Not documented | 32 |
| Tigger2_dup550 | Multi | No | — | — | DNA | DNA | chr3: 53894643-53897334 | + | 55 | 2692 | IL17RB | Proximal | 0 | Not documented | 33 |
| AluY_dup21186 | Multi | No | — | — | SINE | Alu | chr3: 56654899-56655216 | + | 46 | 318 | FAM208A | Proximal | 0 | Not documented | 34 |
| L1PA5_dup1875 | Uniquely | No | — | — | LINE | L1PA\|B\|x | chr3: 57592609-57598129 | + | 25 | 5521 | ARF4 | Distal | 8663 | EVE annotated | 35 |
| AluSz_dup17323 | Multi | No | — | — | SINE | Alu | chr3: 58304103-58304410 | + | 74 | 308 | RPP14 | Proximal | 0 | Not documented | 36 |
| MLT1J_dup2835 | Multi/ | No | — | — | LTR | ERVL- | chr3: 58549790-58550158 | − | 140 | 369 | FAM107A | Proximal | 0 | Not documented | 37 |
| | Uniquely | | | | | MaLR | | | | | | | | | |
| Charlie19a_dup319 | Multi/ | No | — | — | DNA | DNA | chr3: 58551051-58551263 | + | 120 | 213 | FAM107A | Proximal | 0 | Not documented | 38 |
| | Uniquely | | | | | | | | | | | | | | |
| MER5A1_dup2999 | Multi/ | No | — | — | DNA | DNA | chr3: 58551475-58551627 | + | 80 | 153 | FAM107A | Proximal | 0 | Not documented | 39 |
| | Uniquely | | | | | | | | | | | | | | |
| MIRb_dup44739 | Multi | No | — | — | SINE | MIR | chr3: 58562456-58562688 | − | 130 | 233 | FAM107A | Proximal | 0 | Not documented | 40 |
| L1PA16_dup2301 | Uniquely | No | — | — | LINE | L1PA\|B\|x | chr3: 60799904-60802547 | − | 58 | 2644 | FHIT | Proximal | 0 | Not documented | 41 |
| L1MB4_dup1703 | Uniquely | No | — | — | LINE | Other L1 | chr3: 64163109-64164000 | − | 81 | 892 | PRICKLE2 | Proximal | 0 | Not documented | 42 |
| L1MB7_dup4328 | Uniquely | No | — | — | LINE | Other L1 | chr3: 66437131-66438239 | + | 100 | 1109 | LRIG1 | Proximal | 0 | Not documented | 43 |
| AluSz_dup17538 | Multi/ | No | — | — | SINE | Alu | chr3: 66535297-66535602 | + | 73 | 306 | LRIG1 | Proximal | 0 | Not documented | 44 |
| | Uniquely | | | | | | | | | | | | | | |
| MER5A_dup6715 | Multi | No | — | — | DNA | DNA | chr3: 68194587-68194689 | − | 130 | 103 | FAM19A1 | Proximal | 0 | Not documented | 45 |
| CER_dup9 | Multi | No | — | — | Other | Other | chr3: 75798061-75803252 | + | 45 | 5192 | ZNF717 | Proximal | 0 | Not documented | 46 |
| | | | | | | Repeats | | | | | | | | | |
| L1MC1_dup2442 | Uniquely | No | — | — | LINE | Other L1 | chr3: 77286714-77287560 | − | 85 | 847 | ROBO2 | Proximal | 0 | Not documented | 47 |
| L1P3_dup476 | Uniquely | No | — | — | LINE | L1PA\|B\|x | chr3: 7945182-7948486 | − | 49 | 3305 | GRM7 | Distal | 161968 | Not documented | 48 |
| AluJb_dup23765 | Uniquely | No | — | — | SINE | Alu | chr3: 8329168-8329479 | + | 76 | 312 | LMCD1 | Distal | 213915 | Not documented | 49 |
| AluJb_dup27725 | Multi | No | — | — | SINE | Alu | chr3: 93700444-93700739 | + | 63 | 296 | ARL13B | Proximal | 0 | Not documented | 3350 |
| AluSp_dup9249 | Multi | No | — | — | SINE | Alu | chr3: 94224673-94224973 | − | 38 | 301 | NSUN3 | Distal | 377285 | Not documented | 51 |
| Mam_R4_dup133 | Multi | No | — | — | LINE | Dong-R4 | chr3: 94225397-94225563 | + | 170 | 167 | NSUN3 | Distal | 378009 | Not documented | 52 |
| Charlie1_dup373 | Multi/ | No | — | — | DNA | DNA | chr3: 9431502-9432125 | − | 93 | 624 | THUMPD3 | Distal | 3028 | Not documented | 53 |
| | Uniquely | | | | | | | | | | | | | | |
| AluSz_dup15533 | Multi | No | — | — | SINE | Alu | chr3: 9432941-9433241 | − | 59 | 301 | THUMPD3 | Distal | 4467 | Not documented | 54 |
| MLT1K_dup2832 | Multi | No | — | — | LTR | ERVL- | chr3: 9807706-9808055 | + | 96 | 350 | CAMK1 | Proximal | 0 | Not documented | 55 |
| | | | | | | MaLR | | | | | | | | | |
| MIR_dup29989 | Multi/ | No | — | — | SINE | MIR | chr3: 9833868-9833965 | + | 88 | 98 | TADA3 | Proximal | 0 | Not documented | 56 |
| | Uniquely | | | | | | | | | | | | | | |
| L1PA5_dup2041 | Multi | No | — | — | LINE | L1PA\|B\|x | chr3: 98520545-98523821 | − | 21 | 3277 | ST3GAL6 | Proximal | 0 | EVE annotated | 57 |
| MIRb_dup40381 | Multi | No | — | — | SINE | MIR | chr3: 9879496-9879669 | − | 130 | 174 | TTLL3 | Proximal | 0 | Not documented | 58 |
| FLAM_C_dup3695 | Multi | No | — | — | SINE | Alu | chr3: 9883324-9883451 | − | 67 | 128 | RPUSD3 | Proximal | 0 | Not documented | 59 |
| L1PA6_dup1621 | Uniquely | No | — | — | LINE | L1PA\|B\|x | chr4: 100182019-100185432 | − | 47 | 3414 | ADH1A | Distal | 12093 | Not documented | 60 |
| MLT1J_dup4214 | Multi | No | — | — | LTR | ERVL- | chr4: 103339851-103340171 | − | 130 | 321 | SLC39A8 | Proximal | 0 | Not documented | 61 |
| | | | | | | MaLR | | | | | | | | | |
| AluY_dup29287 | Multi | No | — | — | SINE | Alu | chr4: 103352220-103352531 | + | 18 | 312 | SLC39A8 | Proximal | 0 | Not documented | 62 |
| MER5A_dup9473 | Multi | No | — | — | DNA | DNA | chr4: 103715272-103715442 | − | 120 | 171 | UBE2D3 | Proximal | 99 | Not documented | 63 |
| MLT1A0_dup5633 | Uniquely | No | — | — | LTR | ERVL- | chr4: 104000229-104000589 | + | 89 | 361 | SLC9B2 | Proximal | 0 | Not documented | 64 |
| | | | | | | MaLR | | | | | | | | | |
| L2c_dup41156 | Uniquely | No | — | — | LINE | L2 | chr4: 104007110-104007307 | + | 160 | 198 | BDH2 | Proximal | 0 | Not documented | 65 |
| Plat_L3_dup1077 | Multi | No | — | — | LINE | CR1 | chr4: 106891547-106891759 | + | 120 | 213 | NPNT | Proximal | 0 | Not documented | 66 |
| AluSc_dup8565 | Uniquely | No | — | — | SINE | Alu | chr4: 108799060-108799369 | − | 44 | 310 | SGMS2 | Proximal | 0 | Not documented | 67 |
| MER4-int_dup741 | Uniquely | No | — | — | LTR | ERV1 | chr4: 108807663-108811549 | − | 60 | 3887 | SGMS2 | Proximal | 0 | Not documented | 68 |
| LTR9_dup450 | Uniquely | No | — | — | LTR | ERV1 | chr4: 108812642-108813255 | − | 96 | 614 | SGMS2 | Proximal | 0 | Not documented | 69 |
| AluSp_dup12189 | Multi | No | — | — | SINE | Alu | chr4: 110610138-110610435 | − | 40 | 298 | CASP6 | Proximal | 0 | Not documented | 70 |
| AluSz_dup23539 | Multi/ | No | — | — | SINE | Alu | chr4: 114371295-114371580 | + | 46 | 286 | CAMK2D | Proximal | 609 | Not documented | 71 |
| | Uniquely | | | | | | | | | | | | | | |
| MIRb_dup63519 | Multi | No | — | — | SINE | MIR | chr4: 114372562-114372749 | − | 140 | 188 | CAMK2D | Proximal | 0 | Not documented | 72 |
| L2c_dup41682 | Multi | No | — | — | LINE | L2 | chr4: 114372791-114373231 | − | 160 | 441 | CAMK2D | Proximal | 0 | Not documented | 73 |
| L2a_dup48098 | Uniquely | No | — | — | LINE | L2 | chr4: 114509883-114511102 | − | 130 | 1220 | CAMK2D | Proximal | 0 | Not documented | 74 |
| MER34A1_dup203 | Uniquely | No | — | — | LTR | ERV1 | chr4: 114523482-114524032 | + | 79 | 551 | CAMK2D | Proximal | 0 | Not documented | 3375 |
| L2c_dup41697 | Uniquely | No | — | — | LINE | L2 | chr4: 114604590-114604884 | − | 170 | 295 | CAMK2D | Proximal | 0 | Not documented | 76 |
| AluY_dup29631 | Multi/ | No | — | — | SINE | Alu | chr4: 114626216-114626504 | + | 36 | 289 | CAMK2D | Proximal | 0 | Not documented | 77 |
| | Uniquely | | | | | | | | | | | | | | |
| MER34_dup398 | Uniquely | No | — | — | LTR | ERV1 | chr4: 114635594-114636056 | + | 88 | 463 | CAMK2D | Proximal | 0 | Not documented | 78 |
| AluSz6_dup11317 | Uniquely | No | — | — | SINE | Alu | chr4: 114644382-114644679 | − | 53 | 298 | CAMK2D | Proximal | 0 | Not documented | 79 |
| L1MDb_dup251 | Multi | No | — | — | LINE | Other L1 | chr4: 114682895-114683011 | + | 94 | 117 | CAMK2D | Proximal | 0 | Not documented | 80 |
| LTR82A_dup277 | Multi | No | — | — | LTR | ERVL | chr4: 120218140-120218583 | − | 130 | 444 | C4orf3 | Proximal | 0 | Not documented | 81 |
| LTR82A_dup278 | Multi | No | — | — | LTR | ERVL | chr4: 120218941-120219016 | − | 110 | 76 | C4orf3 | Proximal | 0 | Not documented | 82 |
| L2a_dup48462 | Multi | No | — | — | LINE | L2 | chr4: 120219047-120219143 | + | 70 | 97 | C4orf3 | Proximal | 0 | Not documented | 83 |
| LTR84b_dup373 | Multi | No | — | — | LTR | ERVL | chr4: 120384050-120384127 | + | 110 | 78 | PDE5A | Distal | 31424 | Not documented | 84 |
| LTR8A_dup686 | Uniquely | No | — | — | LTR | ERV1 | chr4: 123755771-123756453 | + | 76 | 683 | FGF2 | Proximal | 0 | Not documented | 85 |
| L2c_dup42057 | Uniquely | No | — | — | LINE | L2 | chr4: 123782180-123782638 | + | 160 | 459 | FGF2 | Proximal | 0 | Not documented | 86 |
| L1PA17_dup1242 | Uniquely | No | — | — | LINE | L1PA\|B\|x | chr4: 128769749-128770371 | + | 75 | 623 | HSPA4L | Distal | 7862 | Not documented | 87 |
| L1ME1_dup8744 | Multi | No | — | — | LINE | Other L1 | chr4: 132881728-132882174 | + | 130 | 447 | RP11-62N21.1 | Distal | 474784 | Not documented | 88 |
| L1M2c_dup89 | Uniquely | No | — | — | LINE | Other L1 | chr4: 13453697-13457563 | − | 100 | 3867 | RAB28 | Proximal | 0 | Not documented | 89 |
| MIR_dup42314 | Uniquely | No | — | — | SINE | MIR | chr4: 13485083-13485298 | − | 120 | 216 | RAB28 | Proximal | 0 | Not documented | 90 |
| AluSq2_dup13484 | Multi | No | — | — | SINE | Alu | chr4: 139088296-139088605 | − | 40 | 310 | SLC7A11 | Proximal | 0 | Not documented | 91 |
| L1MA4_dup2776 | Uniquely | No | — | — | LINE | Other L1 | chr4: 140334395-140335102 | − | 64 | 708 | NAA15 | Proximal | 0 | Not documented | 92 |
| AluSc_dup8819 | Multi | No | — | — | SINE | Alu | chr4: 140395049-140395356 | − | 38 | 308 | RAB33B | Proximal | 0 | Not documented | 93 |
| MLT1A0_dup5930 | Multi | No | — | — | LTR | ERVL- | chr4: 144113740-144113946 | − | 77 | 207 | USP38 | Proximal | 0 | Not documented | 94 |
| | | | | | | MaLR | | | | | | | | | |
| MER115_dup771 | Multi | No | — | — | DNA | DNA | chr4: 144114169-144114287 | + | 140 | 119 | USP38 | Proximal | 0 | Not documented | 95 |
| AluY_dup30685 | Multi | No | — | — | SINE | Alu | chr4: 148555880-148556172 | − | 39 | 293 | TMEM184C | Proximal | 0 | Not documented | 96 |
| L1MA9_dup4334 | Multi/ | No | — | — | LINE | Other L1 | chr4: 148556874-148558796 | + | 76 | 1923 | TMEM184C | Proximal | 0 | Not documented | 97 |
| | Uniquely | | | | | | | | | | | | | | |
| L1PB3_dup916 | Uniquely | No | — | — | LINE | L1PA\|B\|x | chr4: 151035618-151039083 | − | 97 | 3466 | DCLK2 | Proximal | 0 | Not documented | 98 |
| L1MB4_dup2331 | Uniquely | No | — | — | LINE | Other L1 | chr4: 151187747-151188929 | + | 79 | 1183 | LRBA | Proximal | 0 | Not documented | 99 |
| L2c_dup43282 | Uniquely | No | — | — | LINE | L2 | chr4: 155457045-155457402 | + | 150 | 358 | PLRG1 | Proximal | 0 | Not documented | 3400 |
| L3_dup11592 | Multi | No | — | — | LINE | CR1 | chr4: 15638047-15638153 | + | 140 | 107 | FBXL5 | Proximal | 0 | Not documented | 1 |
| Charlie9_dup279 | Multi | No | — | — | DNA | DNA | chr4: 15688122-15690764 | + | 59 | 2643 | FAM200B | Proximal | 0 | Not documented | 2 |
| L2c_dup43449 | Multi | No | — | — | LINE | L2 | chr4: 159600627-159600839 | − | 150 | 213 | ETFDH | Proximal | 0 | Not documented | 3 |
| AluSg_dup10545 | Multi | No | — | — | SINE | Alu | chr4: 159630398-159630699 | + | 39 | 302 | PPID | Proximal | 0 | Not documented | 4 |
| AluSx1_dup26566 | Multi | No | — | — | SINE | Alu | chr4: 166263509-166263808 | − | 50 | 300 | MSMO1 | Proximal | 0 | Not documented | 5 |
| MER11A_dup301 | Multi | No | — | — | LTR | ERVK | chr4: 166876975-166878039 | − | 25 | 1065 | TLL1 | Proximal | 0 | Not documented | 6 |
| L1M5_dup17716 | Multi | No | — | — | LINE | Other L1 | chr4: 167260374-167260745 | − | 130 | 372 | TLL1 | Distal | 235328 | Not documented | 7 |
| AluSp_dup12891 | Multi/ | No | — | — | SINE | Alu | chr4: 169771675-169771982 | − | 35 | 308 | PALLD | Proximal | 0 | Not documented | 8 |
| | Uniquely | | | | | | | | | | | | | | |
| L2b_dup28795 | Multi/ | No | — | — | LINE | L2 | chr4: 169772074-169772145 | + | 160 | 72 | PALLD | Proximal | 0 | Not documented | 9 |
| | Uniquely | | | | | | | | | | | | | | |
| AluSx3_dup7659 | Multi | No | — | — | SINE | Alu | chr4: 169826939-169827148 | − | 50 | 210 | CBR4 | Proximal | 0 | Not documented | 10 |
| L1PA7_dup3818 | Uniquely | No | — | — | LINE | L1PA\|B\|x | chr4: 169856136-169862185 | + | 44 | 6050 | CBR4 | Proximal | 0 | EVE annotated | 11 |
| L1MC1_dup4001 | Uniquely | No | — | — | LINE | Other L1 | chr4: 170473426-170475286 | + | 67 | 1861 | NEK1 | Proximal | | Not documented | 12 |
| AluJb_dup37178 | Multi | No | — | — | SINE | Alu | chr4: 170643010-170643268 | − | 69 | 259 | CLCN3 | Proximal | 0 | Not documented | 13 |
| AluSx3_dup7678 | Multi | No | — | — | SINE | Alu | chr4: 171763869-171764171 | + | 50 | 303 | AADAT | Distal | 751020 | Not documented | 14 |
| L1ME3B_dup2290 | Multi | No | — | — | LINE | Other L1 | chr4: 174284714-174286713 | + | 110 | 2000 | SAP30 | Distal | 4408 | Not documented | 15 |
| AluSx_dup35140 | Multi | No | — | — | SINE | Alu | chr4: 174290621-174290782 | + | 34 | 162 | SAP30 | Proximal | 339 | Not documented | 16 |
| MER5A_dup10112 | Multi | No | — | — | DNA | DNA | chr4: 174310726-174310858 | − | 72 | 133 | SCRG1 | Proximal | 0 | Not documented | 17 |
| MIRc_dup31270 | Uniquely | No | — | — | SINE | MIR | chr4: 174310861-174311064 | + | 150 | 204 | SCRG1 | Proximal | 0 | Not documented | 18 |
| X6A_LINE_dup87 | Uniquely | No | — | — | LINE | CR1 | chr4: 176733931-176733997 | − | 73 | 67 | GPM6A | Proximal | 0 | Not documented | 19 |
| L1MEc_dup5571 | Uniquely | No | — | — | LINE | Other L1 | chr4: 176775582-176776474 | + | 110 | 893 | GPM6A | Proximal | 0 | Not documented | 20 |
| L1MA4A_dup1805 | Multi | No | — | — | LINE | Other L1 | chr4: 176859261-176859427 | + | 71 | 16 | GPM6A | Proximal | 0 | Not documented | 21 |
| L1P3_dup946 | Multi | No | — | — | LINE | L1PA\|B\|x | chr4: 176859414-176859784 | − | 23 | 371 | GPM6A | Proximal | 0 | Not documented | 22 |
| L1PA7_dup3841 | Uniquely | No | — | — | LINE | L1PA\|B\|x | chr4: 176862554-176865304 | − | 34 | 2751 | GPM6A | Proximal | 0 | EVE annotated | 23 |
| L1MC2_dup1720 | Multi/ | No | — | — | LINE | Other L1 | chr4: 176887940-176890577 | + | 88 | 2638 | GPM6A | Proximal | 0 | Not documented | 24 |
| | Uniquely | | | | | | | | | | | | | | |
| L1ME1_dup9161 | Uniquely | No | — | — | LINE | Other L1 | chr4: 176902435-176905129 | − | 120 | 2695 | GPM6A | Proximal | 0 | Not documented | 3425 |
| Tigger1_dup3702 | Multi/ | No | — | — | DNA | DNA | chr4: 176915516-176916516 | − | 50 | 1001 | GPM6A | Proximal | 0 | Not documented | 26 |
| | Uniquely | | | | | | | | | | | | | | |
| AluSz6_dup11936 | Uniquely | No | — | — | SINE | Alu | chr4: 176919301-176919606 | − | 56 | 306 | GPM6A | Proximal | 0 | Not documented | 27 |
| AluSx_dup29935 | Multi | No | — | — | SINE | Alu | chr4: 1813536-1813663 | + | 40 | 128 | LETM1 | Proximal | 0 | Not documented | 28 |
| AluY_dup26034 | Multi | No | — | — | SINE | Alu | chr4: 1813664-1813942 | + | 39 | 279 | LETM1 | Proximal | 0 | Not documented | 29 |
| AluSx3_dup7802 | Uniquely | No | — | — | SINE | Alu | chr4: 186433245-186433534 | − | 49 | 290 | PDLIM3 | Proximal | 0 | Not documented | 30 |
| Tigger5_dup777 | Multi | No | — | — | DNA | DNA | chr4: 189660917-189660988 | + | 110 | 72 | TRIML1 | Distal | 592021 | Not documented | 31 |
| MER47C_dup236 | Multi | No | — | — | DNA | DNA | chr4: 189661003-189661086 | − | 92 | 84 | TRIML1 | Distal | 592107 | Not documented | 32 |
| LTR41B_dup301 | Multi | No | — | — | LTR | ERVL | chr4: 189661266-189661534 | − | 100 | 269 | TRIML1 | Distal | 592370 | Not documented | 33 |
| MLT2D_dup1415 | Multi | No | — | — | LTR | ERVL | chr4: 189661660-189661973 | − | 120 | 314 | TRIML1 | Distal | 592764 | Not documented | 34 |
| MER20_dup3879 | Uniquely | No | — | — | DNA | DNA | chr4: 25124851-25125051 | − | 68 | 201 | SEPSECS | Proximal | 0 | Not documented | 35 |
| AluSz_dup21691 | Multi | No | — | — | SINE | Alu | chr4: 39552527-39552829 | − | 46 | 303 | SMIM14 | Proximal | 0 | Not documented | 36 |
| FLAM_A_dup3850 | Multi | No | — | — | SINE | Alu | chr4: 4237871-4238001 | + | 62 | 131 | TMEM128 | Proximal | 0 | Not documented | 37 |
| AluSp_dup10887 | Multi | No | — | — | SINE | Alu | chr4: 434448-434754 | − | 49 | 307 | ZNF721 | Proximal | 0 | Not documented | 38 |
| L2b_dup24080 | Multi | No | — | — | LINE | L2 | chr4: 4461207-4461416 | − | 160 | 210 | STX18 | Proximal | 0 | Not documented | 39 |
| L2_dup14066 | Multi | No | — | — | LINE | L2 | chr4: 45332652-45333173 | − | 140 | 522 | GNPDA2 | Distal | 604041 | Not documented | 40 |
| L1PA6_dup1452 | Multi | No | — | — | LINE | L1PA\|B\|x | chr4: 46726622-46727888 | − | 37 | 1267 | COX7B2 | Distal | 8957 | Not documented | 41 |
| L1HS_dup376 | Multi | No | — | — | LINE | L1PA\|B\|x | chr4: 46798328-46799122 | + | 1.8 | 795 | COX7B2 | Proximal | 0 | EVE annotated | 42 |
| L1ME1_dup7598 | Uniquely | No | — | — | LINE | Other L1 | chr4: 4740714-4741673 | + | 100 | 960 | MSX1 | Distal | 119721 | Not documented | 43 |
| MIR3_dup23027 | Multi/ | No | — | — | SINE | MIR | chr4: 4865049-4865196 | − | 130 | 148 | MSX1 | Proximal | 0 | Not documented | 44 |
| | Uniquely | | | | | | | | | | | | | | |
| CER_dup10 | Multi | No | — | — | Other | Other | chr4: 49198848-49202172 | − | 47 | 3325 | CWH43 | Distal | 134751 | Not documented | 45 |
| | | | | | | Repeats | | | | | | | | | |
| CER_dup11 | Multi | No | — | — | Other | Other | chr4: 49594334-49601946 | + | 49 | 7613 | CWH43 | Distal | 530237 | Not documented | 46 |
| | | | | | | Repeats | | | | | | | | | |
| MIRb_dup59856 | Multi | No | — | — | SINE | MIR | chr4: 52889197-52889470 | + | 120 | 274 | SGCB | Proximal | 0 | Not documented | 47 |
| MIR_dup45248 | Multi | No | — | — | SINE | MIR | chr4: 53579898-53579929 | − | 110 | 32 | ERVMER34-1 | Distal | 8857 | Not documented | 48 |
| LTR21A_dup22 | Multi | No | — | — | LTR | ERV1 | chr4: 53579930-53580342 | + | 96 | 413 | ERVMER34-1 | Distal | 8444 | Not documented | 49 |
| L2a_dup44366 | Multi | No | — | — | LINE | L2 | chr4: 57326029-57326059 | + | 140 | 31 | PAICS | Proximal | 0 | Not documented | 3450 |
| AluJb_dup33570 | Multi/ | No | — | — | SINE | Alu | chr4: 57326060-57326349 | − | 88 | 290 | PAICS | Proximal | 0 | Not documented | 51 |
| | Uniquely | | | | | | | | | | | | | | |
| L2a_dup44367 | Multi | No | — | — | LINE | L2 | chr4: 57326350-57326596 | + | 140 | 247 | PAICS | Proximal | 0 | Not documented | 52 |
| Charlie4z_dup1561 | Multi | No | — | — | DNA | DNA | chr4: 57326705-57326844 | − | 120 | 140 | PAICS | Proximal | 0 | Not documented | 53 |
| AluSx1_dup24171 | Multi/ | No | — | — | SINE | Alu | chr4: 57326856-57327154 | + | 58 | 299 | PAICS | Proximal | 0 | Not documented | 54 |
| | Uniquely | | | | | | | | | | | | | | |
| MIR3_dup24485 | Uniquely | No | — | — | SINE | MIR | chr4: 57523903-57524017 | − | 160 | 115 | HOPX | Proximal | 0 | Not documented | 55 |
| THE1B-int_dup1110 | Uniquely | No | — | — | LTR | ERVL- | chr4: 62188050-62189600 | − | 47 | 1551 | LPHN3 | Proximal | 0 | Not documented | 56 |
| | | | | | | MaLR | | | | | | | | | |
| Tigger1_dup3073 | Multi | No | — | — | DNA | DNA | chr4: 62216180-62217970 | + | 64 | 1791 | LPHN3 | Proximal | 0 | Not documented | 57 |
| FLAM_A_dup3862 | Multi | No | — | — | SINE | Alu | chr4: 6718785-6718898 | − | 68 | 114 | BLOC154 | Proximal | 0 | Not documented | 58 |
| L1PA16_dup3061 | Uniquely | No | — | — | LINE | L1PA\|B\|x | chr4: 6820192-6821998 | + | 58 | 1807 | KIAA0232 | Proximal | 0 | Not documented | 59 |
| MER41B_dup630 | Uniquely | No | — | — | LTR | ERV1 | chr4: 68587380-68588008 | − | 44 | 629 | GNRHR | Dista | 17039 | Not documented | 60 |
| L4_dup4369 | Multi | No | — | — | LINE | RTE | chr4: 69698174-69698216 | + | 74 | 43 | UGT2B10 | Proximal | 1261 | Not documented | 61 |
| MSTA_dup4794 | Multi | No | — | — | LTR | ERVL- | chr4: 70040876-70041168 | − | 91 | 293 | UGT2B11 | Distal | 24502 | Not documented | 62 |
| | | | | | | MaLR | | | | | | | | | |
| L1PA5_dup2724 | Multi | No | — | — | LINE | L1PA\|B\|x | chr4: 70041769-70043973 | + | 32 | 2205 | UGT2B11 | Distal | 21697 | Not documented | 63 |
| HERV30-int_dup13 | Multi | No | — | — | LTR | ERV1 | chr4: 70136781-70137681 | + | 54 | 901 | UGT2B28 | Distal | 8537 | Not documented | 64 |
| L1MA10_dup1127 | Multi | No | — | — | LINE | Other L1 | chr4: 70236575-70237009 | + | 90 | 435 | UGT2B28 | Distal | 75808 | Not documented | 65 |
| HERV30-int_dup15 | Multi | No | — | — | LTR | ERV1 | chr4: 70245761-70246661 | + | 49 | 901 | UGT2B28 | Distal | 84994 | Not documented | 66 |
| LTR16A_dup1835 | Multi | No | — | — | LTR | ERVL | chr4: 70252189-70252482 | − | 160 | 294 | UGT2B28 | Distal | 91422 | Not documented | 67 |
| MER57-int_dup353 | Multi | No | — | — | LTR | ERV1 | chr4: 70331213-70331838 | + | 76 | 626 | UGT2B4 | Distal | 14046 | Not documented | 68 |
| MER52D_dup184 | Multi | No | — | — | LTR | ERV1 | chr4: 70386011-70387496 | + | 110 | 1486 | UGT2B4 | Proximal | 0 | Not documented | 69 |
| LTR12C_dup702 | Multi | No | — | — | LTR | ERV1 | chr4: 70440959-70442539 | − | 66 | 1581 | UGT2A2 | Distal | 11597 | Not documented | 70 |
| L1PBa_dup565 | Multi | No | — | — | LINE | L1PA\|B\|x | chr4: 70524197-70526436 | + | 75 | 2240 | UGT2A1 | Distal | 5233 | Not documented | 71 |
| HERV9-int_dup260 | Multi | No | — | — | LTR | ERV1 | chr4: 70691144-70693912 | + | 34 | 2769 | SULT1E1 | Proximal | 0 | EVE annotated | 72 |
| L1MC2_dup1493 | Multi | No | — | — | LINE | Other L1 | chr4: 70755549-70756508 | + | 84 | 960 | SULT1E1 | Distal | 29680 | Not documented | 73 |
| MLT1E1_dup280 | Multi | No | — | — | LTR | ERVL- | chr4: 71232234-71232290 | − | 81 | 57 | SMR3A | Proximal | 0 | Not documented | 74 |
| | | | | | | MaLR | | | | | | | | | |
| MLT1E_dup205 | Multi | No | — | — | LTR | ERVL- | chr4: 71255254-71255310 | − | 65 | 57 | SMR3B | Proximal | 0 | Not documented | 3475 |
| | | | | | | MaLR | | | | | | | | | |
| L2a_dup45216 | Multi | No | — | — | LINE | L2 | chr4: 71629319-71629375 | − | 84 | 57 | RUFY3 | Proximal | 0 | Not documented | 76 |
| AluJo_dup16283 | Uniquely | No | — | — | SINE | Alu | chr4: 71663812-71664106 | + | 66 | 295 | RUFY3 | Proximal | 0 | Not documented | 77 |
| AluSx1_dup24430 | Multi | No | — | — | SINE | Alu | chr4: 71664586-71664891 | + | 45 | 306 | RUFY3 | Proximal | 0 | Not documented | 78 |
| MLT1J1-int_dup158 | Uniquely | No | — | — | LTR | ERVL- | chr4: 74127529-74128787 | + | 140 | 1259 | ANKRD17 | Dista | 3015 | Not documented | 79 |
| | | | | | | MaLR | | | | | | | | | |
| L1PA7_dup3264 | Uniquely | No | — | — | LINE | L1PA\|B\|x | chr4: 77398829-77405306 | + | 36 | 6478 | SHROOM3 | Proximal | 0 | EVE annotated | 80 |
| AluSz_dup22678 | Multi | No | — | — | SINE | Alu | chr4: 77958233-77958527 | + | 59 | 295 | sept-11 | Proximal | 0 | Not documented | 81 |
| AluSq2_dup12853 | Multi/ | No | — | — | SINE | Alu | chr4: 83707671-83707967 | + | 49 | 297 | SCD5 | Proximal | 0 | Not documented | 82 |
| | Uniquely | | | | | | | | | | | | | | |
| HSMAR2_dup425 | Multi | No | — | — | DNA | DNA | chr4: 83814862-83816115 | − | 50 | 1254 | SEC31A | Proximal | 0 | Not documented | 83 |
| AluSq2_dup12915 | Multi | No | — | — | SINE | Alu | chr4: 87359561-87359860 | + | 50 | 300 | MAPK10 | Proximal | 0 | Not documented | 84 |
| AluSx1_dup22571 | Multi | No | — | — | SINE | Alu | chr4: 950232-950531 | − | 44 | 300 | TMEM175 | Proximal | 0 | Not documented | 85 |
| AluSx_dup33047 | Multi | No | — | — | SINE | Alu | chr4: 95585739-95586030 | + | 42 | 292 | PDLIM5 | Proximal | 0 | Not documented | 86 |
| AluSc_dup8454 | Multi | No | — | — | SINE | Alu | chr4: 95586353-95586657 | + | 43 | 305 | PDLIM5 | Proximal | 0 | Not documented | 87 |
| MER2_dup2442 | Multi | No | — | — | DNA | DNA | chr4: 95588452-95588786 | + | 64 | 335 | PDLIM5 | Proximal | 0 | Not documented | 88 |
| L1MB2_dup2017 | Multi | No | — | — | LINE | Other L1 | chr4: 99812474-99812953 | + | 80 | 480 | EIF4E | Proximal | 0 | Not documented | 89 |
| L1ME3C_dup3233 | Multi | No | — | — | LINE | Other L1 | chr4: 99992136-99992861 | + | 100 | 726 | ADH5 | Proximal | 0 | Not documented | 90 |
| L2c_dup40961 | Multi | No | — | — | LINE | L2 | chr4: 99992986-99993090 | − | 140 | 105 | ADH5 | Proximal | 0 | Not documented | 91 |
| AluSz_dup25269 | Uniquely | No | — | — | SINE | Alu | chr5: 10279657-10279951 | − | 37 | 295 | CMBL | Proximal | 0 | Not documented | 92 |
| AluSx_dup36018 | Multi | No | — | — | SINE | Alu | chr5: 10435811-10436129 | − | 50 | 319 | MARCH6 | Proximal | 0 | Not documented | 93 |
| AluSq2_dup15651 | Multi | No | — | — | SINE | Alu | chr5: 108679515-108679821 | + | 40 | 307 | PJA2 | Proximal | 0 | Not documented | 94 |
| Charlie7_dup1334 | Multi | No | — | — | DNA | DNA | chr5: 108718863-108719345 | + | 130 | 483 | PJA2 | Proximal | 0 | Not documented | 95 |
| L1ME1_dup10367 | Multi | No | — | — | LINE | Other L1 | chr5: 108737589-108739491 | + | 110 | 1903 | PJA2 | Proximal | 0 | Not documented | 96 |
| L1M4c_dup1586 | Multi | No | — | — | LINE | Other L1 | chr5: 11029278-11031636 | − | 73 | 2359 | CTNND2 | Proximal | 0 | Not documented | 97 |
| L3b_dup2417 | Multi | No | — | — | LINE | CR1 | chr5: 110464277-110464336 | + | 110 | 60 | WDR36 | Proximal | 0 | Not documented | 98 |
| L1M5_dup20574 | Multi/ | No | — | — | LINE | Other L1 | chr5: 110464832-110465421 | − | 120 | 590 | WDR36 | Proximal | 0 | Not documented | 99 |
| | Uniquely | | | | | | | | | | | | | | |
| L2a_dup52864 | Uniquely | No | — | — | LINE | L2 | chr5: 11077246-11078295 | − | 130 | 1050 | CTNND2 | Proximal | 0 | Not documented | 3500 |
| L1MEc_dup5776 | Uniquely | No | — | — | LINE | Other L1 | chr5: 11090915-11092389 | − | 95 | 1475 | CTNND2 | Proximal | 0 | Not documented | 1 |
| MLT1E2-int_dup39 | Uniquely | No | — | — | LTR | ERVL- | chr5: 11127676-11128055 | + | 110 | 380 | CTNND2 | Proximal | 0 | Not documented | 2 |
| | | | | | | MaLR | | | | | | | | | |
| MLT1E2_dup1163 | Uniquely | No | — | — | LTR | ERVL- | chr5: 11134013-11134632 | + | 120 | 620 | CTNND2 | Proximal | 0 | Not documented | 3 |
| | | | | | | MaLR | | | | | | | | | |
| MSTD_dup2423 | Uniquely | No | — | — | LTR | ERVL- | chr5: 11141918-11142295 | + | 72 | 378 | CTNND2 | Proximal | 0 | Not documented | 4 |
| | | | | | | MaLR | | | | | | | | | |
| MLT1C_dup5475 | Uniquely | No | — | — | LTR | ERVL- | chr5: 11143388-11143836 | − | 80 | 449 | CTNND2 | Proximal | 0 | Not documented | 5 |
| | | | | | | MaLR | | | | | | | | | |
| MIRb_dup72728 | Multi | No | — | — | SINE | MIR | chr5: 112105335-112105494 | + | 160 | 160 | APC | Proximal | 0 | Not documented | 6 |
| X5A_LINE_dup57 | Multi | No | — | — | LINE | CR1 | chr5: 112177303-112177355 | − | 80 | 53 | CTC-554D6.1 | Proximal | 0 | Not documented | 7 |
| AluSx1_dup30100 | Multi | No | — | — | SINE | Alu | chr5: 112361043-112361307 | + | 41 | 265 | MCC | Proximal | 0 | Not documented | 8 |
| AluSg_dup12048 | Uniquely | No | — | — | SINE | Alu | chr5: 112436162-112436467 | − | 48 | 306 | MCC | Proximal | 0 | Not documented | 9 |
| LTR54B_dup246 | Uniquely | No | — | — | LTR | ERV1 | chr5: 11262190-11262592 | + | 90 | 403 | CTNND2 | Proximal | 0 | Not documented | 10 |
| AluY_dup32498 | Multi | No | — | — | SINE | Alu | chr5: 11262593-11262903 | + | 28 | 311 | CTNND2 | Proximal | 0 | Not documented | 11 |
| AluSg_dup11014 | Multi | No | — | — | SINE | AIL | chr5: 11283506-11283815 | + | 45 | 310 | CTNND2 | Proximal | 0 | Not documented | 12 |
| L1PA10_dup2034 | Uniquely | No | — | — | LINE | L1PA\|B\|x | chr5: 11284378-11284914 | − | 40 | 537 | CTNND2 | Proximal | 0 | Not documented | 13 |
| L1MC3_dup4223 | Uniquely | No | — | — | LINE | Other L1 | chr5: 113764359-113768196 | − | 75 | 3838 | KCNN2 | Proximal | 0 | Not documented | 14 |
| L2a_dup52897 | Uniquely | No | — | — | LINE | L2 | chr5: 11393924-11394471 | + | 120 | 548 | CTNND2 | Proximal | 0 | Not documented | 15 |
| L1MC4a_dup8635 | Multi | No | — | — | LINE | Other L1 | chr5: 114877166-114877462 | + | 120 | 297 | FEM1C | Proximal | 0 | Not documented | 16 |
| AluJr4_dup5614 | Multi | No | — | — | SINE | Alu | chr5: 115166243-115166513 | − | 99 | 271 | ATG12 | Proximal | 0 | Not documented | 17 |
| HAL1_dup8383 | Uniquely | No | — | — | LINE | Other L1 | chr5: 11570151-11571896 | − | 130 | 1746 | CTNND2 | Proximal | 0 | Not documented | 18 |
| L2_dup19390 | Multi | No | — | — | LINE | L2 | chr5: 115831980-115832027 | + | 150 | 48 | SEMA6A | Proximal | 0 | Not documented | 19 |
| L2a_dup58248 | Uniquely | No | — | — | LINE | L2 | chr5: 115904675-115905678 | − | 120 | 1004 | SEMA6A | Proximal | 0 | Not documented | 20 |
| L1PA15_dup2343 | Uniquely | No | — | — | LINE | L1PA\|B\|x | chr5: 11751343-11756192 | − | 67 | 4850 | CTNND2 | Proximal | 0 | Not documented | 21 |
| HERVH-int_dup2235 | Uniquely | No | — | — | LTR | ERV1 | chr5: 118284314-118285623 | − | 61 | 1310 | DTWD2 | Proximal | 0 | EVE annotated | 22 |
| MamRep137_dup792 | Multi | No | — | — | DNA | DNA | chr5: 122344032-122344421 | + | 120 | 390 | SNX24 | Proximal | 0 | Not documented | 23 |
| MIRb_dup73377 | Uniquely | No | — | — | SINE | MIR | chr5: 124043741-124043850 | − | 160 | 110 | ZNF608 | Proximal | 0 | Not documented | 24 |
| MIRb_dup73378 | Multi/ | No | — | — | SINE | MIR | chr5: 124043948-124044097 | − | 120 | 150 | ZNF608 | Proximal | 0 | Not documented | 3525 |
| | Uniquely | | | | | | | | | | | | | | |
| AluSx_dup39421 | Multi/ | No | — | — | SINE | Alu | chr5: 124044583-124044891 | + | 40 | 309 | ZNF608 | Proximal | 0 | Not documented | 26 |
| | Uniquely | | | | | | | | | | | | | | |
| HAL1_dup9468 | Multi/ | No | — | — | LINE | Other L1 | chr5: 125879104-125879355 | − | 130 | 252 | ALDH7A1 | Proximal | 0 | Not documented | 27 |
| | Uniquely | | | | | | | | | | | | | | |
| AluSx1_dup30361 | Multi/ | No | — | — | SINE | Alu | chr5: 125879657-125879950 | − | 59 | 294 | ALDH7A1 | Proximal | 0 | Not documented | 28 |
| | Uniquely | | | | | | | | | | | | | | |
| AluSp_dup14573 | Multi/ | No | — | — | SINE | Alu | chr5: 125930131-125930435 | − | 27 | 305 | ALDH7A1 | Proximal | 0 | Not documented | 29 |
| | Uniquely | | | | | | | | | | | | | | |
| AluSg_dup12210 | Multi | No | — | — | SINE | Alu | chr5: 130536730-130537035 | + | 40 | 306 | LYRM7 | Proximal | 0 | Not documented | 30 |
| LTR12_dup267 | Uniquely | No | — | — | LTR | ERV1 | chr5: 130822718-130823426 | − | 40 | 709 | RAPGEF6 | Proximal | 0 | Not documented | 31 |
| MIRc_dup34669 | Uniquely | No | — | — | SINE | MIR | chr5: 131807294-131807486 | + | 110 | 193 | C5orf56 | Proximal | 0 | Not documented | 32 |
| AluSq2_dup15900 | Multi | No | — | — | SINE | Alu | chr5: 131818356-131818633 | − | 34 | 278 | IRF1 | Proximal | 0 | Not documented | 33 |
| MER94_dup1749 | Multi | No | — | — | DNA | DNA | chr5: 132091961-132092088 | + | 100 | 128 | sept-08 | Proximal | 0 | Not documented | 34 |
| Arthur1A_dup418 | Multi/ | No | — | — | DNA | DNA | chr5: 132092787-132092938 | + | 90 | 152 | sept-08 | Proximal | 0 | Not documented | 35 |
| | Uniquely | | | | | | | | | | | | | | |
| AluY_dup36339 | Multi | No | — | — | SINE | Alu | chr5: 132158044-132158353 | − | 16 | 310 | SHROOM1 | Proximal | 0 | Not documented | 36 |
| MIRb_dup73853 | Multi | No | — | — | SINE | MIR | chr5: 132202799-132202951 | − | 140 | 153 | UQCRQ | Proximal | 0 | Not documented | 37 |
| L1MB7_dup6868 | Multi | No | — | — | LINE | Other L1 | chr5: 132203035-132203097 | + | 87 | 63 | UQCRQ | Proximal | 0 | Not documented | 38 |
| AluJo_dup20196 | Multi | No | — | — | SINE | Alu | chr5: 133738228-133738341 | + | 88 | 114 | CDKN2AIPNL | Proximal | 0 | Not documented | 39 |
| AluSz_dup28055 | Multi | Nc | — | — | SINE | Alu | chr5: 133937455-133937751 | + | 57 | 297 | SAR1B | Proximal | 0 | Not documented | 40 |
| AluSx_dup39889 | Multi | No | — | — | SINE | Alu | chr5: 133938287-133938598 | + | 58 | 312 | SAR1B | Proximal | 0 | Not documented | 41 |
| AluJb_dup42378 | Multi/ | No | — | — | SINE | Alu | chr5: 137805158-137805351 | − | 82 | 194 | EGR1 | Proximal | 155 | Not documented | 42 |
| | Uniquely | | | | | | | | | | | | | | |
| MER77B_dup440 | Multi | No | — | — | LTR | ERVL | chr5: 137805452-137805488 | − | 74 | 37 | EGR1 | Proximal | 449 | Not documented | 43 |
| L2c_dup49711 | Multi | No | — | — | LINE | L2 | chr5: 137806011-137806181 | − | 130 | 171 | EGR1 | Proximal | 1008 | Not documented | 44 |
| MLT1L_dup4195 | Multi | No | — | — | LTR | ERVL- | chr5: 137890535-137890700 | + | 120 | 166 | HSPA9 | Proximal | 0 | Not documented | 45 |
| | | | | | | MaLR | | | | | | | | | |
| Charlie7a_dup537 | Multi/ | No | — | — | DNA | DNA | chr5: 139223883-139224080 | − | 69 | 198 | PSD2 | Proximal | 0 | Not documented | 46 |
| | Uniquely | | | | | | | | | | | | | | |
| L1PB1_dup3978 | Uniquely | No | — | — | LINE | L1PA\|B\|x | chr5: 13967758-13972974 | − | 41 | 5217 | DNAH5 | Distal | 23107 | EVE annotated | 47 |
| AluJb_dup42703 | Multi | No | — | — | SINE | Alu | chr5: 140564974-140565273 | − | 76 | 300 | PCDHB16 | Proximal | 0 | Not documented | 48 |
| AluSc_dup10676 | Multi | No | — | — | SINE | Alu | chr5: 140569740-140570047 | − | 38 | 308 | PCDHB10 | Proximal | 1896 | Not documented | 49 |
| L1MC5_dup6557 | Multi | No | — | — | LINE | Other L1 | chr5: 140605692-140605736 | + | 31 | 45 | PCDHB14 | Proximal | 0 | Not documented | 3550 |
| AluSp_dup14948 | Multi | No | — | — | SINE | Alu | chr5: 140761361-140761694 | − | 30 | 334 | PCDHGA6 | Proximal | 0 | Not documented | 51 |
| AluJr_dup21879 | Multi/ | No | — | — | SINE | Alu | chr5: 140859717-140859992 | + | 76 | 276 | PCDHGC3 | Proximal | 0 | Not documented | 52 |
| | Uniquely | | | | | | | | | | | | | | |
| AluY_dup36782 | Uniquely | No | — | — | SINE | Alu | chr5: 140879752-140880075 | − | 25 | 324 | PCDHGC5 | Proximal | 0 | Not documented | 53 |
| L3_dup14035 | Uniquely | No | — | — | LINE | CR1 | chr5: 14146591-14146873 | + | 140 | 283 | TRIO | Proximal | 0 | Not documented | 54 |
| Tigger8_dup323 | Multi/ | No | — | — | DNA | DNA | chr5: 141532481-141533048 | − | 120 | 568 | NDFIP1 | Proximal | 0 | Not documented | 55 |
| | Uniquely | | | | | | | | | | | | | | |
| MIRb_dup74878 | Multi | No | — | — | SINE | MIR | chr5: 141690510-141690612 | + | 130 | 103 | SPRY4 | Proximal | 0 | Not documented | 56 |
| AluSx_dup36120 | Uniquely | No | — | — | SINE | Alu | chr5: 14173300-14173620 | − | 58 | 321 | TRIO | Proximal | 0 | Not documented | 57 |
| L1MC4_dup8534 | Uniquely | No | — | — | LINE | Other L1 | chr5: 14194892-14195959 | − | 110 | 1068 | TRIO | Proximal | 0 | Not documented | 58 |
| L2b_dup32774 | Multi/ | No | — | — | LINE | L2 | chr5: 141972535-141972596 | + | 120 | 62 | FGF1 | Proximal | 0 | Not documented | 59 |
| | Uniquely | | | | | | | | | | | | | | |
| MER5A1_dup5344 | Multi/ | No | — | — | DNA | DNA | chr5: 141973758-141973926 | + | 110 | 169 | FGF1 | Proximal | 0 | Not documented | 60 |
| | Uniquely | | | | | | | | | | | | | | |
| LTR40a_dup636 | Uniquely | No | — | — | LTR | ERVL | chr5: 14197697-14198197 | − | 93 | 501 | TRIO | Proximal | 0 | Not documented | 61 |
| MIR3_dup27356 | Uniquely | No | — | — | SINE | MIR | chr5: 14198502-14198575 | − | 120 | 74 | TRIO | Proximal | 0 | Not documented | 62 |
| AluSx1_dup27645 | Multi | No | — | — | SINE | Alu | chr5: 14199065-14199328 | + | 55 | 264 | TRIO | Proximal | 0 | Not documented | 63 |
| L2b_dup29528 | Uniquely | No | — | — | LINE | L2 | chr5: 14200354-14200672 | + | 140 | 319 | TRIO | Proximal | 0 | Not documented | 64 |
| AluSc_dup10724 | Multi | No | — | — | SINE | Alu | chr5: 142713053-142713365 | + | 40 | 313 | NR3C1 | Proximal | 0 | Not documented | 65 |
| AluY_dup36914 | Multi | No | — | — | SINE | Alu | chr5: 143539271-143539571 | − | 26 | 301 | YIPF5 | Proximal | 0 | Not documented | 66 |
| MER5A_dup10367 | Multi | Nc | — | — | DNA | DNA | chr5: 14482379-14482415 | − | 61 | 37 | TRIO | Proximal | 0 | Not documented | 67 |
| L2a_dup53071 | Uniquely | No | — | — | LINE | L2 | chr5: 14483249-14483387 | − | 140 | 139 | TRIO | Proximal | 0 | Not documented | 68 |
| THE1A-int_dup571 | Uniquely | No | — | — | LTR | ERVL- | chr5: 146108493-146110046 | + | 41 | 1554 | PPP2R2B | Proximal | 0 | Not documented | 69 |
| | | | | | | MaLR | | | | | | | | | |
| L2b_dup33009 | Uniquely | No | — | — | LINE | L2 | chr5: 146233378-146233696 | + | 160 | 319 | PPP2R2B | Proximal | 0 | Not documented | 70 |
| L1MDa_dup2166 | Uniquely | No | — | — | LINE | Other L1 | chr5: 146361639-146362739 | − | 75 | 1101 | PPP2R2B | Proximal | 0 | Not documented | 71 |
| L1MA7_dup2695 | Uniquely | No | — | — | LINE | Other L1 | chr5: 146363512-146364571 | − | 75 | 1060 | PPP2R2B | Proximal | 0 | Not documented | 72 |
| L1PA8_dup2768 | Uniquely | No | — | — | LINE | L1PA\|B\|x | chr5: 147036874-147039060 | − | 74 | 2187 | JAKMIP2 | Proximal | 0 | Not documented | 73 |
| AluYc_dup2686 | Uniquely | No | — | — | SINE | Alu | chr5: 148726289-148726587 | − | 10 | 299 | GRPEL2 | Proximal | 0 | Not documented | 74 |
| MIRc_dup35587 | Multi | No | — | — | SINE | MIR | chr5: 150175269-150175492 | + | 110 | 224 | AC010441.1 | Proximal | 0 | Not documented | 3575 |
| MER3_dup3701 | Multi/ | No | — | — | DNA | DNA | chr5: 151041243-151041447 | + | 98 | 205 | SPARC | Proximal | 0 | Not documented | 76 |
| | Uniquely | | | | | | | | | | | | | | |
| L2a_dup60826 | Multi/ | No | — | — | LINE | L2 | chr5: 151041507-151041675 | + | 140 | 169 | SPARC | Proximal | 0 | Not documented | 77 |
| | Uniquely | | | | | | | | | | | | | | |
| X8_LINE_dup104 | Multi | No | — | — | LINE | CR1 | chr5: 154255650-154255706 | + | 100 | 57 | CNOT8 | Proximal | 0 | Not documented | 78 |
| L2c_dup44889 | Uniquely | No | — | — | LINE | L2 | chr5: 15576905-15577054 | + | 140 | 150 | FBXL7 | Proximal | 0 | Not documented | 79 |
| LTR5_Hs_dup207 | Multi | No | — | — | LTR | ERVK | chr5: 156092929-156093896 | − | 4.1 | 968 | SGCD | Proximal | 0 | EVE annotated | 80 |
| AluSz_dup28813 | Uniquely | No | — | — | SINE | Alu | chr5: 156323837-156324161 | + | 48 | 325 | TIMD4 | Distal | 22133 | Not documented | 81 |
| AluSc_dup10854 | Uniquely | No | — | — | SINE | Alu | chr5: 156402621-156402912 | − | 42 | 292 | TIMD4 | Distal | 12356 | Not documented | 82 |
| AluSx_dup36189 | Multi | No | — | — | SINE | Alu | chr5: 15709367-15709665 | + | 50 | 299 | FBXL7 | Proximal | 0 | Not documented | 83 |
| FAM_dup1753 | Multi | No | — | — | SINE | Alu | chr5: 159829407-159829542 | + | 90 | 136 | SLU7 | Proximal | 0 | Not documented | 84 |
| AluJo_dup18275 | Multi/ | No | — | — | SINE | Alu | chr5: 1629202-1629272 | + | 64 | 71 | LPCAT1 | Distal | 105111 | Not documented | 85 |
| | Uniquely | | | | | | | | | | | | | | |
| AluJb_dup37858 | Multi | No | — | — | SINE | Alu | chr5: 1629514-1629717 | − | 74 | 204 | LPCAT1 | Distal | 105423 | Not documented | 86 |
| L1MC1_dup4948 | Multi | No | — | — | LINE | Other L1 | chr5: 170310273-170311239 | − | 60 | 967 | RANBP17 | Proximal | 0 | Not documented | 87 |
| MIRb_dup79266 | Uniquely | No | — | — | SINE | MIR | chr5: 171762421-171762621 | + | 150 | 201 | SH3PXD2B | Proximal | 0 | Not documented | 88 |
| AluSg4_dup2333 | Multi | No | — | — | SINE | Alu | chr5: 174306184-174306489 | − | 46 | 306 | MSX2 | Distal | 148289 | Not documented | 89 |
| HUERS-P1- | Multi | No | — | — | LTR | ERV1 | chr5: 174319008-174320162 | + | 60 | 1155 | MSX2 | Distal | 161113 | Not documented | 90 |
| int_dup183 | | | | | | | | | | | | | | | |
| AluYc3_dup182 | Multi | No | — | — | SINE | Alu | chr5: 174954919-174955211 | − | 19 | 293 | SFXN1 | Proximal | 0 | Not documented | 91 |
| MER2_dup3306 | Multi/ | No | — | — | DNA | DNA | chr5: 174955212-174955483 | + | 80 | 272 | SFXN1 | Proximal | 0 | Not documented | 92 |
| | Uniquely | | | | | | | | | | | | | | |
| AluSx1_dup32247 | Multi | No | — | — | SINE | Alu | chr5: 175774195-175774502 | − | 52 | 308 | KIAA1191 | Proximal | 0 | Not documented | 93 |
| MIR_dup63091 | Multi | No | — | — | SINE | MIR | chr5: 176733741-176733813 | − | 110 | 73 | PRELID1 | Proximal | 0 | Not documented | 94 |
| L2a_dup62947 | Multi | No | — | — | LINE | L2 | chr5: 176733849-176733947 | + | 74 | 99 | PRELID1 | Proximal | 0 | Not documented | 95 |
| L3_dup16510 | Multi | No | — | — | LINE | CR1 | chr5: 176942628-176942828 | − | 150 | 201 | DDX41 | Proximal | 0 | Not documented | 96 |
| HAL1-2a_MD_dup356 | Multi | No | — | — | LINE | Other L1 | chr5: 179132658-179132812 | − | 120 | 155 | CANX | Proximal | 0 | Not documented | 97 |
| L2_dup20431 | Multi | No | — | — | LINE | L2 | chr5: 179156477-179156554 | + | 150 | 78 | CANX | Proximal | 0 | Not documented | 98 |
| MER61B_dup151 | Multi | No | — | — | LTR | ERV1 | chr5: 179238359-179238651 | + | 80 | 293 | SQSTM1 | Proximal | 0 | Not documented | 99 |
| MER61-int_dup409 | Multi | No | — | — | LTR | ERV1 | chr5: 179238653-179238836 | + | 73 | 184 | SQSTM1 | Proximal | 0 | Not documented | 3600 |
| MER67A_dup186 | Multi | No | — | — | LTR | ERV1 | chr5: 180258010-180258181 | − | 130 | 172 | MGAT1 | Distal | 15359 | Not documented | 1 |
| AluSq2_dup16922 | Multi | No | — | — | SINE | Alu | chr5: 180258416-180258530 | − | 47 | 115 | MGAT1 | Distal | 15765 | Not documented | 2 |
| FLAM_C_dup6874 | Multi | No | — | — | SINE | Alu | chr5: 180621260-180621390 | + | 76 | 131 | TRIM7 | Proximal | 0 | Not documented | 3 |
| AluJr_dup22800 | Multi | No | — | — | SINE | Alu | chr5: 180664118-180664259 | − | 93 | 142 | GNB2L1 | Proximal | 0 | Not documented | 4 |
| MER112_dup1653 | Multi/ | No | — | — | DNA | DNA | chr5: 180690484-180690680 | − | 120 | 197 | TRIM52 | Distal | 2366 | Not documented | 5 |
| | Uniquely | | | | | | | | | | | | | | |
| L1HS_dup516 | Multi | No | — | — | LINE | L1PA\|B\|x | chr5: 24370616-24371578 | − | 23 | 963 | CDH10 | Distal | 115632 | EVE annotated | 6 |
| MER63A_dup1085 | Uniquely | No | — | — | DNA | DNA | chr5: 24571842-24572038 | − | 100 | 197 | CDH10 | Proximal | 0 | Not documented | 7 |
| AluJb_dup37826 | Multi | No | — | — | SINE | Alu | chr5: 276155-276358 | + | 71 | 204 | PDCD6 | Proximal | 0 | Not documented | 8 |
| HERVK-int_dup75 | Multi | No | — | — | LTR | ERVK | chr5: 30487720-30495254 | − | 7.3 | 7535 | CDH6 | Distal | 698604 | EVE annotated | 9 |
| L2c_dup45214 | Multi | No | — | — | LINE | L2 | chr5: 31530775-31531061 | + | 140 | 287 | DROSHA | Proximal | 0 | Not documented | 10 |
| FLAM_C_dup5930 | Multi | No | — | — | SINE | Alu | chr5: 31553566-31553710 | − | 63 | 145 | C5orf22 | Proximal | 0 | Not documented | 11 |
| MER57B2_dup274 | Multi | No | — | — | LTR | ERV1 | chr5: 32602884-32602920 | − | 49 | 37 | SUB1 | Proximal | 0 | Not documented | 12 |
| AluSx3_dup8129 | Multi/ | No | — | — | SINE | AIL | chr5: 36193299-36193600 | + | 45 | 302 | NADK2 | Proximal | 0 | Not documented | 13 |
| | Uniquely | | | | | | | | | | | | | | |
| L2a_dup54171 | Multi/ | No | — | — | LINE | L2 | chr5: 36193935-36194053 | + | 130 | 119 | NADK2 | Proximal | 0 | Not documented | 14 |
| | Uniquely | | | | | | | | | | | | | | |
| L2c_dup45422 | Uniquely | No | — | — | LINE | L2 | chr5: 36223603-36224030 | − | 160 | 428 | NADK2 | Proximal | 0 | Not documented | 15 |
| MIR_dup54256 | Multi | No | — | — | SINE | MIR | chr5: 36610041-36610288 | − | 110 | 248 | SLC1A3 | Proximal | 0 | Not documented | 16 |
| L1MC4a_dup7996 | Multi/ | No | — | — | LINE | Other L1 | chr5: 36617712-36618082 | − | 120 | 371 | SLC1A3 | Proximal | 0 | Not documented | 17 |
| | Uniquely | | | | | | | | | | | | | | |
| MIR3_dup27720 | Multi/ | No | — | — | SINE | MIR | chr5: 36686929-36687050 | + | 100 | 122 | SLC1A3 | Proximal | 0 | Not documented | 18 |
| | Uniquely | | | | | | | | | | | | | | |
| L2c_dup45525 | Multi | No | — | — | LINE | L2 | chr5: 38504441-38504848 | − | 170 | 408 | LIFR | Proximal | 0 | Not documented | 19 |
| L1MD2_dup3025 | Uniquely | No | — | — | LINE | Other L1 | chr5: 38505177-38505503 | + | 100 | 327 | LIFR | Proximal | 0 | Not documented | 20 |
| L1PA16_dup4433 | Uniquely | No | — | — | LINE | L1PA\|B\|x | chr5: 38907242-38910830 | + | 91 | 3589 | OSMR | Proximal | 0 | Not documented | 21 |
| L1PA16_dup4434 | Uniquely | No | — | — | LINE | L1PA\|B\|x | chr5: 38911098-38913369 | + | 65 | 2272 | OSMR | Proximal | 0 | EVE annotated | 22 |
| AluSx_dup37018 | Multi | No | — | — | SINE | Alu | chr5: 38934660-38934906 | − | 77 | 247 | OSMR | Proximal | 0 | Not documented | 23 |
| AluSq2_dup14763 | Multi/ | No | — | — | SINE | Alu | chr5: 38934930-38935236 | − | 52 | 307 | OSMR | Proximal | 0 | Not documented | 24 |
| | Uniquely | | | | | | | | | | | | | | |
| L2c_dup45681 | Multi | No | — | — | LINE | L2 | chr5: 41919736-41920067 | + | 170 | 332 | C5orf51 | Proximal | 0 | Not documented | 3625 |
| AluY_dup33658 | Multi/ | No | — | — | SINE | Alu | chr5: 43018676-43018985 | + | 13 | 310 | ANXA2R | Distal | 20351 | Not documented | 26 |
| | Uniquely | | | | | | | | | | | | | | |
| L1MB1_dup1777 | Uniquely | No | — | — | LINE | Other L1 | chr5: 43136888-43138346 | + | 72 | 1459 | ZNF131 | Proximal | 0 | Not documented | 27 |
| LTR49-int_dup638 | Multi/ | No | — | — | LTR | ERV1 | chr5: 43571615-43574124 | − | 65 | 2510 | PAIP1 | Distal | 13756 | Not documented | 28 |
| | Uniquely | | | | | | | | | | | | | | |
| AluSz_dup26065 | Multi/ | No | — | — | SINE | Alu | chr5: 43575663-43575975 | − | 62 | 313 | PAIP1 | Distal | 17804 | Not documented | 29 |
| | Uniquely | | | | | | | | | | | | | | |
| MLT1A_dup2788 | Uniquely | No | — | — | LTR | ERVL- | chr5: 44745242-44745541 | | 99 | 300 | MRPS30 | Distal | 63487 | Not documented | 30 |
| | | | | | | MaLR | | | | | | | | | |
| MIR_dup55021 | Uniquely | No | — | — | SINE | MIR | chr5: 54788514-54788717 | − | 130 | 204 | PPAP2A | Proximal | 0 | Not documented | 31 |
| AluJo_dup18876 | Uniquely | No | — | — | SINE | Alu | chr5: 54788859-54789169 | + | 85 | 311 | PPAP2A | Proximal | 0 | Not documented | 32 |
| MIRc_dup32714 | Multi | No | — | — | SINE | MIR | chr5: 55278382-55278642 | − | 160 | 261 | IL6ST | Proximal | 0 | Not documented | 33 |
| AluJb_dup39479 | Uniquely | No | — | — | SINE | Alu | chr5: 60461154-60461456 | − | 76 | 303 | SMIM15 | Distal | 2854 | Not documented | 34 |
| L1ME1_dup9857 | Multi/ | No | — | — | LINE | Other L1 | chr5: 63512676-63513493 | − | 100 | 818 | RNF180 | Proximal | 0 | Not documented | 35 |
| | Uniquely | | | | | | | | | | | | | | |
| L1ME3E_dup1609 | Uniquely | No | — | — | LINE | Other L1 | chr5: 63630344-63631839 | − | 120 | 1496 | RNF180 | Proximal | 0 | Not documented | 36 |
| L2c_dup46651 | Uniquely | No | — | — | LINE | L2 | chr5: 65330871-65331389 | + | 160 | 519 | ERBB2IP | Proximal | 0 | Not documented | 37 |
| L3_dup13950 | Multi | No | — | — | LINE | CR1 | chr5: 6606993-6607042 | + | 110 | 50 | NSUN2 | Proximal | 0 | Not documented | 38 |
| AluSx3_dup8385 | Multi/ | No | — | — | SINE | Alu | chr5: 68505820-68506125 | − | 55 | 306 | CENPH | Proximal | 0 | Not documented | 39 |
| | Uniquely | | | | | | | | | | | | | | |
| AluSx_dup37846 | Multi | No | — | — | SINE | Alu | chr5: 68629555-68629698 | + | 41 | 144 | CCDC125 | Proximal | 920 | Not documented | 40 |
| AluSx3_dup8403 | Multi | No | — | — | SINE | Alu | chr5: 69218246-69218513 | + | 54 | 268 | SERF1B | Distal | 102562 | Not documented | 41 |
| MIRb_dup70531 | Multi | No | — | — | SINE | MIR | chr5: 69274182-69274366 | − | 150 | 185 | SERF1B | Distal | 46709 | Not documented | 42 |
| L1MC4_dup9017 | Multi | No | — | — | LINE | Other L1 | chr5: 69372802-69373402 | + | 130 | 601 | SMN2 | Proximal | 0 | Not documented | 43 |
| MIRb_dup70536 | Multi | No | — | — | SINE | MIR | chr5: 69435472-69435656 | + | 150 | 185 | SMN2 | Distal | 61124 | Not documented | 44 |
| AluSx3_dup8408 | Multi | No | — | — | SINE | Alu | chr5: 69491263-69491530 | − | 54 | 268 | SMN2 | Distal | 116915 | Not documented | 45 |
| MIRb_dup70549 | Multi | No | — | — | SINE | MIR | chr5: 70149254-70149438 | − | 150 | 185 | SERF1A | Distal | 47055 | Not documented | 46 |
| L1MC4_dup9022 | Multi | No | — | — | LINE | Other L1 | chr5: 70248222-70248822 | + | 130 | 601 | SMN1 | Proximal | 0 | Not documented | 47 |
| L1MEc_dup6101 | Multi | No | — | — | LINE | Other L1 | chr5: 70339588-70340500 | − | 100 | 913 | GTF2H2 | Proximal | 0 | Not documented | 48 |
| AluSx3_dup8426 | Multi | No | — | — | SINE | Alu | chr5: 70491653-70491920 | − | 56 | 268 | GTF2H2 | Distal | 128138 | Not documented | 49 |
| MIR_dup55882 | Multi | No | — | — | SINE | MIR | chr5: 70952883-70952959 | + | 140 | 77 | MCCC2 | Proximal | 0 | Not documented | 3650 |
| L1MB3_dup4936 | Multi | No | — | — | LINE | Other L1 | chr5: 70953108-70953247 | − | 82 | 140 | MCCC2 | Proximal | 0 | Not documented | 51 |
| L2c_dup46879 | Multi | No | — | — | LINE | L2 | chr5: 70953785-70954419 | + | 150 | 635 | MCCC2 | Proximal | 0 | Not documented | 52 |
| ERV3-16A3_I- | Multi | No | — | — | LTR | ERVL | chr5: 71112573-71113395 | − | 150 | 823 | CARTPT | Distal | 95699 | Not documented | 53 |
| int_dup2217 | | | | | | | | | | | | | | | |
| THE1C-int_dup616 | Multi | No | — | — | LTR | ERVL- | chr5: 71145493-71146744 | − | 54 | 1252 | CARTPT | Distal | 128619 | Not documented | 54 |
| | | | | | | MaLR | | | | | | | | | |
| L1M4_dup4736 | Multi | No | — | — | LINE | Other L1 | chr5: 71237812-71238060 | + | 98 | 249 | MAP1B | Distal | 165002 | Not documented | 55 |
| AluJb_dup40070 | Multi/ | No | — | — | SINE | Alu | chr5: 71415349-71415633 | − | 72 | 285 | MAP1B | Proximal | 0 | Not documented | 56 |
| | Uniquely | | | | | | | | | | | | | | |
| Tigger14a_dup415 | Multi/ | No | — | — | DNA | DNA | chr5: 71423969-71424089 | − | 120 | 121 | MAP1B | Proximal | 0 | Not documented | 57 |
| | Uniquely | | | | | | | | | | | | | | |
| MIR3_dup28618 | Multi/ | No | — | — | SINE | MIR | chr5: 71426479-71426632 | + | 140 | 154 | MAP1B | Proximal | 0 | Not documented | 58 |
| | Uniquely | | | | | | | | | | | | | | |
| L2c_dup46896 | Multi | No | — | — | LINE | L2 | chr5: 71426813-71427020 | − | 110 | 208 | MAP1B | Proximal | 0 | Not documented | 59 |
| L1M6_dup2191 | Multi | No | — | — | LINE | Other L1 | chr5: 71428066-71429160 | − | 130 | 1095 | MAP1B | Proximal | 0 | Not documented | 60 |
| AluJb_dup40073 | Uniquely | No | — | — | SINE | Alu | chr5: 71435794-71436078 | − | 53 | 285 | MAP1B | Proximal | 0 | Not documented | 61 |
| MER112_dup1510 | Uniquely | No | — | — | DNA | DNA | chr5: 71436138-71436309 | − | 110 | 172 | MAP1B | Proximal | 0 | Not documented | 62 |
| AluYf4_dup422 | Multi/ | No | — | — | SINE | Alu | chr5: 71453834-71454134 | − | 39 | 301 | MAP1B | Proximal | 0 | Not documented | 63 |
| | Uniquely | | | | | | | | | | | | | | |
| MIRb_dup70610 | Multi/ | No | — | — | SINE | MIR | chr5: 71454785-71454975 | − | 120 | 191 | MAP1B | Proximal | 0 | Not documented | 64 |
| | Uniquely | | | | | | | | | | | | | | |
| MIRb_dup70611 | Uniquely | No | — | — | SINE | MIR | chr5: 71456994-71457208 | + | 160 | 215 | MAP1B | Proximal | 0 | Not documented | 65 |
| AluSx1_dup29136 | Uniquely | No | — | — | SINE | Alu | chr5: 71457502-71457811 | + | 42 | 310 | MAP1B | Proximal | 0 | Not documented | 66 |
| MIR_dup55930 | Multi | No | — | — | SINE | MIR | chr5: 71501179-71501276 | + | 130 | 98 | MAP1B | Proximal | 0 | Not documented | 67 |
| AluSz_dup26693 | Multi | No | — | — | SINE | Alu | chr5: 71516066-71516375 | + | 53 | 310 | MRPS27 | Proximal | 0 | Not documented | 68 |
| MLT1G3_dup920 | Multi | No | — | — | LTR | ERVL- | chr5: 71657014-71657451 | − | 100 | 438 | PTCD2 | Proximal | 963 | Not documented | 69 |
| | | | | | | MaLR | | | | | | | | | |
| L2b_dup30711 | Multi | No | — | — | LINE | L2 | chr5: 71657486-71657857 | + | 130 | 372 | PTCD2 | Proximal | 1435 | Not documented | 70 |
| MIR3_dup28664 | Multi | No | — | — | SINE | MIR | chr5: 72570468-72570567 | − | 120 | 100 | TMEM174 | Distal | 99499 | Not documented | 71 |
| AluSz_dup26805 | Multi | No | — | — | SINE | Alu | chr5: 74894785-74895073 | + | 60 | 289 | POLK | Proximal | 0 | Not documented | 72 |
| LTR5_Hs_dup197 | Multi | No | — | — | LTR | ERVK | chr5: 74901658-74902617 | − | 3.6 | 960 | ANKDD1B | Distal | 4668 | Not documented | 73 |
| L4_dup5552 | Multi | No | — | — | LINE | RTE | chr5: 75537276-75537341 | − | 140 | 66 | SV2C | Proximal | 0 | Not documented | 74 |
| L2c_dup47097 | Multi | No | — | — | LINE | L2 | chr5: 76030431-76030511 | − | 100 | 81 | F2R | Proximal | 0 | Not documented | 3675 |
| AluY_dup34658 | Multi/ | No | — | — | SINE | Alu | chr5: 76031017-76031328 | + | 28 | 312 | F2R | Proximal | 0 | Not documented | 76 |
| | Uniquely | | | | | | | | | | | | | | |
| MER4D1_dup395 | Uniquely | No | — | — | LTR | ERV1 | chr5: 77069787-77070640 | + | 47 | 854 | TBCA | Proximal | 0 | Not documented | 77 |
| L1PA7_dup4291 | Uniquely | No | — | — | LINE | L1PA\|B\|x | chr5: 79062222-79066557 | − | 43 | 4336 | CMYA5 | Proximal | 0 | EVE annotated | 78 |
| L2_dup18690 | Multi | No | — | — | LINE | L2 | chr5: 80748285-80748669 | − | 180 | 385 | SSBP2 | Proximal | 0 | Not documented | 79 |
| L1PREC2_dup2472 | Multi | No | — | — | LINE | L1PA\|B\|x | chr5: 82350368-82350663 | + | 29 | 296 | TMEM167A | Proximal | 0 | Not documented | 80 |
| L1PB2_dup880 | Uniquely | No | — | — | LINE | L1PA\|B\|x | chr5: 87333291-87335515 | − | 52 | 2225 | TMEM161B | Distal | 149936 | EVE annotated | 81 |
| MSTB_dup2627 | Multi | No | — | — | LTR | ERVL- | chr5: 87577602-87578004 | + | 63 | 403 | TMEM161B | Distal | 12310 | Not documented | 82 |
| | | | | | | MaLR | | | | | | | | | |
| Tigger7_dup1009 | Multi/ | No | — | — | DNA | DNA | chr5: 87578401-87578901 | − | 79 | 501 | TMEM161B | Distal | 13109 | Not documented | 83 |
| | Uniquely | | | | | | | | | | | | | | |
| L3_dup15000 | Multi | No | — | — | LINE | CR1 | chr5: 87581457-87581633 | + | 120 | 177 | TMEM161B | Distal | 16165 | Not documented | 84 |
| MLT1D_dup6334 | Multi | No | — | — | LTR | ERVL- | chr5: 87583077-87583516 | + | 110 | 440 | TMEM161B | Distal | 17785 | Not documented | 85 |
| | | | | | | MaLR | | | | | | | | | |
| L1MA3_dup3098 | Multi/ | No | — | — | LINE | Other L1 | chr5: 87632806-87635704 | + | 52 | 2899 | TMEM161B | Distal | 67514 | Not documented | 86 |
| | Uniquely | | | | | | | | | | | | | | |
| MIRc_dup33620 | Multi | No | — | — | SINE | MIR | chr5: 87705852-87705952 | + | 130 | 101 | TMEM161B | Distal | 140560 | Not documented | 87 |
| L1PA6_dup2038 | Uniquely | No | — | — | LINE | L1PA\|B\|x | chr5: 87913271-87919418 | − | 34 | 6148 | MEF2C | Distal | 94558 | EVE annotated | 88 |
| CER_dup12 | Multi | No | — | — | Other | Other | chr5: 92954798-92954836 | + | 47 | 39 | FAM172A | Proximal | 0 | Not documented | 89 |
| | | | | | | Repeats | | | | | | | | | |
| MER45A_dup1104 | Multi/ | No | — | — | DNA | DNA | chr5: 95129501-95129660 | + | 96 | 160 | GLRX | Proximal | 0 | Not documented | 90 |
| | Uniquely | | | | | | | | | | | | | | |
| AluSz_dup27292 | Multi/ | No | — | — | SINE | Alu | chr5: 95130525-95130822 | + | 47 | 298 | GLRX | Proximal | 0 | Not documented | 91 |
| | Uniquely | | | | | | | | | | | | | | |
| Charlie4z_dup1935 | Multi/ | No | — | — | DNA | DNA | chr5: 96427884-96428017 | + | 110 | 134 | LIX1 | Proximal | 0 | Not documented | 92 |
| | Uniquely | | | | | | | | | | | | | | |
| AluSx1_dup35828 | Multi | No | — | — | SINE | Alu | chr6: 107113907-107114218 | + | 48 | 312 | QRSL1 | Proximal | 0 | Not documented | 93 |
| L3_dup18093 | Multi | No | — | — | LINE | CR1 | chr6: 108194030-108194135 | + | 130 | 106 | SEC63 | Proximal | 0 | Not documented | 94 |
| MLT1F_dup1531 | Multi | No | — | — | LTR | ERVL- | chr6: 10829257-10829478 | + | 68 | 222 | MAK | Proximal | 0 | Not documented | 95 |
| | | | | | | MaLR | | | | | | | | | |
| L1MB5_dup2769 | Uniquely | No | — | — | LINE | Other L1 | chr6: 111708225-111708625 | + | 100 | 401 | REV3L | Proximal | 0 | Not documented | 96 |
| L1MA4A_dup2476 | Uniquely | No | — | — | LINE | Other L1 | chr6: 111715037-111715909 | − | 63 | 873 | REV3L | Proximal | 0 | Not documented | 97 |
| L1MA4A_dup2477 | Uniquely | No | — | — | LINE | Other L1 | chr6: 111716195-111717238 | − | 72 | 1044 | REV3L | Proximal | 0 | Not documented | 98 |
| L1M5_dup24489 | Uniquely | No | — | — | LINE | Other L1 | chr6: 111765521-111765843 | + | 98 | 323 | REV3L | Proximal | 0 | Not documented | 99 |
| L1PA16_dup5647 | Uniquely | No | — | — | LINE | L1PA\|B\|x | chr6: 111779226-111781636 | + | 51 | 2411 | REV3L | Proximal | 0 | Not documented | 3700 |
| L1MDb_dup330 | Multi | No | — | — | LINE | Other L1 | chr6: 111804112-111804305 | + | 130 | 194 | REV3L | Proximal | 0 | Not documented | 1 |
| LTR67B_dup1674 | Multi | No | — | — | LTR | ERVL | chr6: 111897594-111897912 | + | 130 | 319 | TRAF3IP2 | Proximal | 0 | Not documented | 2 |
| MIRb_dup87409 | Uniquely | No | — | — | SINE | MIR | chr6: 112133922-112134060 | + | 150 | 139 | FYN | Proximal | 0 | Not documented | 3 |
| MIR_dup69284 | Uniquely | No | — | — | SINE | MIR | chr6: 112134838-112134920 | + | 130 | 83 | FYN | Proximal | 0 | Not documented | 4 |
| MLT1J2_dup2808 | Uniquely | No | — | — | LTR | ERVL- | chr6: 112191243-112191678 | + | 120 | 436 | FYN | Proximal | 0 | Not documented | 5 |
| | | | | | | MaLR | | | | | | | | | |
| L1MA2_dup2686 | Uniquely | No | — | — | LINE | Other L1 | chr6: 118760710-118763642 | − | 49 | 2933 | CEP85L | Distal | 18294 | Not documented | 6 |
| AluJb_dup49683 | Multi | No | — | — | SINE | Alu | chr6: 122765166-122765430 | − | 74 | 265 | SERINC1 | Proximal | 0 | Not documented | 7 |
| AluSg_dup14607 | Multi | No | — | — | SINE | Alu | chr6: 126300618-126300912 | + | 37 | 295 | HINT3 | Proximal | 0 | Not documented | 8 |
| L2_dup20731 | Uniquely | No | — | — | LINE | L2 | chr6: 13097871-13099281 | + | 150 | 1411 | PHACTR1 | Proximal | 0 | Not documented | 9 |
| L2c_dup58528 | Multi | No | — | — | LINE | L2 | chr6: 133337845-133338293 | − | 150 | 449 | RPS12 | Distal | 199143 | Not documented | 10 |
| AluSp_dup17595 | Multi | No | — | — | SINE | Alu | chr6: 133359216-133359534 | − | 41 | 319 | EYA4 | Distal | 202203 | Not documented | 11 |
| MIRb_dup88852 | Multi | No | — | — | SINE | MIR | chr6: 135816873-135817085 | + | 140 | 213 | AHI1 | Proximal | 0 | Not documented | 12 |
| LTR78_dup2206 | Multi | No | — | — | LTR | ERV1 | chr6: 139017811-139017938 | − | 140 | 128 | NHSL1 | Distal | 4104 | Not documented | 13 |
| LTR78_dup2207 | Multi/ | No | — | — | LTR | ERV1 | chr6: 139018242-139018571 | − | 130 | 330 | NHSL1 | Distal | 4535 | Not documented | 14 |
| | Uniquely | | | | | | | | | | | | | | |
| MIR_dup70884 | Multi | No | — | — | SINE | MIR | chr6: 142541601-142541734 | + | 130 | 134 | VTA1 | Proximal | 0 | Not documented | 15 |
| L2a_dup71151 | Uniquely | No | — | — | LINE | L2 | chr6: 143270683-143271115 | − | 120 | 433 | HIVEP2 | Distal | 4346 | Not documented | 16 |
| L1MA7_dup3258 | Multi | No | — | — | LINE | Other L1 | chr6: 150163400-150163753 | − | 69 | 354 | LRP11 | Proximal | 0 | Not documented | 17 |
| AluSx1_dup37093 | Uniquely | No | — | — | SINE | Alu | chr6: 151163850-151164147 | − | 46 | 298 | PLEKHG1 | Proximal | 0 | Not documented | 18 |
| AluSg_dup14955 | Multi | No | — | — | SINE | Alu | chr6: 151725995-151726304 | − | 63 | 310 | RMND1 | Proximal | 0 | Not documented | 19 |
| MLT2D_dup2003 | Multi | No | — | — | LTR | ERVL | chr6: 153309705-153310018 | + | 120 | 314 | MTRF1L | Proximal | 0 | Not documented | 20 |
| LTR41B_dup405 | Multi | No | — | — | LTR | ERVL | chr6: 153310144-153310411 | + | 100 | 268 | MTRF1L | Proximal | 0 | Not documented | 21 |
| MER47C_dup322 | Multi | No | — | — | DNA | DNA | chr6: 153310591-153310674 | + | 92 | 84 | MTRF1L | Proximal | 0 | Not documented | 22 |
| Tigger5_dup1075 | Multi | No | — | — | DNA | DNA | chr6: 153310689-153310760 | − | 110 | 72 | MTRF1L | Proximal | 0 | Not documented | 23 |
| Tigger5_dup1076 | Multi | No | — | — | DNA | DNA | chr6: 153310783-153310842 | + | 76 | 60 | MTRF1L | Proximal | 0 | Not documented | 24 |
| L2c_dup59503 | Uniquely | No | — | — | LINE | L2 | chr6: 153418608-153419429 | − | 150 | 822 | RGS17 | Proximal | 0 | Not documented | 3725 |
| L1M1_dup3689 | Multi/ | No | — | — | LINE | Other L1 | chr6: 159972589-159974224 | − | 51 | 1636 | SOD2 | Distal | 115866 | Not documented | 26 |
| | Uniquely | | | | | | | | | | | | | | |
| LTR43_dup128 | Uniquely | No | — | — | LTR | ERV1 | chr6: 159995791-159996372 | + | 58 | 582 | SOD2 | Distal | 93718 | Not documented | 27 |
| L1M5_dup25571 | Multi/ | No | — | — | LINE | Other L1 | chr6: 160027483-160029255 | − | 110 | 1773 | SOD2 | Distal | 60835 | Not documented | 28 |
| | Uniquely | | | | | | | | | | | | | | |
| L1PA16_dup5849 | Multi | No | — | — | LINE | L1PA\|B\|x | chr6: 160050627-160051081 | − | 50 | 455 | SOD2 | Distal | 39009 | Not documented | 29 |
| AluSx_dup48865 | Multi | No | — | — | SINE | Alu | chr6: 160051104-160051384 | + | 57 | 281 | SOD2 | Distal | 38706 | Not documented | 30 |
| HAL1_dup11557 | Uniquely | No | — | — | LINE | Other L1 | chr6: 160052301-160053169 | − | 140 | 869 | SOD2 | Distal | 36921 | Not documented | 31 |
| AluSz_dup34074 | Multi/ | No | — | — | SINE | Alu | chr6: 160054708-160054990 | + | 45 | 283 | SOD2 | Distal | 35100 | Not documented | 32 |
| | Uniquely | | | | | | | | | | | | | | |
| AluJo_dup24524 | Multi | No | — | — | SINE | Alu | chr6: 160067582-160067897 | − | 96 | 316 | SOD2 | Distal | 22193 | Not documented | 33 |
| L2c_dup59759 | Multi | No | — | — | LINE | L2 | chr6: 160067898-160068019 | − | 120 | 122 | SOD2 | Distal | 22071 | Not documented | 34 |
| AluSx3_dup10856 | Multi | No | — | — | SINE | Alu | chr6: 160080288-160080585 | − | 43 | 298 | SOD2 | Distal | 9505 | Not documented | 35 |
| L1PBa1_dup160 | Multi/ | No | — | — | LINE | L1PA\|B\|x | chr6: 160080586-160081483 | + | 36 | 898 | SOD2 | Distal | 8607 | Not documented | 36 |
| | Uniquely | | | | | | | | | | | | | | |
| L1PBa1_dup161 | Multi | No | — | — | LINE | L1PA\|B\|x | chr6: 160082281-160083034 | + | 34 | 754 | SOD2 | Distal | 7056 | Not documented | 37 |
| LTR12 _{——} dup232 | Multi | No | — | — | LTR | ERV1 | chr6: 160083035-160083691 | + | 40 | 657 | SOD2 | Distal | 6399 | Not documented | 38 |
| L2a_dup72141 | Multi/ | No | — | — | LINE | L2 | chr6: 160085570-160086237 | − | 140 | 668 | SOD2 | Distal | 3853 | Not documented | 39 |
| | Uniquely | | | | | | | | | | | | | | |
| AluSp_dup18031 | Multi/ | No | — | — | SINE | Alu | chr6: 160086238-160086524 | + | 40 | 287 | SOD2 | Distal | 3566 | Not documented | 40 |
| | Uniquely | | | | | | | | | | | | | | |
| MLT1K_dup7542 | Uniquely | No | — | — | LTR | ERVL- | chr6: 160086745-160087114 | − | 130 | 370 | SOD2 | Distal | 2976 | Not documented | 41 |
| | | | | | | MaLR | | | | | | | | | |
| AluSp_dup18032 | Multi/ | No | — | — | SINE | Alu | chr6: 160088670-160088979 | + | 47 | 310 | SOD2 | Proximal | 1111 | Not documented | 42 |
| | Uniquely | | | | | | | | | | | | | | |
| AluSp_dup18033 | Multi/ | No | — | — | SINE | Alu | chr6: 160089338-160089646 | + | 44 | 309 | SOD2 | Proximal | 444 | Not documented | 43 |
| | Uniquely | | | | | | | | | | | | | | |
| AluSz_dup34078 | Multi/ | No | — | — | SINE | Alu | chr6: 160100828-160100958 | − | 45 | 131 | SOD2 | Proximal | 0 | Not documented | 44 |
| | Uniquely | | | | | | | | | | | | | | |
| AluSz_dup34079 | Multi/ | No | — | — | SINE | Alu | chr6: 160101686-160101990 | + | 52 | 305 | SOD2 | Proximal | 0 | Not documented | 45 |
| | Uniquely | | | | | | | | | | | | | | |
| L1M5_dup25572 | Multi | No | — | — | LINE | Other L1 | chr6: 160102001-160102101 | + | 130 | 101 | SOD2 | Proximal | 0 | Not documented | 46 |
| LTR39_dup404 | Multi/ | No | — | — | LTR | ERV1 | chr6: 160102172-160102969 | + | 73 | 798 | SOD2 | Proximal | 0 | Not documented | 47 |
| | Uniquely | | | | | | | | | | | | | | |
| AluSx_dup48867 | Multi | No | — | — | SINE | Alu | chr6: 160105368-160105668 | + | 45 | 301 | SOD2 | Proximal | 0 | Not documented | 48 |
| L2b_dup39414 | Multi | No | — | — | LINE | L2 | chr6: 163850979-163851166 | − | 160 | 188 | QKI | Proximal | 0 | Not documented | 49 |
| MER103C_dup3872 | Multi | No | — | — | DNA | DNA | chr6: 163851849-163852036 | − | 120 | 188 | QKI | Proximal | 0 | Not documented | 3750 |
| L1MD_dup3316 | Multi | No | — | — | LINE | Other L1 | chr6: 163874170-163874403 | − | 130 | 234 | QKI | Proximal | 0 | Not documented | 51 |
| L2c_dup59886 | Multi | No | — | — | LINE | L2 | chr6: 163890571-163890673 | + | 110 | 103 | QKI | Proximal | 0 | Not documented | 52 |
| Tigger2_dup1197 | Multi | No | — | — | DNA | DNA | chr6: 163893055-163893483 | − | 68 | 429 | QKI | Proximal | 0 | Not documented | 53 |
| Tigger1_dup5301 | Multi | No | — | — | DNA | DNA | chr6: 163904066-163905231 | − | 50 | 1166 | QKI | Proximal | 0 | Not documented | 54 |
| AluSz6_dup16629 | Multi | No | — | — | SINE | Alu | chr6: 163905232-163905532 | − | 60 | 301 | QKI | Proximal | 0 | Not documented | 55 |
| Tigger1_dup5302 | Multi | No | — | — | DNA | DNA | chr6: 163905533-163905718 | − | 50 | 186 | QKI | Proximal | 0 | Not documented | 56 |
| Tigger1_dup5303 | Multi | No | — | — | DNA | DNA | chr6: 163905714-163906028 | − | 84 | 315 | QKI | Proximal | 0 | Not documented | 57 |
| MER21C_dup2086 | Multi | No | — | — | LTR | ERVL | chr6: 163906029-163906118 | − | 88 | 90 | QKI | Proximal | 0 | Not documented | 58 |
| MER5C_dup582 | Multi | No | — | — | DNA | DNA | chr6: 163912164-163912379 | − | 110 | 216 | QKI | Proximal | 0 | Not documented | 59 |
| MIR_dup71945 | Multi | No | — | — | SINE | MIR | chr6: 163917327-163917518 | − | 120 | 192 | QKI | Proximal | 0 | Not documented | 60 |
| L2a_dup72322 | Multi | No | — | — | LINE | L2 | chr6: 163917529-163918110 | + | 130 | 582 | QKI | Proximal | 0 | Not documented | 61 |
| MER21B_dup1055 | Multi | No | — | — | LTR | ERVL | chr6: 163972152-163972441 | − | 84 | 290 | QKI | Proximal | 0 | Not documented | 62 |
| L1MC1_dup5765 | Uniquely | No | — | — | LINE | Other L1 | chr6: 165684911-165686061 | + | 79 | 1151 | C6orf118 | Distal | 7093 | Not documented | 63 |
| Tigger1_dup5304 | Multi | No | — | — | DNA | DNA | chr6: 165788184-165790121 | + | 65 | 1938 | PDE10A | Proximal | 0 | Not documented | 64 |
| L1ME3E_dup1809 | Uniquely | No | — | — | LINE | Other L1 | chr6: 16623135-16623566 | − | 130 | 432 | ATXN1 | Proximal | 0 | Not documented | 65 |
| MER136_dup13 | Multi | No | — | — | DNA | DNA | chr6: 169616834-169616966 | + | 130 | 133 | THBS2 | Proximal | 0 | Not documented | 66 |
| L1ME4a_dup17799 | Multi | No | — | — | LINE | Other L1 | chr6: 170714061-170714179 | − | 140 | 119 | FAM120B | Proximal | 0 | Not documented | 67 |
| L2b_dup39552 | Multi | No | — | — | LINE | L2 | chr6: 170891224-170891414 | + | 130 | 191 | PDCD2 | Proximal | 0 | Not documented | 68 |
| AluSc8_dup7019 | Uniquely | No | — | — | SINE | Alu | chr6: 17477093-17477404 | − | 32 | 312 | CAP2 | Proximal | 0 | Not documented | 69 |
| HAL1_dup10075 | Multi | No | — | — | LINE | Other L1 | chr6: 17619096-17619716 | + | 120 | 621 | NUP153 | Proximal | 0 | Not documented | 70 |
| L1MA4_dup3639 | Multi | No | — | — | LINE | Other L1 | chr6: 17619866-17620046 | + | 64 | 181 | NUP153 | Proximal | 0 | Not documented | 71 |
| AluSx_dup43269 | Multi | No | — | — | SINE | Alu | chr6: 17620047-17620352 | + | 48 | 306 | NUP153 | Proximal | 0 | Not documented | 72 |
| Tigger1_dup4661 | Uniquely | No | — | — | DNA | DNA | chr6: 17684477-17685365 | − | 64 | 889 | NUP153 | Proximal | 0 | Not documented | 73 |
| AluY_dup39207 | Multi | No | — | — | SINE | Alu | chr6: 17685501-17685796 | + | 35 | 296 | NUP153 | Proximal | 0 | Not documented | 74 |
| L2b_dup35512 | Uniquely | No | — | — | LINE | L2 | chr6: 22131875-22133351 | + | 150 | 1477 | PRL | Distal | 154130 | Not documented | 3775 |
| MIR_dup64505 | Uniquely | No | — | — | SINE | MIR | chr6: 24423301-24423509 | + | 130 | 209 | MRS2 | Proximal | 0 | Not documented | 76 |
| AluSx1_dup33631 | Multi | No | — | — | SINE | Alu | chr6: 26127949-26128240 | + | 48 | 292 | HIST1H2AC | Proximal | 0 | Not documented | 77 |
| L1MC4a_dup9745 | Multi | No | — | — | LINE | Other L1 | chr6: 26138670-26138926 | − | 110 | 257 | HIST1H2AC | Proximal | 0 | Not documented | 78 |
| MIRb_dup82378 | Multi | No | — | — | SINE | MIR | chr6: 26139020-26139141 | + | 150 | 122 | HIST1H2AC | Proximal | 0 | Not documented | 79 |
| L2a_dup64505 | Multi/ | No | — | — | LINE | L2 | chr6: 26280939-26281729 | − | 130 | 791 | HIST1H4H | Proximal | 0 | Not documented | 80 |
| | Uniquely | | | | | | | | | | | | | | |
| L1ME3E_dup1838 | Multi | No | — | — | LINE | Other L1 | chr6: 26544430-26545362 | − | 120 | 933 | HMGN4 | Proximal | 0 | Not documented | 81 |
| L1ME3E_dup1839 | Multi/ | No | — | — | LINE | Other L1 | chr6: 26546483-26547423 | − | 120 | 941 | HMGN4 | Proximal | 2 | Not documented | 82 |
| | Uniquely | | | | | | | | | | | | | | |
| Tigger10_dup376 | Multi | No | — | — | DNA | DNA | chr6: 28245193-28245328 | + | 100 | 136 | PGBD1 | Distal | 3987 | Not documented | 83 |
| Arthur1C_dup266 | Multi | No | — | — | DNA | DNA | chr6: 29597136-29597210 | − | 79 | 75 | GABBR1 | Proximal | 0 | Not documented | 84 |
| Arthur1B_dup915 | Multi | No | — | — | DNA | DNA | chr6: 29597213-29597382 | − | 120 | 170 | GABBR1 | Proximal | 0 | Not documented | 85 |
| AluJb_dup46022 | Multi | No | — | — | SINE | Alu | chr6: 30246492-30246788 | − | 75 | 297 | TRIM39 | Distal | 47469 | Not documented | 86 |
| MSTA-int_dup1177 | Uniquely | No | — | — | LTR | ERVL- | chr6: 30251053-30252681 | − | 70 | 1629 | TRIM39 | Distal | 41576 | Not documented | 87 |
| | | | | | | MaLR | | | | | | | | | |
| AluJb_dup46040 | Multi/ | No | — | — | SINE | Alu | chr6: 30593596-30593888 | + | 62 | 293 | MRPS18B | Proximal | 0 | Not documented | 88 |
| | Uniquely | | | | | | | | | | | | | | |
| Charlie4a_dup1191 | Multi | No | — | — | DNA | DNA | chr6: 30868201-30868298 | − | 98 | 98 | DDR1 | Proximal | 269 | Not documented | 89 |
| AluSz6_dup14840 | Multi/ | No | — | — | SINE | Alu | chr6: 30868299-30868606 | + | 59 | 308 | DDR1 | Proximal | 367 | Not documented | 90 |
| | Uniquely | | | | | | | | | | | | | | |
| AluJr_dup22900 | Multi | No | — | — | SINE | Alu | chr6: 3152979-3153295 | + | 73 | 317 | BPHL | Proximal | 0 | Not documented | 91 |
| AluSx1_dup33891 | Multi | No | — | — | SINE | Alu | chr6: 31721509-31721802 | − | 43 | 294 | MSH5-SAPCD1 | Proximal | 0 | Not documented | 92 |
| AluJb_dup46181 | Multi | No | — | — | SINE | Alu | chr6: 31804050-31804312 | − | 91 | 263 | C6orf48 | Proximal | 0 | Not documented | 93 |
| L2a_dup64831 | Multi | No | — | — | LINE | L2 | chr6: 32162775-32162828 | + | 59 | 54 | GPSM3 | Proximal | 0 | Not documented | 94 |
| Charlie1b_dup1202 | Multi | No | — | — | DNA | DNA | chr6: 33268874-33269007 | + | 68 | 134 | TAPBP | Proximal | 0 | Not documented | 95 |
| AluSx_dup44245 | Multi | No | — | — | SINE | Alu | chr6: 33269069-33269372 | + | 46 | 304 | TAPBP | Proximal | 0 | Not documented | 96 |
| L2_dup21096 | Multi | No | — | — | LINE | L2 | chr6: 33269400-33269529 | − | 160 | 130 | TAPBP | Proximal | 0 | Not documented | 97 |
| AluSz6_dup14901 | Multi | No | — | — | SINE | Alu | chr6: 34253854-34254157 | − | 58 | 304 | NUDT3 | Proximal | 0 | Not documented | 98 |
| AluJr_dup23958 | Multi | No | — | — | SINE | Alu | chr6: 36569142-36569415 | − | 90 | 274 | SRSF3 | Proximal | 0 | Not documented | 99 |
| AluSx1_dup34256 | Multi | No | — | — | SINE | Alu | chr6: 36894028-36894336 | + | 55 | 309 | C6orf89 | Proximal | 0 | Not documented | 3800 |
| MIRb_dup83161 | Multi | No | — | — | SINE | MIR | chr6: 38644378-38644456 | + | 120 | 79 | GLO1 | Proximal | 0 | Not documented | 1 |
| AluSc_dup11840 | Multi/ | No | — | — | SINE | Alu | chr6: 42174959-42175257 | − | 35 | 299 | MRPS10 | Proximal | 0 | Not documented | 2 |
| | Uniquely | | | | | | | | | | | | | | |
| AluSx_dup45001 | Multi | No | — | — | SINE | Alu | chr6: 42712364-42712524 | + | 37 | 161 | TBCC | Proximal | 0 | Not documented | 3 |
| AluSc_dup11857 | Multi | No | — | — | SINE | Alu | chr6: 42854452-42854749 | + | 40 | 298 | RPL7L1 | Proximal | 0 | Not documented | 4 |
| AluSp_dup16689 | Multi | No | — | — | SINE | Alu | chr6: 42855039-42855333 | + | 37 | 295 | RPL7L1 | Proximal | 0 | Not documented | 5 |
| AluSp_dup16690 | Multi | No | — | — | SINE | Alu | chr6: 42856897-42857198 | + | 51 | 302 | RPL7L1 | Proximal | 0 | Not documented | 6 |
| MIRc_dup38832 | Multi | No | — | — | SINE | MIR | chr6: 42857408-42857543 | + | 150 | 136 | RPL7L1 | Proximal | 0 | Not documented | 7 |
| LTR50_dup1017 | Multi | No | — | — | LTR | ERVL | chr6: 42981127-42981210 | − | 110 | 84 | MEA1 | Proximal | 0 | Not documented | 8 |
| MIRb_dup83642 | Multi | No | — | — | SINE | MIR | chr6: 43487580-43487782 | + | 120 | 203 | POLR1C | Proximal | 0 | Not documented | 9 |
| AluSp_dup16808 | Uniquely | No | — | — | SINE | Alu | chr6: 49520634-49520942 | − | 53 | 309 | C6orf141 | Proximal | 0 | Not documented | 10 |
| 7SK_dup280 | Multi | No | — | — | Other | Other | chr6: 52860418-52860749 | + | 1.4 | 332 | GSTA4 | Proximal | 243 | Not documented | 11 |
| | | | | | | Repeats | | | | | | | | | |
| L1PA7_dup5090 | Uniquely | No | — | — | LINE | L1PA\|B\|x | chr6: 56430383-56431459 | − | 39 | 1077 | DST | Proximal | 0 | Not documented | 12 |
| MIR3_dup34637 | Multi | No | — | — | SINE | MIR | chr6: 56485808-56485914 | − | 150 | 107 | DST | Proximal | 0 | Not documented | 13 |
| AluSg7_dup2811 | Multi | No | — | — | SINE | Alu | chr6: 56487087-56487394 | + | 30 | 308 | DST | Proximal | 0 | Not documented | 14 |
| MIRb_dup84694 | Uniquely | No | — | — | SINE | MIR | chr6: 56667819-56667971 | − | 130 | 153 | DST | Proximal | 0 | Not documented | 15 |
| MLT1D_dup7286 | Uniquely | No | — | — | LTR | ERVL- | chr6: 56682576-56683032 | + | 84 | 457 | DST | Proximal | 0 | Not documented | 16 |
| | | | | | | MaLR | | | | | | | | | |
| Charlie19a_dup588 | Multi/ | No | — | — | DNA | DNA | chr6: 56683285-56683497 | − | 120 | 213 | DST | Proximal | 0 | Not documented | 17 |
| | Uniquely | | | | | | | | | | | | | | |
| MIRb_dup84697 | Multi/ | No | — | — | SINE | MIR | chr6: 56683709-56683782 | + | 130 | 74 | DST | Proximal | 0 | Not documented | 18 |
| | Uniquely | | | | | | | | | | | | | | |
| L1MEc_dup7074 | Uniquely | No | — | — | LINE | Other L1 | chr6: 56686897-56687370 | + | 110 | 474 | DST | Proximal | 0 | Not documented | 19 |
| AluY_dup40962 | Multi | No | — | — | SINE | Alu | chr6: 56701367-56701678 | + | 16 | 312 | DST | Proximal | 0 | Not documented | 20 |
| LTR12C_dup1191 | Multi | No | — | — | LTR | ERV1 | chr6: 70183132-70183433 | + | 59 | 302 | BAI3 | Distal | 83730 | Not documented | 21 |
| L1MDb_dup326 | Multi | No | — | — | LINE | Other L1 | chr6: 79787177-79787384 | + | 140 | 208 | PHIP | Proximal | 0 | Not documented | 22 |
| MIRc_dup39987 | Multi/ | No | — | — | SINE | MIR | chr6: 86204046-86204271 | − | 140 | 226 | NT5E | Proximal | 0 | Not documented | 23 |
| | Uniquely | | | | | | | | | | | | | | |
| L1PA7_dup5358 | Uniquely | No | — | — | LINE | L1PA\|B\|x | chr6: 89536814-89543297 | + | 36 | 6484 | RNGTT | Proximal | 0 | EVE annotated | 24 |
| L1MB8_dup5678 | Multi | No | — | — | LINE | Other L1 | chr6: 90345849-90346188 | − | 61 | 340 | LYRM2 | Proximal | 0 | Not documented | 3825 |
| L1MB8_dup5679 | Multi | No | — | — | LINE | Other L1 | chr6: 90346201-90346399 | − | 92 | 199 | LYRM2 | Proximal | 0 | Not documented | 26 |
| AluSz_dup32225 | Multi | No | — | — | SINE | Alu | chr6: 90346400-90346699 | − | 56 | 300 | LYRM2 | Proximal | 0 | Not documented | 27 |
| L1MB8_dup5680 | Multi | No | — | — | LINE | Other L1 | chr6: 90346700-90346842 | − | 110 | 143 | LYRM2 | Proximal | 0 | Not documented | 28 |
| L1MA9_dup6261 | Uniquely | No | — | — | LINE | Other L1 | chr6: 90967794-90970352 | − | 83 | 2559 | BACH2 | Proximal | 0 | Not documented | 29 |
| L1PB1_dup5378 | Uniquely | No | — | — | LINE | L1PA\|B\|x | chr6: 96933381-96937016 | − | 48 | 3636 | UFL1 | Distal | 32456 | EVE annotated | 30 |
| L1PA16_dup5560 | Uniquely | No | — | — | LINE | L1PA\|B\|x | chr6: 98750169-98752262 | − | 50 | 2094 | POU3F2 | Distal | 530319 | Not documented | 31 |
| L1MA8_dup3967 | Multi/ | No | — | — | LINE | Other L1 | chr6: 99298129-99299827 | + | 67 | 1699 | POU3F2 | Distal | 11470 | Not documented | 32 |
| | Uniquely | | | | | | | | | | | | | | |
| AluJr_dup25007 | Multi | No | — | — | SINE | Alu | chr6: 99859488-99859727 | − | 65 | 240 | PNISR | Proximal | 0 | Not documented | 33 |
| AluSz6_dup18386 | Multi | No | — | — | SINE | Alu | chr7: 100145958-100146235 | − | 57 | 278 | AGFG2 | Proximal | 0 | Not documented | 34 |
| AluJr_dup30493 | Multi | No | — | — | SINE | Alu | chr7: 100733625-100733916 | + | 64 | 292 | TRIM56 | Proximal | 0 | Not documented | 35 |
| MIR3_dup39611 | Multi | No | — | — | SINE | MIR | chr7: 100780892-100781040 | − | 160 | 149 | SERPINE1 | Proximal | 0 | Not documented | 36 |
| L2a_dup77382 | Multi | No | — | — | LINE | L2 | chr7: 100957915-100958041 | + | 140 | 127 | RABL5 | Proximal | 0 | Not documented | 37 |
| MSTA_dup8743 | Multi | No | — | — | LTR | ERVL- | chr7: 101982409-101982792 | + | 58 | 384 | SH2B2 | Distal | 20232 | Not documented | 38 |
| | | | | | | MaLR | | | | | | | | | |
| AluSq2_dup21950 | Multi | No | — | — | SINE | Alu | chr7: 101983142-101983442 | + | 65 | 301 | PRKRIP1 | Distal | 20878 | Not documented | 39 |
| AluSg7_dup3345 | Multi | No | — | — | SINE | Alu | chr7: 101983445-101983745 | + | 59 | 301 | PRKRIP1 | Distal | 20575 | Not documented | 40 |
| HERV4_I-int_{—} | Multi | No | — | — | LTR | ERV1 | chr7: 101983977-101984243 | − | 150 | 267 | PRKRIP1 | Distal | 20077 | Not documented | 41 |
| dup150 | | | | | | | | | | | | | | | |
| AluSz6_dup18469 | Multi | No | — | — | SINE | Alu | chr7: 101993041-101993380 | − | 70 | 340 | PRKRIP1 | Distal | 10940 | Not documented | 42 |
| AluSz_dup38343 | Multi | No | — | — | SINE | Alu | chr7: 101994464-101994764 | − | 75 | 301 | PRKRIP1 | Distal | 9556 | Not documented | 43 |
| AluJo_dup28163 | Multi | No | — | — | SINE | Alu | chr7: 101994769-101994924 | − | 76 | 156 | PRKRIP1 | Distal | 9396 | Not documented | 44 |
| FLAM_A_dup6889 | Multi/ | No | — | — | SINE | Alu | chr7: 102066571-102066693 | + | 85 | 123 | PRKRIP1 | Proximal | 0 | Not documented | 45 |
| | Uniquely | | | | | | | | | | | | | | |
| AluSx1_dup42691 | Multi | No | — | — | SINE | Alu | chr7: 102088873-102089179 | + | 28 | 307 | ORAI2 | Proximal | 0 | Not documented | 46 |
| AluSq2_dup21959 | Multi | No | — | — | SINE | Alu | chr7: 102089180-102089343 | + | 42 | 164 | ORAI2 | Proximal | 0 | Not documented | 47 |
| AluSx1_dup42692 | Multi | No | — | — | SINE | Alu | chr7: 102089870-102090176 | + | 56 | 307 | ORAI2 | Proximal | 0 | Not documented | 48 |
| AluSx_dup55338 | Multi | No | — | — | SINE | Alu | chr7: 102091366-102091666 | + | 39 | 301 | ORAI2 | Proximal | 0 | Not documented | 49 |
| AluSz_dup38352 | Multi/ | No | — | — | SINE | Alu | chr7: 102097281-102097575 | − | 51 | 295 | ALKBH4 | Proximal | 0 | Not documented | 3850 |
| | Uniquely | | | | | | | | | | | | | | |
| AluSc_dup14435 | Multi | No | — | — | SINE | Alu | chr7: 102178460-102178755 | + | 43 | 296 | POLR2J3 | Proximal | 0 | Not documented | 51 |
| AluJo_dup28187 | Multi | No | — | — | SINE | Alu | chr7: 102195248-102195407 | + | 82 | 160 | SPDYE2 | Proximal | 0 | Not documented | 52 |
| AluSz_dup38365 | Multi | No | — | — | SINE | Alu | chr7: 102195408-102195709 | + | 71 | 302 | SPDYE2 | Proximal | 0 | Not documented | 53 |
| AluSz6_dup18479 | Multi | No | — | — | SINE | Alu | chr7: 102196798-102197137 | + | 70 | 340 | SPDYE2 | Proximal | 0 | Not documented | 54 |
| AluY_dup49034 | Multi | No | — | — | SINE | Alu | chr7: 102205128-102205437 | − | 32 | 310 | POLR2J3 | Proximal | 0 | Not documented | 55 |
| MER21C_dup2389 | Multi | No | — | — | LTR | ERVL | chr7: 102205444-102205658 | − | 120 | 215 | POLR2J3 | Proximal | 0 | Not documented | 56 |
| AluSx_dup55370 | Multi | No | — | — | SINE | Alu | chr7: 102205665-102205875 | − | 48 | 211 | POLR2J3 | Proximal | 0 | Not documented | 57 |
| HERV4_I-int_{—} | Multi | No | — | — | LTR | ERV1 | chr7: 102206001-102206303 | + | 140 | 303 | POLR2J3 | Proximal | 0 | Not documented | 58 |
| dup151 | | | | | | | | | | | | | | | |
| AluSg7_dup3348 | Multi | No | — | — | SINE | Alu | chr7: 102206439-102206716 | − | 47 | 278 | POLR2J3 | Proximal | 0 | Not documented | 59 |
| AluSq2_dup21967 | Multi | No | — | — | SINE | Alu | chr7: 102206720-102207018 | − | 67 | 299 | POLR2J3 | Proximal | 0 | Not documented | 60 |
| HERV4_I-int_{—} | Multi | No | — | — | LTR | ERV1 | chr7: 102207072-102207188 | + | 160 | 117 | POLR2J3 | Proximal | 0 | Not documented | 61 |
| dup152 | | | | | | | | | | | | | | | |
| MER84-int_dup71 | Multi | No | — | — | LTR | ERV1 | chr7: 102207217-102207343 | + | 160 | 127 | POLR2J3 | Proximal | 0 | Not documented | 62 |
| MSTA_dup8746 | Multi | No | — | — | LTR | ERVL- | chr7: 102207365-102207748 | − | 59 | 384 | POLR2J3 | Proximal | 0 | Not documented | 63 |
| | | | | | | MaLR | | | | | | | | | |
| AluSg_dup16738 | Multi | No | — | — | SINE | Alu | chr7: 102207794-102208027 | − | 47 | 234 | POLR2J3 | Proximal | 0 | Not documented | 64 |
| AluSc_dup14436 | Multi | No | — | — | SINE | Alu | chr7: 102277565-102277862 | + | 41 | 298 | UPK3BL | Proximal | 0 | Not documented | 65 |
| AluJo_dup28201 | Multi | No | — | — | SINE | Alu | chr7: 102294340-102294495 | + | 76 | 156 | SPDYE2B | Proximal | 0 | Not documented | 66 |
| AluSz_dup38377 | Multi | No | — | — | SINE | Alu | chr7: 102294500-102294801 | + | 75 | 302 | SPDYE2B | Proximal | 0 | Not documented | 67 |
| AluSx1_dup42735 | Multi | No | — | — | SINE | Alu | chr7: 102294862-102295181 | + | 54 | 320 | SPDYE2B | Proximal | 0 | Not documented | 68 |
| AluSz6_dup18483 | Multi | No | — | — | SINE | Alu | chr7: 102295882-102296221 | + | 70 | 340 | SPDYE2B | Proximal | 0 | Not documented | 69 |
| AluY_dup49038 | Multi | No | — | — | SINE | Alu | chr7: 102304210-102304520 | − | 32 | 311 | POLR2J2 | Proximal | 0 | Not documented | 70 |
| MER21C_dup2390 | Multi | No | — | — | LTR | ERVL | chr7: 102304527-102304741 | − | 120 | 215 | POLR2J2 | Proximal | 0 | Not documented | 71 |
| AluSx_dup55395 | Multi | No | — | — | SINE | Alu | chr7: 102304748-102304959 | − | 45 | 212 | POLR2J2 | Proximal | 0 | Not documented | 72 |
| PABL_B-int_dup98 | Multi | No | — | — | LTR | ERV1 | chr7: 102305005-102305387 | + | 160 | 383 | POLR2J2 | Proximal | 0 | Not documented | 73 |
| AluSg7_dup3351 | Multi | No | — | — | SINE | Alu | chr7: 102305498-102305796 | − | 53 | 299 | POLR2J2 | Proximal | 0 | Not documented | 74 |
| AluSq2_dup21974 | Multi | No | — | — | SINE | Alu | chr7: 102305799-102306098 | − | 68 | 300 | POLR2J2 | Proximal | 0 | Not documented | 3875 |
| PABL_B-int_dup99 | Multi | No | — | — | LTR | ERV1 | chr7: 102306129-102306286 | + | 150 | 158 | POLR2J2 | Proximal | 0 | Not documented | 76 |
| MER84-int_dup72 | Multi | No | — | — | LTR | ERV1 | chr7: 102306285-102306423 | + | 150 | 139 | POLR2J2 | Proximal | 0 | Not documented | 77 |
| MSTA_dup8747 | Multi | No | — | — | LTR | ERVL- | chr7: 102306445-102306828 | − | 58 | 384 | POLRZJ2 | Proximal | 0 | Not documented | 78 |
| | | | | | | MaLR | | | | | | | | | |
| AluSg_dup16744 | Multi | No | — | — | SINE | Alu | chr7: 102306874-102307107 | − | 47 | 234 | POLR2J2 | Proximal | 0 | Not documented | 79 |
| AluSp_dup19891 | Multi | No | — | — | SINE | Alu | chr7: 102739637-102739933 | + | 38 | 297 | ARMC10 | Proximal | 0 | Not documented | 80 |
| L1MC4_dup12978 | Multi | No | — | — | LINE | Other L1 | chr7: 102858182-102859496 | + | 120 | 1315 | NAPEPLD | Distal | 68176 | Not documented | 81 |
| AluSz6_dup18537 | Multi | No | — | — | SINE | Alu | chr7: 104647373-104647544 | − | 58 | 172 | KMT2E | Distal | 7083 | Not documented | 82 |
| MER5A_dup15748 | Uniquely | No | — | — | DNA | DNA | chr7: 104695954-104696121 | − | 160 | 168 | KMT2E | Proximal | 0 | Not documented | 83 |
| L1MDb_dup424 | Multi | No | — | — | LINE | Other L1 | chr7: 105752752-105752947 | − | 140 | 196 | SYPL1 | Proximal | 0 | Not documented | 84 |
| L1MEg_dup8309 | Uniquely | No | — | — | LINE | Other L1 | chr7: 105880569-105881651 | − | 120 | 1083 | NAMPT | Distal | 7081 | Not documented | 85 |
| MER58A_dup5723 | Multi | No | — | — | DNA | DNA | chr7: 105890032-105890226 | − | 120 | 195 | NAMPT | Proximal | 0 | Not documented | 86 |
| MER47A_dup1316 | Multi | No | — | — | DNA | DNA | chr7: 105896993-105897288 | + | 71 | 296 | NAMPT | Proximal | 0 | Not documented | 87 |
| AluSq_dup8666 | Multi | No | — | — | SINE | Alu | chr7: 105897340-105897610 | + | 45 | 271 | NAMPT | Proximal | 0 | Not documented | 88 |
| AluJr_dup30864 | Multi | No | — | — | SINE | Alu | chr7: 105897781-105898085 | + | 73 | 305 | NAMPT | Proximal | 0 | Not documented | 89 |
| Tigger1_dup5757 | Multi | No | — | — | DNA | DNA | chr7: 105899014-105899876 | − | 59 | 863 | NAMPT | Proximal | 0 | Not documented | 90 |
| Tigger1_dup5758 | Multi | No | — | — | DNA | DNA | chr7: 105900168-105901560 | − | 59 | 1393 | NAMPT | Proximal | 0 | Not documented | 91 |
| MIRb_dup97360 | Multi | No | — | — | SINE | MIR | chr7: 105903075-105903304 | + | 150 | 230 | NAMPT | Proximal | 0 | Not documented | 92 |
| MIR3_dup39767 | Multi | No | — | — | SINE | MIR | chr7: 105903647-105903731 | + | 110 | 85 | NAMPT | Proximal | 0 | Not documented | 93 |
| Tigger4a_dup1562 | Multi | No | — | — | DNA | DNA | chr7: 105904847-105905064 | − | 53 | 218 | NAMPT | Proximal | 0 | Not documented | 94 |
| MIRc_dup45365 | Multi | No | — | — | SINE | MIR | chr7: 105906366-105906614 | − | 130 | 249 | NAMPT | Proximal | 0 | Not documented | 95 |
| L2a_dup77613 | Multi | No | — | — | LINE | L2 | chr7: 105907464-105907536 | + | 140 | 73 | NAMPT | Proximal | 0 | Not documented | 96 |
| AluYa5_dup1806 | Multi | No | — | — | SINE | Alu | chr7: 105908007-105908315 | + | 5.9 | 309 | NAMPT | Proximal | 0 | Not documented | 97 |
| L4_dup8043 | Multi | No | — | — | LINE | RTE | chr7: 105909901-105910056 | + | 140 | 156 | NAMPT | Proximal | 0 | Not documented | 98 |
| MER5C1_dup286 | Multi | No | — | — | DNA | DNA | chr7: 105910124-105910258 | − | 100 | 135 | NAMPT | Proximal | 0 | Not documented | 99 |
| L4_dup8044 | Multi | No | — | — | LINE | RTE | chr7: 105910259-105910706 | + | 140 | 448 | NAMPT | Proximal | 0 | Not documented | 3900 |
| MLT1H_dup4384 | Multi/ | No | — | — | LTR | ERVL- | chr7: 105910942-105911376 | + | 100 | 435 | NAMPT | Proximal | 0 | Not documented | 1 |
| | Uniquely | | | | | MaLR | | | | | | | | | |
| MIR3_dup39768 | Multi | No | — | — | SINE | MIR | chr7: 105912794-105912925 | − | 150 | 132 | NAMPT | Proximal | 0 | Not documented | 2 |
| MIR3_dup39769 | Multi | No | — | — | SINE | MIR | chr7: 105913943-105914087 | + | 130 | 145 | NAMPT | Proximal | 0 | Not documented | 3 |
| AluSz_dup38548 | Multi | No | — | — | SINE | Alu | chr7: 105915019-105915323 | + | 57 | 305 | NAMPT | Proximal | 0 | Not documented | 4 |
| MIR_dup77466 | Multi | No | — | — | SINE | MIR | chr7: 105915947-105916084 | + | 120 | 138 | NAMPT | Proximal | 0 | Not documented | 5 |
| AluJb_dup57320 | Multi | No | — | — | SINE | Alu | chr7: 105916199-105916496 | + | 67 | 298 | NAMPT | Proximal | 0 | Not documented | 6 |
| AluSp_dup19948 | Multi/ | No | — | — | SINE | Alu | chr7: 105917007-105917304 | + | 55 | 298 | NAMPT | Proximal | 0 | Not documented | 7 |
| | Uniquely | | | | | | | | | | | | | | |
| L2c_dup64183 | Multi | No | — | — | LINE | L2 | chr7: 105920094-105920839 | − | 130 | 746 | NAMPT | Proximal | 0 | Not documented | 8 |
| AluSc8_dup8887 | Multi | No | — | — | SINE | Alu | chr7: 105921106-105921400 | + | 32 | 295 | NAMPT | Proximal | 0 | Not documented | 9 |
| MER5B_dup10992 | Multi | No | — | — | DNA | DNA | chr7: 106843373-106843559 | − | 97 | 187 | COG5 | Proximal | 0 | Not documented | 10 |
| L1MA7_dup3647 | Uniquely | No | — | — | LINE | Other L1 | chr7: 106853084-106854605 | + | 120 | 1522 | COG5 | Proximal | 0 | Not documented | 11 |
| MER61-int_dup538 | Uniquely | No | — | — | LTR | ERV1 | chr7: 107023184-107024764 | + | 41 | 1581 | COG5 | Proximal | 0 | Not documented | 12 |
| L1MCc_dup1660 | Multi | No | — | — | LINE | Other L1 | chr7: 107102448-107102914 | + | 140 | 467 | COG5 | Proximal | 0 | Not documented | 13 |
| MIR3_dup39802 | Multi | No | — | — | SINE | MIR | chr7: 107260298-107260406 | + | 160 | 109 | BCAP29 | Proximal | 0 | Not documented | 14 |
| MIRb_dup97429 | Multi | No | — | — | SINE | MIR | chr7: 107260375-107260453 | + | 130 | 79 | BCAP29 | Proximal | 0 | Not documented | 15 |
| MIR3_dup39803 | Multi | No | — | — | SINE | MIR | chr7: 107260563-107260730 | − | 150 | 168 | BCAP29 | Proximal | 0 | Not documented | 16 |
| MIR_dup77521 | Multi | No | — | — | SINE | MIR | chr7: 107260783-107260823 | − | 89 | 41 | BCAP29 | Proximal | 0 | Not documented | 17 |
| MLT1D_dup8600 | Multi | No | — | — | LTR | ERVL- | chr7: 107261903-107262361 | + | 99 | 459 | BCAP29 | Proximal | 0 | Not documented | 18 |
| | | | | | | MaLR | | | | | | | | | |
| AluSx1_dup42973 | Multi/ | No | — | — | SINE | Alu | chr7: 107806681-107806992 | − | 35 | 312 | NRCAM | Proximal | 0 | Not documented | 19 |
| | Uniquely | | | | | | | | | | | | | | |
| L1MA9_dup7332 | Multi | No | — | — | LINE | Other L1 | chr7: 107810495-107810776 | + | 55 | 282 | NRCAM | Proximal | 0 | Not documented | 20 |
| MER4A1_dup890 | Multi/ | No | — | — | LTR | ERV1 | chr7: 107810777-107811228 | + | 45 | 452 | NRCAM | Proximal | 0 | Not documented | 21 |
| | Uniquely | | | | | | | | | | | | | | |
| AluSz_dup38616 | Multi | No | — | — | SINE | Alu | chr7: 107812720-107813040 | − | 53 | 321 | NRCAM | Proximal | 0 | Not documented | 22 |
| AluSq2_dup22098 | Multi/ | No | — | — | SINE | Alu | chr7: 107813429-107813730 | − | 47 | 302 | NRCAM | Proximal | 0 | Not documented | 23 |
| | Uniquely | | | | | | | | | | | | | | |
| MER119_dup573 | Multi/ | No | — | — | DNA | DNA | chr7: 107827018-107827554 | − | 100 | 537 | NRCAM | Proximal | 0 | Not documented | 24 |
| | Uniquely | | | | | | | | | | | | | | |
| L2a_dup77754 | Multi/ | No | — | — | LINE | L2 | chr7: 107827555-107827980 | + | 110 | 426 | NRCAM | Proximal | 0 | Not documented | 3925 |
| | Uniquely | | | | | | | | | | | | | | |
| LTR16B1_dup573 | Multi | No | — | — | LTR | ERVL | chr7: 107828054-107828113 | − | 110 | 60 | NRCAM | Proximal | 0 | Not documented | 26 |
| AluY_dup49271 | Multi | No | — | — | SINE | Alu | chr7: 107828114-107828411 | + | 26 | 298 | NRCAM | Proximal | 0 | Not documented | 27 |
| MIR3_dup39819 | Multi | No | — | — | SINE | MIR | chr7: 107829599-107829743 | + | 150 | 145 | NRCAM | Proximal | 0 | Not documented | 28 |
| AluSx1_dup42974 | Uniquely | No | — | — | SINE | Alu | chr7: 107835786-107836073 | + | 70 | 288 | NRCAM | Proximal | 0 | Not documented | 29 |
| LTR85c_dup587 | Multi | No | — | — | LTR | Gypsy | chr7: 107847093-107847191 | + | 120 | 99 | NRCAM | Proximal | 0 | Not documented | 30 |
| AluY_dup49273 | Multi | No | — | — | SINE | Alu | chr7: 107855657-107855958 | − | 32 | 302 | NRCAM | Proximal | 0 | Not documented | 31 |
| L2c_dup64293 | Multi | No | — | — | LINE | L2 | chr7: 107881378-107881725 | + | 160 | 348 | NRCAM | Proximal | 0 | Not documented | 32 |
| L2b_dup42299 | Multi/ | No | — | — | LINE | L2 | chr7: 107881959-107882119 | + | 130 | 161 | NRCAM | Proximal | 0 | Not documented | 33 |
| | Uniquely | | | | | | | | | | | | | | |
| L4_dup8064 | Multi | No | — | — | LINE | RTE | chr7: 107892844-107892912 | + | 120 | 69 | NRCAM | Proximal | 0 | Not documented | 34 |
| L1PA14_dup1486 | Multi | No | — | — | LINE | L1PA\|B\|x | chr7: 107892954-107892993 | + | 11 | 40 | NRCAM | Proximal | 0 | Not documented | 35 |
| L1ME1_dup14200 | Multi | No | — | — | LINE | Other L1 | chr7: 107894487-107894989 | + | 87 | 503 | NRCAM | Proximal | 0 | Not documented | 36 |
| AluSx3_dup12091 | Multi | No | — | — | SINE | Alu | chr7: 107894990-107895293 | − | 94 | 304 | NRCAM | Proximal | 0 | Not documented | 37 |
| L2c_dup64297 | Multi | No | — | — | LINE | L2 | chr7: 107934949-107934987 | − | 70 | 39 | NRCAM | Proximal | 0 | Not documented | 38 |
| MIR_dup77560 | Multi | No | — | — | SINE | MIR | chr7: 107935630-107935767 | − | 150 | 138 | NRCAM | Proximal | 0 | Not documented | 39 |
| MLT1A0_dup9600 | Multi | No | — | — | LTR | ERVL- | chr7: 107935768-107936121 | − | 89 | 354 | NRCAM | Proximal | 0 | Not documented | 40 |
| | | | | | | MaLR | | | | | | | | | |
| MIR_dup77561 | Multi | No | — | — | SINE | MIR | chr7: 107936122-107936188 | − | 150 | 67 | NRCAM | Proximal | 0 | Not documented | 41 |
| L2a_dup77763 | Multi/ | No | — | — | LINE | L2 | chr7: 107938010-107938482 | − | 110 | 473 | NRCAM | Proximal | 0 | Not documented | 42 |
| | Uniquely | | | | | | | | | | | | | | |
| AluY_dup49274 | Multi/ | No | — | — | SINE | Alu | chr7: 107938809-107939128 | + | 40 | 320 | NRCAM | Proximal | 0 | Not documented | 43 |
| | Uniquely | | | | | | | | | | | | | | |
| AluSx_dup55714 | Multi/ | No | — | — | SINE | Alu | chr7: 107939270-107939577 | + | 49 | 308 | NRCAM | Proximal | 0 | Not documented | 44 |
| | Uniquely | | | | | | | | | | | | | | |
| L2a_dup77766 | Multi/ | No | — | — | LINE | L2 | chr7: 107965931-107966255 | + | 130 | 325 | NRCAM | Proximal | 0 | Not documented | 45 |
| | Uniquely | | | | | | | | | | | | | | |
| MIRc_dup45434 | Multi | No | — | — | SINE | MIR | chr7: 107976638-107976690 | − | 100 | 53 | NRCAM | Proximal | 0 | Not documented | 46 |
| MSTD_dup3639 | Multi/ | No | — | — | LTR | ERVL- | chr7: 107991480-107991810 | + | 75 | 331 | NRCAM | Proximal | 0 | Not documented | 47 |
| | Uniquely | | | | | MaLR | | | | | | | | | |
| MamGypLTR3_dup420 | Multi | No | — | — | LTR | Gypsy | chr7: 107991927-107992202 | + | 150 | 276 | NRCAM | Proximal | 0 | Not documented | 48 |
| LFSINE_Vert_{—} | Multi/ | No | — | — | SINE | SINE | chr7: 107992406-107992707 | − | 160 | 302 | NRCAM | Proximal | 0 | Not documented | 49 |
| dup484 | Uniquely | | | | | | | | | | | | | | |
| L1MA2_dup3012 | Multi | No | — | — | LINE | Other L1 | chr7: 108077234-108078028 | + | 44 | 795 | NRCAM | Proximal | 0 | Not documented | 3950 |
| MLT1C_dup8230 | Multi/ | No | — | — | LTR | ERVL- | chr7: 108084868-108085297 | − | 70 | 430 | NRCAM | Proximal | 0 | Not documented | 51 |
| | Uniquely | | | | | MaLR | | | | | | | | | |
| AluSx1_dup42979 | Multi/ | No | — | — | SINE | Alu | chr7: 108087177-108087468 | − | 55 | 292 | NRCAM | Proximal | 0 | Not documented | 52 |
| | Uniquely | | | | | | | | | | | | | | |
| AluSx3_dup12093 | Multi/ | No | — | — | SINE | Alu | chr7: 108087700-108088013 | − | 56 | 314 | NRCAM | Proximal | 0 | Not documented | 53 |
| | Uniquely | | | | | | | | | | | | | | |
| X7A_LINE_dup418 | Multi | No | — | — | LINE | CR1 | chr7: 108088385-108088455 | − | 100 | 71 | NRCAM | Proximal | 0 | Not documented | 54 |
| L2a_dup77777 | Multi | No | — | — | LINE | L2 | chr7: 108091233-108091272 | + | 100 | 40 | NRCAM | Proximal | 0 | Not documented | 55 |
| AluSx1_dup42980 | Multi | No | — | — | SINE | Alu | chr7: 108091381-108091692 | + | 63 | 312 | NRCAM | Proximal | 0 | Not documented | 56 |
| MIR_dup77569 | Multi/ | No | — | — | SINE | MIR | chr7: 108094823-108094996 | + | 110 | 174 | NRCAM | Proximal | 0 | Not documented | 57 |
| | Uniquely | | | | | | | | | | | | | | |
| MIRb_dup97492 | Multi | No | — | — | SINE | MIR | chr7: 108202972-108203131 | − | 150 | 160 | THAP5 | Proximal | 0 | Not documented | 58 |
| AluSx_dup55726 | Multi/ | No | — | — | SINE | Alu | chr7: 108203700-108204011 | + | 42 | 312 | THAP5 | Proximal | 0 | Not documented | 59 |
| | Uniquely | | | | | | | | | | | | | | |
| MLT1A0_dup9624 | Uniquely | No | — | — | LTR | ERVL- | chr7: 110828302-110828651 | − | 91 | 350 | IMMP2L | Proximal | 0 | Not documented | 60 |
| | | | | | | MaLR | | | | | | | | | |
| AluSz_dup38654 | Multi | No | — | — | SINE | Alu | chr7: 110906318-110906618 | + | 57 | 301 | IMMP2L | Proximal | 0 | Not documented | 61 |
| L1P4_dup1576 | Multi | No | — | — | LINE | L1PA\|B\|x | chr7: 110916639-110917495 | + | 65 | 857 | IMMP2L | Proximal | 0 | Not documented | 62 |
| L1MD1_dup2953 | Multi/ | No | — | — | LINE | Other L1 | chr7: 110940434-110941928 | − | 76 | 1495 | IMMP2L | Proximal | 0 | Not documented | 63 |
| | Uniquely | | | | | | | | | | | | | | |
| L1MC4_dup13044 | Multi/ | No | — | — | LINE | Other L1 | chr7: 110969239-110970729 | + | 120 | 1491 | IMMP2L | Proximal | 0 | Not documented | 64 |
| | Uniquely | | | | | | | | | | | | | | |
| L2_dup26139 | Uniquely | No | — | — | LINE | L2 | chr7: 111021906-111022881 | − | 170 | 976 | IMMP2L | Proximal | 0 | Not documented | 65 |
| L1PB_dup747 | Uniquely | No | — | — | LINE | L1PA\|B\|x | chr7: 111038231-111039422 | + | 35 | 1192 | IMMP2L | Proximal | 0 | EVE annotated | 66 |
| MSTB-int_dup370 | Uniquely | No | — | — | LTR | ERVL- | chr7: 11112716-11113826 | − | 88 | 1111 | PHF14 | Proximal | 0 | Not documented | 67 |
| | | | | | | MaLR | | | | | | | | | |
| AluJo_dup28391 | Multi | No | — | — | SINE | Alu | chr7: 112100297-112100598 | − | 72 | 302 | IFRD1 | Proximal | 0 | Not documented | 68 |
| MIR3_dup39920 | Multi | No | — | — | SINE | MIR | chr7: 112101587-112101787 | − | 170 | 201 | IFRD1 | Proximal | 0 | Not documented | 69 |
| L2b_dup42413 | Uniquely | No | — | — | LINE | L2 | chr7: 112428767-112429467 | + | 150 | 701 | TMEM168 | Proximal | 0 | Not documented | 70 |
| Tigger2_dup1338 | Uniquely | No | — | — | DNA | DNA | chr7: 116687926-116689977 | − | 60 | 2052 | ST7-OT4 | Proximal | 0 | Not documented | 71 |
| L2c_dup64777 | Multi | No | — | — | LINE | L2 | chr7: 116738282-116738692 | + | 150 | 411 | ST7-OT4 | Proximal | 0 | Not documented | 72 |
| Plat_L3_dup1727 | Multi | Nc | — | — | LINE | CR1 | chr7: 116774127-116774332 | − | 170 | 206 | ST7 | Proximal | 0 | Not documented | 73 |
| L1PA13_dup3710 | Uniquely | No | — | — | LINE | L1PA\|B\|x | chr7: 11986766-11990668 | − | 65 | 3903 | THSD7A | Distal | 114943 | Not documented | 74 |
| L2a_dup78468 | Uniquely | No | — | — | LINE | L2 | chr7: 119979652-119982001 | − | 140 | 2350 | KCND2 | Proximal | 0 | Not documented | 3975 |
| L2b_dup42588 | Uniquely | No | — | — | LINE | L2 | chr7: 120054845-120055360 | + | 160 | 516 | KCND2 | Proximal | 0 | Not documented | 76 |
| L2b_dup42589 | Uniquely | No | — | — | LINE | L2 | chr7: 120055526-120056241 | + | 160 | 716 | KCND2 | Proximal | 0 | Not documented | 77 |
| L1PA13_dup4004 | Uniquely | No | — | — | LINE | L1PA\|B\|x | chr7: 120092425-120093569 | + | 130 | 1145 | KCND2 | Proximal | 0 | Not documented | 78 |
| Tigger1_dup5804 | Uniquely | No | — | — | DNA | DNA | chr7: 120176110-120178489 | − | 64 | 2380 | KCND2 | Proximal | 0 | Not documented | 79 |
| LTR62_dup97 | Multi | No | — | — | LTR | ERVL | chr7: 1202508-1202802 | + | 100 | 295 | ZFANDZA | Distal | 2114 | Not documented | 80 |
| MLT2B3_dup1457 | Uniquely | No | — | — | LTR | ERVL | chr7: 1204112-1204643 | − | 110 | 532 | ZFANDZA | Distal | 3718 | Not documented | 81 |
| L1MB7_dup9209 | Multi/ | No | — | — | LINE | Other L1 | chr7: 121515110-121515485 | − | 73 | 376 | PTPRZ1 | Proximal | 0 | Not documented | 82 |
| | Uniquely | | | | | | | | | | | | | | |
| L2b_dup42636 | Multi | No | — | — | LINE | L2 | chr7: 121515942-121516013 | + | 160 | 72 | PTPRZ1 | Proximal | 0 | Not documented | 83 |
| MIRb_dup98195 | Multi/ | No | — | — | SINE | MIR | chr7: 121517137-121517308 | − | 150 | 172 | PTPRZ1 | Proximal | 0 | Not documented | 84 |
| | Uniquely | | | | | | | | | | | | | | |
| AluSc_dup14626 | Multi/ | No | — | — | SINE | Alu | chr7: 121556048-121556344 | + | 46 | 297 | PTPRZ1 | Proximal | 0 | Not documented | 85 |
| | Uniquely | | | | | | | | | | | | | | |
| MIRb_dup98198 | Multi/ | No | — | — | SINE | MIR | chr7: 121568488-121568673 | + | 100 | 186 | PTPRZ1 | Proximal | 0 | Not documented | 86 |
| | Uniquely | | | | | | | | | | | | | | |
| L1ME4a_dup19475 | Multi | No | — | — | LINE | Other L1 | chr7: 121569140-121569316 | − | 110 | 177 | PTPRZ1 | Proximal | 0 | Not documented | 87 |
| THE1D_dup5998 | Multi/ | No | — | — | LTR | ERVL- | chr7: 121618386-121618758 | − | 65 | 373 | PTPRZ1 | Proximal | 0 | Not documented | 88 |
| | Uniquely | | | | | MaLR | | | | | | | | | |
| AluYf4_dup582 | Multi | No | — | — | SINE | Alu | chr7: 121620915-121621221 | + | 22 | 307 | PTPRZ1 | Proximal | 0 | Not documented | 89 |
| L2b_dup42643 | Multi/ | No | — | — | LINE | L2 | chr7: 121625439-121626031 | + | 150 | 593 | PTPRZ1 | Proximal | 0 | Not documented | 90 |
| | Uniquely | | | | | | | | | | | | | | |
| MIRb_dup98200 | Multi/ | No | — | — | SINE | MIR | chr7: 121626194-121626423 | − | 130 | 230 | PTPRZ1 | Proximal | 0 | Not documented | 91 |
| | Uniquely | | | | | | | | | | | | | | |
| L1PA16_dup6424 | Multi | No | — | — | LINE | L1PA\|B\|x | chr7: 121627438-121627756 | − | 47 | 319 | PTPRZ1 | Proximal | 0 | Not documented | 92 |
| L1PA16_dup6425 | Multi | No | — | — | LINE | L1PA\|B\|x | chr7: 121627757-121628233 | + | 76 | 477 | PTPRZ1 | Proximal | 0 | Not documented | 93 |
| MIRb_dup98201 | Multi | No | — | — | SINE | MIR | chr7: 121631062-121631272 | + | 160 | 211 | PTPRZ1 | Proximal | 0 | Not documented | 94 |
| AluY_dup49612 | Multi | No | — | — | SINE | Alu | chr7: 121654509-121654791 | − | 29 | 283 | PTPRZ1 | Proximal | 0 | Not documented | 95 |
| AluSp_dup20064 | Multi | No | — | — | SINE | Alu | chr7: 121665371-121665684 | − | 42 | 314 | PTPRZ1 | Proximal | 0 | Not documented | 96 |
| L3_dup20726 | Multi | No | — | — | LINE | CR1 | chr7: 121666235-121666382 | + | 150 | 148 | PTPRZ1 | Proximal | 0 | Not documented | 97 |
| L2a_dup78566 | Multi/ | No | — | — | LINE | L2 | chr7: 121666928-121667490 | − | 150 | 563 | PTPRZ1 | Proximal | 0 | Not documented | 98 |
| | Uniquely | | | | | | | | | | | | | | |
| L1M3_dup2728 | Multi | No | — | — | LINE | Other L1 | chr7: 121668467-121668497 | + | 30 | 31 | PTPRZ1 | Proximal | 0 | Not documented | 99 |
| L1PA17_dup2142 | Multi | No | — | — | LINE | L1PA\|B\|x | chr7: 121669409-121669466 | − | 78 | 58 | PTPRZ1 | Proximal | 0 | Not documented | 4000 |
| MIRb_dup98202 | Multi/ | No | — | — | SINE | MIR | chr7: 121672282-121672493 | − | 150 | 212 | PTPRZ1 | Proximal | 0 | Not documented | 1 |
| | Uniquely | | | | | | | | | | | | | | |
| MIRc_dup45773 | Multi | No | — | — | SINE | MIR | chr7: 121679192-121679255 | + | 150 | 64 | PTPRZ1 | Proximal | 0 | Not documented | 2 |
| AluSz_dup38838 | Multi | No | — | — | SINE | Alu | chr7: 121679771-121680063 | + | 67 | 293 | PTPRZ1 | Proximal | 0 | Not documented | 3 |
| MLT1C_dup8325 | Uniquely | No | — | — | LTR | ERVL- | chr7: 121682860-121683268 | − | 100 | 409 | PTPRZ1 | Proximal | 0 | Not documented | 4 |
| | | | | | | MaLR | | | | | | | | | |
| AluJb_dup57765 | Multi/ | No | — | — | SINE | Alu | chr7: 121687702-121688007 | − | 76 | 306 | PTPRZ1 | Proximal | 0 | Not documented | 5 |
| | Uniquely | | | | | | | | | | | | | | |
| L1MB8_dup6735 | Multi/ | No | — | — | LINE | Other L1 | chr7: 121713629-121714148 | − | 79 | 520 | AASS | Proximal | 1554 | Not documented | 6 |
| | Uniquely | | | | | | | | | | | | | | |
| L1MB8_dup6736 | Multi/ | No | — | — | LINE | Other L1 | chr7: 121714149-121714875 | − | 79 | 727 | AASS | Proximal | 827 | Not documented | 7 |
| | Uniquely | | | | | | | | | | | | | | |
| AluJb_dup57767 | Multi | No | — | — | SINE | Alu | chr7: 121714904-121715076 | − | 100 | 173 | AASS | Proximal | 626 | Not documented | 8 |
| AluJb_dup57768 | Multi | No | — | — | SINE | Alu | chr7: 121715115-121715227 | − | 100 | 113 | AASS | Proximal | 475 | Not documented | 9 |
| L1MB8_dup6738 | Multi/ | No | — | — | LINE | Other L1 | chr7: 121715228-121715758 | − | 87 | 531 | AASS | Proximal | 0 | Not documented | 10 |
| | Uniquely | | | | | | | | | | | | | | |
| AluY_dup49614 | Multi/ | No | — | — | SINE | Alu | chr7: 121716028-121716257 | + | 22 | 230 | AASS | Proximal | 0 | Not documented | 11 |
| | Uniquely | | | | | | | | | | | | | | |
| MER44A_dup1137 | Multi/ | No | — | — | DNA | DNA | chr7: 121778306-121778649 | − | 59 | 344 | AASS | Proximal | 0 | Not documented | 12 |
| | Uniquely | | | | | | | | | | | | | | |
| AluSz6_dup18730 | Multi/ | No | — | — | SINE | Alu | chr7: 121779730-121779998 | + | 76 | 269 | AASS | Proximal | 0 | Not documented | 13 |
| | Uniquely | | | | | | | | | | | | | | |
| AluY_dup49615 | Multi/ | No | — | — | SINE | Alu | chr7: 121780258-121780565 | + | 28 | 308 | AASS | Proximal | 0 | Not documented | 14 |
| | Uniquely | | | | | | | | | | | | | | |
| AluSz_dup38931 | Multi | No | — | — | SINE | Alu | chr7: 127448215-127448518 | − | 64 | 304 | SND1 | Proximal | 0 | Not documented | 15 |
| L2b_dup42822 | Uniquely | No | — | — | LINE | L2 | chr7: 128096379-128096471 | + | 150 | 93 | HILPDA | Proximal | 0 | Not documented | 16 |
| AluSx1_dup43328 | Multi/ | No | — | — | SINE | Alu | chr7: 128097684-128097984 | + | 47 | 301 | HILPDA | Proximal | 0 | Not documented | 17 |
| | Uniquely | | | | | | | | | | | | | | |
| FLAM_A_dup7007 | Multi | No | — | — | SINE | Alu | chr7: 128142041-128142153 | + | 56 | 113 | METTL2B | Proximal | 0 | Not documented | 18 |
| AluSx1_dup43334 | Multi | No | — | — | SINE | Alu | chr7: 128142672-128142973 | + | 36 | 302 | METTL2B | Proximal | 0 | Not documented | 19 |
| AluSq_dup8742 | Multi | No | — | — | SINE | Alu | chr7: 128298962-128299089 | − | 53 | 128 | FAM71F2 | Distal | 13254 | Not documented | 20 |
| AluSx1_dup43355 | Multi | No | — | — | SINE | Alu | chr7: 128301151-128301461 | − | 57 | 311 | FAM71F2 | Distal | 10882 | Not documented | 21 |
| THE1B_dup10309 | Multi | No | — | — | LTR | ERVL- | chr7: 128301462-128301682 | + | 60 | 221 | FAM71F2 | Distal | 10661 | Not documented | 22 |
| | | | | | | MaLR | | | | | | | | | |
| THE1B-int_dup2153 | Multi/ | No | — | — | LTR | ERVL- | chr7: 128301683-128303228 | + | 36 | 1546 | FAM71F2 | Distal | 9115 | Not documented | 23 |
| | Uniquely | | | | | MaLR | | | | | | | | | |
| THE1B_dup10310 | Multi | No | — | — | LTR | ERVL- | chr7: 128303229-128303583 | + | 50 | 355 | FAM71F2 | Distal | 8760 | Not documented | 24 |
| | | | | | | MaLR | | | | | | | | | |
| AluJr_dup31250 | Multi | No | — | — | SINE | Alu | chr7: 128385392-128385667 | + | 82 | 276 | CALU | Proximal | 0 | Not documented | 4025 |
| L1ME3C_dup5509 | Multi | No | — | — | LINE | Other L1 | chr7: 128385898-128386205 | − | 130 | 308 | CALU | Proximal | 0 | Not documented | 26 |
| L1M5_dup28793 | Multi | No | — | — | LINE | Other L1 | chr7: 128624023-128624249 | − | 140 | 227 | TNPO3 | Proximal | 0 | Not documented | 27 |
| AluJb_dup58047 | Multi | No | — | — | SINE | Alu | chr7: 128921331-128921638 | − | 58 | 308 | AHCYL2 | Proximal | 0 | Not documented | 28 |
| L1ME1_dup14471 | Multi | No | — | — | LINE | Other L1 | chr7: 128921639-128922045 | − | 110 | 407 | AHCYL2 | Proximal | 0 | Not documented | 29 |
| L1ME1_dup14472 | Multi | No | — | — | LINE | Other L1 | chr7: 128922042-128923321 | − | 100 | 1280 | AHCYL2 | Proximal | 0 | Not documented | 30 |
| FLAM_A_dup7022 | Multi/ | No | — | — | SINE | Alu | chr7: 129069369-129069504 | − | 77 | 136 | AHCYL2 | Proximal | 0 | Not documented | 31 |
| | Uniquely | | | | | | | | | | | | | | |
| FLAM_C_dup9013 | Uniquely | No | — | — | SINE | Alu | chr7: 129250712-129250844 | + | 48 | 133 | NRF1 | Proximal | 712 | Not documented | 32 |
| L1MB8_dup6776 | Multi/ | No | — | — | LINE | Other L1 | chr7: 129494483-129495029 | + | 73 | 547 | UBE2H | Proximal | 0 | Not documented | 33 |
| | Uniquely | | | | | | | | | | | | | | |
| AluSx_dup56349 | Multi | No | — | — | SINE | Alu | chr7: 129805616-129805917 | + | 48 | 302 | TMEM209 | Proximal | 0 | Not documented | 34 |
| L3_dup20876 | Uniquely | No | — | — | LINE | CR1 | chr7: 130140460-130140586 | + | 130 | 127 | MEST | Proximal | 0 | Not documented | 35 |
| AluSx_dup56372 | Multi/ | No | — | — | SINE | Alu | chr7: 130141565-130141855 | + | 49 | 291 | MEST | Proximal | 0 | Not documented | 36 |
| | Uniquely | | | | | | | | | | | | | | |
| AluSp_dup20197 | Multi/ | No | — | — | SINE | Alu | chr7: 130151774-130152026 | + | 45 | 253 | COPG2 | Proximal | 0 | Not documented | 37 |
| | Uniquely | | | | | | | | | | | | | | |
| AluSz_dup39106 | Uniquely | No | — | — | SINE | Alu | chr7: 130152339-130152599 | + | 49 | 261 | COPG2 | Proximal | 0 | Not documented | 38 |
| AluSq2_dup22381 | Multi/ | No | — | — | SINE | Alu | chr7: 130152845-130153150 | + | 55 | 306 | COPG2 | Proximal | 0 | Not documented | 39 |
| | Uniquely | | | | | | | | | | | | | | |
| L1PA7_dup6349 | Uniquely | No | — | — | LINE | L1PA\|B\|x | chr7: 130317614-130324060 | − | 38 | 6447 | COPG2 | Proximal | 0 | EVE annotated | 40 |
| L1HS_dup780 | Multi | No | — | — | LINE | L1PA\|B\|x | chr7: 130576694-130577078 | + | 3.6 | 385 | KLF14 | Distal | 157807 | Not documented | 41 |
| MIR_dup78674 | Uniquely | No | — | — | SINE | MIR | chr7: 131015144-131015374 | − | 110 | 231 | MKLN1 | Proximal | 0 | Not documented | 42 |
| L1MEg_dup8462 | Multi | No | — | — | LINE | Other L1 | chr7: 131020326-131023378 | − | 110 | 3053 | MKLN1 | Proximal | 0 | Not documented | 43 |
| L1MEd_dup5131 | Multi | No | — | — | LINE | Other L1 | chr7: 131063661-131064255 | + | 150 | 595 | MKLN1 | Proximal | 0 | Not documented | 44 |
| L1MA1_dup1820 | Multi | No | — | — | LINE | Other L1 | chr7: 131064381-131064611 | + | 49 | 231 | MKLN1 | Proximal | 0 | Not documented | 45 |
| L1MEg_dup8464 | Multi | No | — | — | LINE | Other L1 | chr7: 131064612-131065055 | + | 150 | 444 | MKLN1 | Proximal | 0 | Not documented | 46 |
| AluJo_dup28726 | Multi | No | — | — | SINE | Alu | chr7: 131101456-131101762 | + | 79 | 307 | MKLN1 | Proximal | 0 | Not documented | 47 |
| MLT1H_dup4445 | Uniquely | No | — | — | LTR | ERVL- | chr7: 131116079-131116339 | − | 100 | 261 | MKLN1 | Proximal | 0 | Not documented | 48 |
| | | | | | | MaLR | | | | | | | | | |
| L1M5_dup28893 | Multi | No | — | — | LINE | Other L1 | chr7: 131138757-131139001 | + | 150 | 245 | MKLN1 | Proximal | 0 | Not documented | 49 |
| MLT1L_dup5697 | Multi | No | — | — | LTR | ERVL- | chr7: 131139288-131139805 | + | 120 | 518 | MKLN1 | Proximal | 0 | Not documented | 4050 |
| | | | | | | MaLR | | | | | | | | | |
| AluY_dup49983 | Multi | No | — | — | SINE | Alu | chr7: 131157428-131157734 | + | 31 | 307 | MKLN1 | Proximal | 0 | Not documented | 51 |
| L2a_dup79105 | Multi | No | — | — | LINE | L2 | chr7: 131158902-131159236 | − | 110 | 335 | MKLN1 | Proximal | 0 | Not documented | 52 |
| MSTA_dup8934 | Multi | No | — | — | LTR | ERVL- | chr7: 131159519-131159885 | − | 76 | 367 | MKLN1 | Proximal | 0 | Not documented | 53 |
| | | | | | | MaLR | | | | | | | | | |
| L1M5_dup28895 | Multi | No | — | — | LINE | Other L1 | chr7: 131159886-131160291 | + | 110 | 406 | MKLN1 | Proximal | 0 | Not documented | 54 |
| L1M5_dup28896 | Multi | No | — | — | LINE | Other L1 | chr7: 131160579-131162024 | + | 110 | 1446 | MKLN1 | Proximal | 0 | Not documented | 55 |
| AluJr_dup31413 | Multi | No | — | — | SINE | Alu | chr7: 131164013-131164301 | + | 74 | 289 | MKLN1 | Proximal | 0 | Not documented | 56 |
| AluY_dup49984 | Multi | No | — | — | SINE | Alu | chr7: 131164304-131164591 | + | 27 | 288 | MKLN1 | Proximal | 0 | Not documented | 57 |
| AluSx_dup56435 | Multi | No | — | — | SINE | Alu | chr7: 131164636-131164800 | + | 39 | 165 | MKLN1 | Proximal | 0 | Not documented | 58 |
| MIRb_dup98727 | Multi | No | — | — | SINE | MIR | chr7: 131165919-131166153 | + | 120 | 235 | MKLN1 | Proximal | 0 | Not documented | 59 |
| AluJo_dup28730 | Multi | No | — | — | SINE | Alu | chr7: 131166180-131166297 | + | 110 | 118 | MKLN1 | Proximal | 0 | Not documented | 60 |
| L1MC4_dup13259 | Uniquely | No | — | — | LINE | Other L1 | chr7: 131169441-131170845 | + | 98 | 1405 | MKLN1 | Proximal | 0 | Not documented | 61 |
| AluJr_dup31414 | Multi | No | — | — | SINE | Alu | chr7: 131177209-131177515 | + | 67 | 307 | MKLN1 | Proximal | 0 | Not documented | 62 |
| MIR_dup78756 | Uniquely | No | — | — | SINE | MIR | chr7: 132151077-132151310 | + | 150 | 234 | PLXNA4 | Proximal | 0 | Not documented | 63 |
| AluSg4_dup3053 | Uniquely | No | — | — | SINE | Alu | chr7: 132659354-132659663 | + | 41 | 310 | CHCHD3 | Proximal | 0 | Not documented | 64 |
| MIR_dup78835 | Multi | No | — | — | SINE | MIR | chr7: 133343929-133344057 | + | 170 | 129 | EXOC4 | Proximal | 0 | Not documented | 65 |
| AluSz_dup39247 | Multi | No | — | — | SINE | Alu | chr7: 133978541-133978843 | − | 48 | 303 | SLC35B4 | Proximal | 0 | Not documented | 66 |
| X6A_LINE_dup135 | Multi | No | — | — | LINE | CR1 | chr7: 133991446-133991489 | + | 110 | 44 | SLC35B4 | Proximal | 0 | Not documented | 67 |
| L2a_dup79335 | Multi/ | No | — | — | LINE | L2 | chr7: 134364094-134364145 | − | 79 | 52 | BPGM | Proximal | 0 | Not documented | 68 |
| | Uniquely | | | | | | | | | | | | | | |
| L1MA5_dup2078 | Multi | No | — | — | LINE | Other L1 | chr7: 134768966-134776042 | − | 73 | 7077 | AGBL3 | Proximal | 0 | Not documented | 69 |
| L1M4b_dup2752 | Uniquely | No | — | — | LINE | Other L1 | chr7: 134828423-134829351 | + | 100 | 929 | C7orf49 | Proximal | 0 | Not documented | 70 |
| Harlequin- | Multi | No | — | — | LTR | ERV1 | chr7: 134856495-134856835 | + | 46 | 341 | C7orf49 | Proximal | 949 | Not documented | 71 |
| int_dup266 | | | | | | | | | | | | | | | |
| MER6_dup380 | Multi | No | — | — | DNA | DNA | chr7: 135093233-135093621 | − | 80 | 389 | CNOT4 | Proximal | 0 | Not documented | 72 |
| L1ME4a_dup19746 | Multi | No | — | — | LINE | Other L1 | chr7: 135093647-135093752 | + | 130 | 106 | CNOT4 | Proximal | 0 | Not documented | 73 |
| L1MC4a_dup12329 | Multi | No | — | — | LINE | Other L1 | chr7: 135360136-135360353 | − | 130 | 218 | C7orf73 | Proximal | 0 | Not documented | 74 |
| AluSz6_dup18965 | Multi | No | — | — | SINE | Alu | chr7: 135360671-135360960 | − | 58 | 290 | C7orf73 | Proximal | 0 | Not documented | 4075 |
| MIRb_dup99051 | Multi | No | — | — | SINE | MIR | chr7: 135361016-135361153 | + | 120 | 138 | C7orf73 | Proximal | 0 | Not documented | 76 |
| ERV3-16A3_I- | Uniquely | No | — | — | LTR | ERVL | chr7: 136892411-136893619 | − | 120 | 1209 | PTN | Distal | 18470 | Not documented | 77 |
| int_dup3152 | | | | | | | | | | | | | | | |
| Harlequin- | Uniquely | No | — | — | LTR | ERV1 | chr7: 136947745-136950633 | − | 38 | 2889 | PTN | Proximal | 0 | EVE annotated | 78 |
| int_dup271 | | | | | | | | | | | | | | | |
| Harlequin- | Multi/ | No | — | — | LTR | ERV1 | chr7: 136951623-136952708 | − | 30 | 1086 | PTN | Proximal | 0 | EVE annotated | 79 |
| int_dup273 | Uniquely | | | | | | | | | | | | | | |
| Tigger3a_dup2593 | Multi | No | — | — | DNA | DNA | chr7: 137198285-137198563 | − | 54 | 279 | DGKI | Proximal | 0 | Not documented | 80 |
| AluSx_dup56719 | Multi | No | — | — | SINE | Alu | chr7: 138151209-138151397 | − | 72 | 189 | TRIM24 | Proximal | 0 | Not documented | 81 |
| L1MEc_dup8768 | Multi | No | — | — | LINE | Other L1 | chr7: 138151402-138152072 | − | 110 | 671 | TRIM24 | Proximal | 0 | Not documented | 82 |
| AluSc_dup14798 | Multi/ | No | — | — | SINE | Alu | chr7: 138152073-138152386 | − | 40 | 314 | TRIM24 | Proximal | 0 | Not documented | 83 |
| | Uniquely | | | | | | | | | | | | | | |
| L1MEc_dup8769 | Multi | No | — | — | LINE | Other L1 | chr7: 138152387-138153095 | − | 110 | 709 | TRIM24 | Proximal | 0 | Not documented | 84 |
| L1MEc_dup8770 | Multi | No | — | — | LINE | Other L1 | chr7: 138153122-138153418 | − | 110 | 297 | TRIM24 | Proximal | 0 | Not documented | 85 |
| L1PA6_dup2978 | Uniquely | No | — | — | LINE | L1PA\|LxB | chr7: 138170099-138175203 | − | 30 | 5105 | TRIM24 | Proximal | 0 | EVE annotated | 86 |
| L1MEg_dup8489 | Uniquely | No | — | — | LINE | Other L1 | chr7: 138204706-138205251 | + | 140 | 546 | TRIM24 | Proximal | 0 | Not documented | 87 |
| AluJo_dup28934 | Multi | No | — | — | SINE | Alu | chr7: 138707008-138707297 | + | 75 | 290 | ZC3HAV1L | Distal | 3156 | Not documented | 88 |
| MER5B_dup11312 | Multi | No | — | — | DNA | DNA | chr7: 138731749-138731791 | − | 81 | 43 | ZC3HAV1 | Proximal | 0 | Not documented | 89 |
| AluSx3_dup12342 | Multi | No | — | — | SINE | Alu | chr7: 138731792-138732097 | + | 46 | 306 | ZC3HAV1 | Proximal | 0 | Not documented | 90 |
| MER5B_dup11313 | Multi | No | — | — | DNA | DNA | chr7: 138732098-138732219 | − | 81 | 122 | ZC3HAV1 | Proximal | 0 | Not documented | 91 |
| AluJb_dup51472 | Uniquely | No | — | — | SINE | Alu | chr7: 139067127-139067438 | − | 83 | 312 | LUC7L2 | Proximal | 0 | Not documented | 92 |
| MER103C_dup4314 | Multi | No | — | — | DNA | DNA | chr7: 139102791-139102887 | − | 100 | 97 | LUC7L2 | Proximal | 0 | Not documented | 93 |
| AluSz_dup39464 | Multi | No | — | — | SINE | Alu | chr7: 139103582-139103887 | + | 49 | 306 | LUC7L2 | Proximal | 0 | Not documented | 94 |
| SVA_D_dup612 | Multi | No | — | — | Other | SVA | chr7: 139114123-139114720 | − | 10 | 598 | C7orf55-LUC7L2 | Distal | 5926 | Not documented | 95 |
| MIRb_dup99271 | Multi | No | — | — | SINE | MIR | chr7: 139250989-139251213 | + | 140 | 225 | HIPK2 | Proximal | 0 | Not documented | 96 |
| MIRb_dup99272 | Multi/ | No | — | — | SINE | MIR | chr7: 139251360-139251511 | + | 150 | 152 | HIPK2 | Proximal | 0 | Not documented | 97 |
| | Uniquely | | | | | | | | | | | | | | |
| Tigger5_dup1210 | Multi/ | No | — | — | DNA | DNA | chr7: 140033998-140034214 | + | 67 | 217 | SLC37A3 | Proximal | 0 | Not documented | 98 |
| | Uniquely | | | | | | | | | | | | | | |
| L1MB7_dup9369 | Uniquely | No | — | — | LINE | Other L1 | chr7: 140247195-140247893 | + | 72 | 699 | DENND2A | Proximal | 0 | Not documented | 99 |
| L2c_dup65999 | Uniquely | No | — | — | LINE | L2 | chr7: 141052815-141052986 | + | 150 | 172 | TMEM178B | Proximal | 0 | Not documented | 4100 |
| MIRb_dup99369 | Uniquely | No | — | — | SINE | MIR | chr7: 141094196-141094362 | + | 120 | 167 | TMEM178B | Proximal | 0 | Not documented | 1 |
| MER5A_dup16192 | Multi | No | — | — | DNA | DNA | chr7: 141353301-141353451 | − | 120 | 151 | AGK | Proximal | 0 | Not documented | 2 |
| Charlie2b_dup1790 | Multi | No | — | — | DNA | DNA | chr7: 141353495-141354402 | − | 95 | 908 | AGK | Proximal | 0 | Not documented | 3 |
| L1ME4a_dup19901 | Multi | No | — | — | LINE | Other L1 | chr7: 142967284-142967433 | + | 120 | 150 | GSTK1 | Proximal | 0 | Not documented | 4 |
| AluSq2_dup22658 | Multi | No | — | — | SINE | Alu | chr7: 142967434-142967725 | + | 40 | 292 | GSTK1 | Proximal | 0 | Not documented | 5 |
| L1MD2_dup4718 | Multi/ | No | — | — | LINE | Other L1 | chr7: 142968989-142969680 | − | 80 | 692 | GSTK1 | Proximal | 1043 | Not documented | 6 |
| | Uniquely | | | | | | | | | | | | | | |
| AluY_dup50417 | Multi | No | — | — | SINE | Alu | chr7: 143003343-143003647 | − | 31 | 305 | CASP2 | Proximal | 0 | Not documented | 7 |
| FLAM_C_dup9143 | Multi | No | — | — | SINE | Alu | chr7: 143003760-143003888 | − | 74 | 129 | CASP2 | Proximal | 0 | Not documented | 8 |
| L2a_dup79768 | Multi | No | — | — | LINE | L2 | chr7: 143003901-143004409 | + | 130 | 509 | CASP2 | Proximal | 0 | Not documented | 9 |
| L2c_dup66107 | Multi | No | — | — | LINE | L2 | chr7: 143004470-143004644 | + | 120 | 175 | CASP2 | Proximal | 0 | Not documented | 10 |
| MIR3_dup40795 | Multi | No | — | — | SINE | MIR | chr7: 143076993-143077103 | + | 130 | 111 | ZYX | Proximal | 1071 | Not documented | 11 |
| HAL1_dup13103 | Multi | No | — | — | LINE | Other L1 | chr7: 143304831-143305012 | + | 160 | 182 | FAM115C | Distal | 13032 | Not documented | 12 |
| AluJr_dup31757 | Multi | No | — | — | SINE | Alu | chr7: 143305714-143305952 | + | 65 | 239 | FAM115C | Distal | 12092 | Not documented | 13 |
| HAL1_dup13104 | Multi | No | — | — | LINE | Other L1 | chr7: 143305957-143306638 | + | 120 | 682 | FAM115C | Distal | 11406 | Not documented | 14 |
| HAL1_dup13105 | Multi | No | — | — | LINE | Other L1 | chr7: 143307376-143307635 | + | 110 | 260 | FAM115C | Distal | 10409 | Not documented | 15 |
| LTR45C_dup173 | Multi | No | — | — | LTR | ERV1 | chr7: 143342468-143342853 | + | 72 | 386 | FAM115C | Proximal | 0 | Not documented | 16 |
| LTR45C_dup174 | Multi | No | — | — | LTR | ERV1 | chr7: 143418662-143419055 | − | 73 | 394 | FAM115C | Proximal | 0 | Not documented | 17 |
| LTR45C_dup175 | Multi | No | — | — | LTR | ERV1 | chr7: 143508970-143509361 | − | 72 | 392 | FAM115A | Distal | 39108 | Not documented | 18 |
| HAL1_dup13109 | Multi | No | — | — | LINE | Other L1 | chr7: 143548494-143548749 | − | 100 | 256 | FAM115A | Proximal | 0 | Not documented | 19 |
| HAL1_dup13110 | Multi | No | — | — | LINE | Other L1 | chr7: 143549487-143550164 | − | 120 | 678 | FAM115A | Proximal | 0 | Not documented | 20 |
| AluJr_dup31758 | Multi | No | — | — | SINE | Alu | chr7: 143550169-143550407 | − | 63 | 239 | FAM115A | Proximal | 0 | Not documented | 21 |
| HAL1_dup13111 | Multi | No | — | — | LINE | Other L1 | chr7: 143551209-143551290 | − | 150 | 82 | FAM115A | Proximal | 0 | Not documented | 22 |
| AluSc8_dup9193 | Uniquely | No | — | — | SINE | Alu | chr7: 148199204-148199472 | + | 40 | 269 | CNTNAP2 | Distal | 81115 | Not documented | 23 |
| Tigger15a_dup2518 | Multi/ | No | — | — | DNA | DNA | chr7: 148522692-148523022 | + | 140 | 331 | EZH2 | Proximal | 0 | Not documented | 24 |
| | Uniquely | | | | | | | | | | | | | | |
| MIR_dup79576 | Multi/ | No | — | — | SINE | MIR | chr7: 148552471-148552680 | + | 110 | 210 | EZH2 | Proximal | 0 | Not documented | 4125 |
| | Uniquely | | | | | | | | | | | | | | |
| AluSg_dup17340 | Multi/ | No | — | — | SINE | Alu | chr7: 148552714-148553013 | + | 35 | 300 | EZH2 | Proximal | 0 | Not documented | 26 |
| | Uniquely | | | | | | | | | | | | | | |
| L1M4c_dup2472 | Multi | No | — | — | LINE | Other L1 | chr7: 148700502-148700781 | + | 140 | 280 | PDIA4 | Proximal | 0 | Not documented | 27 |
| AluJo_dup29140 | Uniquely | No | — | — | SINE | Alu | chr7: 148800312-148800606 | − | 59 | 295 | ZNF425 | Proximal | 0 | Not documented | 28 |
| L3_dup21304 | Uniquely | No | — | — | LINE | CR1 | chr7: 148879054-148879178 | + | 130 | 125 | ZNF398 | Proximal | 0 | Not documented | 29 |
| MIR3_dup40951 | Multi | No | — | — | SINE | MIR | chr7: 148981959-148981996 | + | 110 | 38 | ZNF783 | Proximal | 0 | Not documented | 30 |
| L2b_dup43409 | Multi | No | — | — | LINE | L2 | chr7: 148994309-148994370 | + | 120 | 62 | ZNF783 | Proximal | 0 | Not documented | 31 |
| MIRc_dup46623 | Multi | No | — | — | SINE | MIR | chr7: 149170486-149170565 | + | 96 | 80 | ZNF746 | Proximal | 0 | Not documented | 32 |
| MER70B_dup226 | Multi | No | — | — | LTR | ERVL | chr7: 149244195-149244631 | − | 86 | 437 | ZNF746 | Distal | 49288 | Not documented | 33 |
| LOR1a_dup376 | Uniquely | No | — | — | LTR | ERV1 | chr7: 149245146-149245645 | + | 66 | 500 | ZNF746 | Distal | 50239 | Not documented | 34 |
| L2c_dup66365 | Multi | No | — | — | LINE | L2 | chr7: 149536532-149536627 | − | 160 | 96 | ZNF862 | Proximal | 0 | Not documented | 35 |
| Tigger3_dup570 | Multi | No | — | — | DNA | DNA | chr7: 149537100-149537200 | + | 110 | 101 | ZNF862 | Proximal | 0 | Not documented | 36 |
| L3_dup21315 | Multi/ | No | — | — | LINE | CR1 | chr7: 150070867-150071095 | − | 140 | 229 | REPIN1 | Proximal | 0 | Not documented | 37 |
| | Uniquely | | | | | | | | | | | | | | |
| MIR3_dup41007 | Multi/ | No | — | — | SINE | MIR | chr7: 150774485-150774599 | + | 170 | 115 | FASTK | Proximal | 0 | Not documented | 38 |
| | Uniquely | | | | | | | | | | | | | | |
| MIR_dup79654 | Multi | No | — | — | SINE | MIR | chr7: 150937804-150938054 | + | 120 | 251 | SMARCD3 | Proximal | 0 | Not documented | 39 |
| MIRc_dup46667 | Multi | No | — | — | SINE | MIR | chr7: 150938099-150938296 | − | 140 | 198 | SMARCD3 | Proximal | 0 | Not documented | 40 |
| MIRc_dup46668 | Multi | No | — | — | SINE | MIR | chr7: 150938356-150938474 | − | 140 | 119 | SMARCD3 | Proximal | 0 | Not documented | 41 |
| L1MC5_dup9255 | Multi | No | — | — | LINE | Other L1 | chr7: 151057646-151057711 | − | 110 | 66 | NUB1 | Proximal | 0 | Not documented | 42 |
| AluJb_dup59167 | Multi | No | — | — | SINE | Alu | chr7: 151057712-151058017 | − | 70 | 306 | NUB1 | Proximal | 0 | Not documented | 43 |
| L1MC5_dup9256 | Multi | No | — | — | LINE | Other L1 | chr7: 151058167-151058624 | − | 110 | 458 | NUB1 | Proximal | 0 | Not documented | 44 |
| MIR_dup79693 | Multi | No | — | — | SINE | MIR | chr7: 151903091-151903275 | + | 120 | 185 | KMT2C | Proximal | 0 | Not documented | 45 |
| L1MEc_dup8884 | Uniquely | No | — | — | LINE | Other L1 | chr7: 151924463-151924850 | + | 140 | 388 | KMT2C | Proximal | 0 | Not documented | 46 |
| L1MDa_dup3081 | Multi | No | — | — | LINE | Other L1 | chr7: 151983680-151984827 | + | 120 | 1148 | KMT2C | Proximal | 0 | Not documented | 47 |
| AluSz_dup39963 | Multi | No | — | — | SINE | Alu | chr7: 151984828-151985130 | + | 54 | 303 | KMT2C | Proximal | 0 | Not documented | 48 |
| L1MEc_dup8886 | Multi | No | — | — | LINE | Other L1 | chr7: 151994223-151996122 | + | 95 | 1900 | KMT2C | Proximal | 0 | Not documented | 49 |
| AluSx_dup57585 | Multi | No | — | — | SINE | Alu | chr7: 152290963-152291265 | − | 40 | 303 | XRCC2 | Distal | 50600 | Not documented | 4150 |
| L1ME1_dup14715 | Uniquely | No | — | — | LINE | Other L1 | chr7: 152539652-152540590 | − | 110 | 939 | ACTR3B | Proximal | 0 | Not documented | 51 |
| AluSq2_dup22884 | Uniquely | No | — | — | SINE | Alu | chr7: 153488506-153488803 | − | 52 | 298 | DPP6 | Distal | 95380 | Not documented | 52 |
| L1ME3A_dup7328 | Uniquely | No | — | — | LINE | Other L1 | chr7: 153574913-153575870 | + | 120 | 958 | DPP6 | Distal | 8313 | Not documented | 53 |
| AluSz_dup40045 | Multi/ | No | — | — | SINE | Alu | chr7: 153711471-153711776 | + | 49 | 306 | DPP6 | Proximal | 0 | Not documented | 54 |
| | Uniquely | | | | | | | | | | | | | | |
| L2a_dup80351 | Uniquely | No | — | — | LINE | L2 | chr7: 153712248-153713321 | + | 140 | 1074 | DPP6 | Proximal | 0 | Not documented | 55 |
| MER103C_dup4361 | Uniquely | No | — | — | DNA | DNA | chr7: 153828246-153828448 | + | 170 | 203 | DPP6 | Proximal | 0 | Not documented | 56 |
| L1ME1_dup14739 | Uniquely | No | — | — | LINE | Other L1 | chr7: 153891729-153892331 | − | 110 | 603 | DPP6 | Proximal | 0 | Not documented | 57 |
| MIR_dup79768 | Uniquely | No | — | — | SINE | MIR | chr7: 153907461-153907659 | + | 150 | 199 | DPP6 | Proximal | 0 | Not documented | 58 |
| Tigger2a_dup1603 | Uniquely | No | — | — | DNA | DNA | chr7: 153936389-153936767 | + | 58 | 379 | DPP6 | Proximal | 0 | Not documented | 59 |
| L1ME2_dup5946 | Uniquely | No | — | — | LINE | Other L1 | chr7: 153939540-153940597 | + | 130 | 1058 | DPP6 | Proximal | 0 | Not documented | 60 |
| LTR87_dup321 | Uniquely | No | — | — | LTR | ERVL | chr7: 154501625-154501912 | + | 120 | 288 | DPP6 | Proximal | 0 | Not documented | 61 |
| AluSx3_dup10918 | Multi | No | — | — | SINE | Alu | chr7: 154796010-154796310 | + | 38 | 301 | PAXIP1 | Proximal | 1217 | Not documented | 62 |
| L1MD1_dup2750 | Uniquely | No | — | — | LINE | Other L1 | chr7: 15692293-15698196 | − | 93 | 5904 | MEOX2 | Proximal | 0 | Not documented | 63 |
| L2_dup27139 | Uniquely | No | — | — | LINE | L2 | chr7: 158725212-158725800 | − | 170 | 589 | WDR60 | Proximal | 0 | Not documented | 64 |
| AluJr_dup26599 | Multi | No | — | — | SINE | Alu | chr7: 1609122-1609418 | + | 67 | 297 | PSMG3 | Proximal | 0 | Not documented | 65 |
| L2a_dup73623 | Uniquely | No | — | — | LINE | L2 | chr7: 20384453-20384789 | − | 140 | 337 | ITGB8 | Proximal | 0 | Not documented | 66 |
| MLT1J_dup6601 | Uniquely | No | — | — | LTR | ERVL- | chr7: 20394065-20394481 | − | 150 | 417 | ITGB8 | Proximal | 0 | Not documented | 67 |
| | | | | | | MaLR | | | | | | | | | |
| MIRb_dup92056 | Uniquely | No | — | — | SINE | MIR | chr7: 20404977-20405201 | + | 130 | 225 | ITGB8 | Proximal | 0 | Not documented | 68 |
| MLT1A_dup3909 | Uniquely | No | — | — | LTR | ERVL- | chr7: 20408877-20409269 | − | 85 | 393 | ITGB8 | Proximal | 0 | Not documented | 69 |
| | | | | | | MaLR | | | | | | | | | |
| AluSq2_dup20161 | Multi/ | No | — | — | SINE | Alu | chr7: 20450770-20451076 | − | 49 | 307 | ITGB8 | Proximal | 0 | Not documented | 70 |
| | Uniquely | | | | | | | | | | | | | | |
| MIRc_dup42961 | Multi/ | No | — | — | SINE | MIR | chr7: 20451077-20451232 | − | 180 | 156 | ITGB8 | Proximal | 0 | Not documented | 71 |
| | Uniquely | | | | | | | | | | | | | | |
| MER91C_dup630 | Multi/ | No | — | — | DNA | DNA | chr7: 20451398-20451479 | + | 160 | 82 | ITGB8 | Proximal | 0 | Not documented | 72 |
| | Uniquely | | | | | | | | | | | | | | |
| Kangala_dup367 | Multi | No | — | — | DNA | DNA | chr7: 20453649-20453724 | + | 96 | 76 | ITGB8 | Proximal | 0 | Not documented | 73 |
| AluSx1_dup38682 | Multi | No | — | — | SINE | Alu | chr7: 21552181-21552479 | − | 38 | 299 | SP4 | Proximal | 0 | Not documented | 74 |
| AluSx_dup50421 | Multi | No | — | — | SINE | Alu | chr7: 21941047-21941198 | + | 66 | 152 | CDCA7L | Proximal | 0 | Not documented | 4175 |
| AluJr4_dup6915 | Multi | No | — | — | SINE | Alu | chr7: 2274157-2274289 | − | 89 | 133 | FTSJ2 | Proximal | 0 | Not documented | 76 |
| AluY_dup45580 | Uniquely | No | — | — | SINE | Alu | chr7: 23161300-23161599 | − | 44 | 300 | KLHL7 | Proximal | 0 | Not documented | 77 |
| MER44B_dup947 | Multi | No | — | — | DNA | DNA | chr7: 23165480-23165990 | − | 63 | 511 | KLHL7 | Proximal | 0 | Not documented | 78 |
| X3_LINE_dup333 | Multi/ | No | — | — | LINE | RTE-BovB | chr7: 2402314-2402363 | + | 120 | 50 | EIF3B | Proximal | 0 | Not documented | 79 |
| | Uniquely | | | | | | | | | | | | | | |
| L1PA7_dup5882 | Uniquely | No | — | — | LINE | L1PA\|B\|x | chr7: 24666089-24670119 | + | 37 | 4031 | MPP6 | Proximal | 0 | EVE annotated | 80 |
| L2a_dup73965 | Multi/ | No | — | — | LINE | L2 | chr7: 26213888-26214209 | − | 120 | 322 | NFE2L3 | Proximal | 0 | Not documented | 81 |
| | Uniquely | | | | | | | | | | | | | | |
| AluY_dup45699 | Multi/ | No | — | — | SINE | Alu | chr7: 26214685-26214992 | + | 35 | 308 | NFE2L3 | Proximal | 0 | Not documented | 82 |
| | Uniquely | | | | | | | | | | | | | | |
| AluSc8_dup8232 | Uniquely | No | — | — | SINE | Alu | chr7: 26442990-26443260 | − | 44 | 271 | SNX10 | Distal | 29042 | Not documented | 83 |
| MIRc_dup43146 | Multi/ | No | — | — | SINE | MIR | chr7: 26534242-26534276 | − | 78 | 35 | KIAA0087 | Distal | 38465 | Not documented | 84 |
| | Uniquely | | | | | | | | | | | | | | |
| L2a_dup73979 | Multi | No | — | — | LINE | L2 | chr7: 26534305-26534499 | − | 120 | 195 | KIAA0087 | Distal | 38242 | Not documented | 85 |
| Tigger2_dup1241 | Uniquely | No | — | — | DNA | DNA | chr7: 27579272-27581923 | − | 52 | 2652 | HIBADH | Proximal | 0 | Not documented | 86 |
| MIR3_dup37254 | Multi/ | No | — | — | SINE | MIR | chr7: 2768410-2768528 | − | 170 | 119 | AMZ1 | Proximal | 0 | Not documented | 87 |
| | Uniquely | | | | | | | | | | | | | | |
| MLT1F2_dup2510 | Uniquely | No | — | — | LTR | ERVL- | chr7: 28470344-28470920 | − | 110 | 577 | CREB5 | Proximal | 0 | Not documented | 88 |
| | | | | | | MaLR | | | | | | | | | |
| Charlie19a_dup668 | Uniquely | No | — | — | DNA | DNA | chr7: 28478074-28478388 | − | 110 | 315 | CREB5 | Proximal | 0 | Not documented | 89 |
| L2b_dup40345 | Uniquely | No | — | — | LINE | L2 | chr7: 28478921-28479057 | + | 130 | 137 | CREB5 | Proximal | 0 | Not documented | 90 |
| MIR_dup73671 | Uniquely | No | — | — | SINE | MIR | chr7: 28479106-28479309 | − | 110 | 204 | CREB5 | Proximal | 0 | Not documented | 91 |
| AluSx1_dup38936 | Multi | No | — | — | SINE | Alu | chr7: 28730755-28731058 | + | 51 | 304 | CREB5 | Proximal | 0 | Not documented | 92 |
| AluSx3_dup11211 | Multi | No | — | — | SINE | Alu | chr7: 28731504-28731815 | + | 47 | 312 | CREB5 | Proximal | 0 | Not documented | 93 |
| AluSq2_dup20309 | Uniquely | No | — | — | SINE | Alu | chr7: 28745691-28745986 | + | 52 | 296 | CREB5 | Proximal | 0 | Not documented | 94 |
| MIR3_dup37900 | Uniquely | No | — | — | SINE | MIR | chr7: 28771081-28771273 | − | 130 | 193 | CREB5 | Proximal | 0 | Not documented | 95 |
| L2c_dup61157 | Multi/ | No | — | — | LINE | L2 | chr7: 28772992-28773424 | + | 130 | 433 | CREB5 | Proximal | 0 | Not documented | 96 |
| | Uniquely | | | | | | | | | | | | | | |
| L1MB7_dup8503 | Uniquely | No | — | — | LINE | Other L1 | chr7: 28816158-28816769 | − | 74 | 612 | CREB5 | Proximal | 0 | Not documented | 97 |
| AluSg4_dup2784 | Uniquely | No | — | — | SINE | Alu | chr7: 28846784-28847080 | + | 38 | 297 | CREB5 | Proximal | 0 | Not documented | 98 |
| MIRb_dup92681 | Uniquely | No | — | — | SINE | MIR | chr7: 28849272-28849491 | + | 130 | 220 | CREB5 | Proximal | 0 | Not documented | 99 |
| MER20_dup6494 | Uniquely | No | — | — | DNA | DNA | chr7: 28851560-28851786 | − | 78 | 227 | CREB5 | Proximal | 0 | Not documented | 4200 |
| L1MB3_dup6545 | Uniquely | No | — | — | LINE | Other L1 | chr7: 29949845-29952142 | + | 78 | 2298 | WIPF3 | Proximal | 0 | EVE annotated | 1 |
| AluSp_dup18604 | Uniquely | No | — | — | SINE | Alu | chr7: 30053501-30053777 | − | 41 | 277 | FKBP14 | Proximal | 0 | Not documented | 2 |
| PABL_B_dup144 | Uniquely | No | — | — | LTR | ERV1 | chr7: 30605583-30605994 | − | 49 | 412 | GGCT | Distal | 14489 | Not documented | 3 |
| MER4-int_dup1104 | Multi | No | — | — | LTR | ERV1 | chr7: 30608987-30609663 | + | 78 | 677 | GGCT | Distal | 17893 | Not documented | 4 |
| LTR12_dup333 | Multi/ | No | — | — | LTR | ERV1 | chr7: 30609668-30610518 | + | 40 | 851 | GGCT | Distal | 18574 | Not documented | 5 |
| | Uniquely | | | | | | | | | | | | | | |
| AluSx_dup50797 | Multi | No | — | — | SINE | Alu | chr7: 30624815-30625118 | + | 57 | 304 | GARS | Distal | 9180 | Not documented | 6 |
| MIR3_dup38023 | Uniquely | No | — | — | SINE | MIR | chr7: 30964787-30964831 | − | 62 | 45 | AQP1 | Proximal | 0 | Not documented | 7 |
| MIR3_dup38048 | Multi/ | No | — | — | SINE | MIR | chr7: 31148119-31148248 | + | 140 | 130 | ADCYAP1R1 | Proximal | 0 | Not documented | 8 |
| | Uniquely | | | | | | | | | | | | | | |
| MIR3_dup38050 | Multi | No | — | — | SINE | MIR | chr7: 31150008-31150080 | − | 120 | 73 | ADCYAP1R1 | Proximal | 0 | Not documented | 9 |
| MIRc_dup43351 | Multi/ | No | — | — | SINE | MIR | chr7: 31150277-31150508 | + | 160 | 232 | ADCYAP1R1 | Proximal | 0 | Not documented | 10 |
| | Uniquely | | | | | | | | | | | | | | |
| HERVH-int_dup2862 | Uniquely | No | — | — | LTR | ERV1 | chr7: 32872632-32876224 | + | 46 | 3593 | AVL9 | Proximal | 0 | EVE annotated | 11 |
| AluYc_dup3297 | Multi | No | — | — | SINE | Alu | chr7: 32928243-32928325 | + | 22 | 83 | KBTBD2 | Proximal | 0 | Not documented | 12 |
| AluY_dup45920 | Uniquely | No | — | — | SINE | Alu | chr7: 32928643-32928920 | + | 25 | 278 | KBTBD2 | Proximal | 0 | Not documented | 13 |
| AluSg_dup15640 | Uniquely | No | — | — | SINE | Alu | chr7: 32928933-32929218 | + | 45 | 286 | KBTBD2 | Proximal | 0 | Not documented | 14 |
| AluSx3_dup11239 | Multi | No | — | — | SINE | Alu | chr7: 32973197-32973492 | − | 48 | 296 | AVL9 | Proximal | 0 | Not documented | 15 |
| AluSc_dup13544 | Multi/ | No | — | — | SINE | Alu | chr7: 33045699-33046025 | − | 40 | 327 | FKBP9 | Proximal | 0 | Not documented | 16 |
| | Uniquely | | | | | | | | | | | | | | |
| AluSx_dup50903 | Multi/ | No | — | — | SINE | Alu | chr7: 35002525-35002830 | + | 37 | 306 | DPY19L1 | Proximal | 0 | Not documented | 17 |
| | Uniquely | | | | | | | | | | | | | | |
| AluSz_dup35385 | Multi | No | — | — | SINE | Alu | chr7: 35672679-35672978 | − | 41 | 300 | HERPUD2 | Proximal | 0 | Not documented | 18 |
| LTR17_dup386 | Uniquely | No | — | — | LTR | ERV1 | chr7: 35735875-35736627 | + | 35 | 753 | HERPUD2 | Proximal | 695 | Not documented | 19 |
| Alulb_dup53125 | Uniquely | No | — | — | SINE | Alu | chr7: 35737511-35737817 | + | 74 | 307 | HERPUD2 | Distal | 2331 | Not documented | 20 |
| Zaphod3_dup587 | Multi/ | No | — | — | DNA | DNA | chr7: 37990351-37990499 | − | 81 | 149 | SFRP4 | Proximal | 0 | Not documented | 21 |
| | Uniquely | | | | | | | | | | | | | | |
| L2b_dup40693 | Multi/ | No | — | — | LINE | L2 | chr7: 37990853-37991200 | + | 140 | 348 | SFRP4 | Proximal | 0 | Not documented | 22 |
| | Uniquely | | | | | | | | | | | | | | |
| MIRc_dup43598 | Multi/ | No | — | — | SINE | MIR | chr7: 38218009-38218105 | − | 150 | 97 | STARD3NL | Proximal | 0 | Not documented | 23 |
| | Uniquely | | | | | | | | | | | | | | |
| L2a_dup74642 | Multi | No | — | — | LINE | L2 | chr7: 38765171-38765219 | − | 110 | 49 | VPS41 | Proximal | 0 | Not documented | 24 |
| L1MC4_dup12311 | Uniquely | No | — | — | LINE | Other L1 | chr7: 42941589-42942419 | + | 130 | 831 | C7orf25 | Distal | 5907 | Not documented | 4225 |
| MIR_dup74618 | Multi | No | — | — | SINE | MIR | chr7: 42975208-42975411 | − | 140 | 204 | MRPL32 | Proximal | 0 | Not documented | 26 |
| MLT1K_dup7816 | Multi/ | No | — | — | LTR | ERVL- | chr7: 43648624-43648787 | − | 120 | 164 | STK17A | Proximal | 0 | Not documented | 27 |
| | Uniquely | | | | | MaLR | | | | | | | | | |
| MLT1K_dup7817 | Multi/ | No | — | — | LTR | ERVL- | chr7: 43649033-43649141 | − | 120 | 109 | STK17A | Proximal | 0 | Not documented | 28 |
| | Uniquely | | | | | MaLR | | | | | | | | | |
| L1ME2_dup5546 | Uniquely | No | — | — | LINE | Other L1 | chr7: 43667891-43669122 | − | 110 | 1232 | COA1 | Proximal | 0 | Not documented | 29 |
| L2c_dup61931 | Multi/ | No | — | — | LINE | L2 | chr7: 43915507-43915743 | − | 97 | 237 | URGCP-MRPS24 | Proximal | 0 | Not documented | 30 |
| | Uniquely | | | | | | | | | | | | | | |
| AluSz_dup35667 | Multi/ | No | — | — | SINE | Alu | chr7: 43993857-43994165 | − | 47 | 309 | UBE2D4 | Proximal | 0 | Not documented | 31 |
| | Uniquely | | | | | | | | | | | | | | |
| AluSc_dup13649 | Multi | No | — | — | SINE | Alu | chr7: 44024192-44024480 | + | 42 | 289 | SPDYE1 | Distal | 16009 | Not documented | 32 |
| AluSz6_dup17350 | Multi | No | — | — | SINE | Alu | chr7: 44042637-44042976 | + | 70 | 340 | SPDYE1 | Proximal | 0 | Not documented | 33 |
| AluSx_dup51314 | Multi | No | — | — | SINE | Alu | chr7: 44051412-44051632 | − | 45 | 221 | SPDYE1 | Proximal | 1692 | Not documented | 34 |
| HERV4_I-int_{—} | Multi | No | — | — | LTR | ERV1 | chr7: 44051756-44052058 | + | 150 | 303 | SPDYE1 | Distal | 2036 | Not documented | 35 |
| dup133 | | | | | | | | | | | | | | | |
| AluSq2_dup20541 | Multi | No | — | — | SINE | Alu | chr7: 44052472-44052766 | − | 65 | 295 | SPDYE1 | Distal | 2752 | Not documented | 36 |
| HUERS-P3-int_{—} | Multi | No | — | — | LTR | ERV1 | chr7: 44052818-44052941 | + | 160 | 124 | SPDYE1 | Distal | 3098 | Not documented | 37 |
| dup190 | | | | | | | | | | | | | | | |
| HERV4_I-int_{—} | Multi | No | — | — | LTR | ERV1 | chr7: 44052946-44053091 | + | 170 | 146 | SPDYE1 | Distal | 3226 | Not documented | 38 |
| dup134 | | | | | | | | | | | | | | | |
| MSTA_dup8369 | Multi | No | — | — | LTR | ERVL- | chr7: 44053113-44053496 | − | 60 | 384 | SPDYE1 | Distal | 3393 | Not documented | 39 |
| | | | | | | MaLR | | | | | | | | | |
| AluSq2_dup20552 | Multi/ | No | — | — | SINE | Alu | chr7: 44618225-44618489 | + | 40 | 265 | TMED4 | Proximal | 0 | Not documented | 40 |
| | Uniquely | | | | | | | | | | | | | | |
| L1MB3_dup6647 | Multi/ | No | — | — | LINE | Other L1 | chr7: 44619554-44619796 | + | 63 | 243 | TMED4 | Proximal | 0 | Not documented | 41 |
| | Uniquely | | | | | | | | | | | | | | |
| AluSx_dup51354 | Multi/ | No | — | — | SINE | Alu | chr7: 44619797-44620091 | + | 46 | 295 | TMED4 | Proximal | 0 | Not documented | 42 |
| | Uniquely | | | | | | | | | | | | | | |
| AluSp_dup18777 | Multi/ | No | — | — | SINE | Alu | chr7: 44620264-44620566 | + | 37 | 303 | TMED4 | Proximal | 0 | Not documented | 43 |
| | Uniquely | | | | | | | | | | | | | | |
| AluSc5_dup2689 | Uniquely | No | — | — | SINE | Alu | chr7: 44837877-44838121 | + | 33 | 245 | PPIA | Proximal | 0 | Not documented | 44 |
| AluJr_dup27868 | Multi | No | — | — | SINE | Alu | chr7: 44841402-44841648 | + | 77 | 247 | PPIA | Proximal | 0 | Not documented | 45 |
| AluSx_dup51388 | Multi | No | — | — | SINE | Alu | chr7: 44841794-44842043 | − | 58 | 250 | PPIA | Proximal | 0 | Not documented | 46 |
| Charlie22a_dup501 | Multi | No | — | — | DNA | DNA | chr7: 44866402-44866535 | − | 100 | 134 | H2AFV | Proximal | 0 | Not documented | 47 |
| MIRb_dup94097 | Multi/ | No | — | — | SINE | MIR | chr7: 44868000-44868200 | − | 130 | 201 | H2AFV | Proximal | 0 | Not documented | 48 |
| | Uniquely | | | | | | | | | | | | | | |
| MLT1D_dup8208 | Multi/ | No | — | — | LTR | ERVL- | chr7: 44868296-44868740 | − | 96 | 445 | H2AFV | Proximal | 0 | Not documented | 49 |
| | Uniquely | | | | | MaLR | | | | | | | | | |
| AluSq2_dup20573 | Multi | No | — | — | SINE | Alu | chr7: 44868918-44869219 | + | 54 | 302 | H2AFV | Proximal | 0 | Not documented | 4250 |
| L1MC5_dup8505 | Uniquely | No | — | — | LINE | Other L1 | chr7: 44871527-44872120 | + | 110 | 594 | H2AFV | Proximal | 0 | Not documented | 51 |
| AluSz_dup35735 | Multi | No | — | — | SINE | Alu | chr7: 44917120-44917423 | + | 42 | 304 | PURB | Proximal | 0 | Not documented | 52 |
| AluSx1_dup39498 | Multi/ | No | — | — | SINE | Alu | chr7: 45759828-45760140 | + | 40 | 313 | ADCY1 | Proximal | 0 | Not documented | 53 |
| | Uniquely | | | | | | | | | | | | | | |
| MER9a2_dup130 | Multi | No | — | — | LTR | ERVK | chr7: 45765858-45766366 | − | 29 | 509 | ADCY1 | Distal | 3144 | Not documented | 54 |
| HERVK9-int_dup302 | Multi | No | — | — | LTR | ERVK | chr7: 45766367-45766484 | − | 20 | 118 | ADCY1 | Distal | 3653 | Not documented | 55 |
| LTR84b_dup616 | Multi | No | — | — | LTF | ERVL | chr7: 45796515-45796598 | − | 110 | 84 | ADCY1 | Distal | 33801 | Not documented | 56 |
| HERVK-int_dup102 | Multi | No | — | — | LTR | ERVK | chr7: 4623025-4630560 | − | 2.7 | 7536 | FOXK1 | Distal | 52829 | EVE annotated | 57 |
| L1PB4_dup2967 | Uniquely | No | — | — | LINE | L1PA\|B\|x | chr7: 467453-467998 | + | 96 | 546 | PDGFA | Distal | 68898 | Not documented | 58 |
| AluSc_dup13707 | Multi | No | — | — | SINE | Alu | chr7: 48003226-48003532 | + | 35 | 307 | HUS1 | Proximal | 0 | Not documented | 59 |
| AluJr_dup27951 | Multi | No | — | — | SINE | Alu | chr7: 48003698-48003995 | + | 73 | 298 | HUS1 | Proximal | 0 | Not documented | 60 |
| AluY_dup44788 | Multi | No | — | — | SINE | Alu | chr7: 4807753-4808062 | − | 3.2 | 310 | FOXK1 | Proximal | 0 | Not documented | 61 |
| AluSx_dup49618 | Multi | No | — | — | SINE | Alu | chr7: 4809884-4810172 | + | 41 | 289 | FOXK1 | Proximal | 0 | Not documented | 62 |
| L1M4_dup6481 | Multi | No | — | — | LINE | Other L1 | chr7: 48672234-48672852 | + | 95 | 619 | ABCA13 | Proximal | 0 | Not documented | 63 |
| L2a_dup72814 | Uniquely | No | — | — | LINE | L2 | chr7: 5037352-5037415 | − | 100 | 64 | RBAK-RBAKDN | Proximal | 0 | Not documented | 64 |
| L1MC4a_dup11599 | Uniquely | No | — | — | LINE | Other L1 | chr7: 50678880-50679077 | − | 120 | 198 | GRB10 | Proximal | 0 | Not documented | 65 |
| L1PA13_dup3803 | Uniquely | No | — | — | LINE | L1PA\|B\|x | chr7: 51261649-51264239 | − | 46 | 2591 | COBL | Proximal | 0 | EVE annotated | 66 |
| L1PA13_dup3804 | Uniquely | No | — | — | LINE | L1PA\|B\|x | chr7: 51264263-51266228 | − | 47 | 1966 | COBL | Proximal | 0 | Not documented | 67 |
| SVA_D_dup569 | Multi | No | — | — | Other | SVA | chr7: 51275135-51276762 | + | 13 | 1628 | COBL | Proximal | 0 | Not documented | 68 |
| MIRb_dup94508 | Uniquely | No | — | — | SINE | MIR | chr7: 51331597-51331800 | − | 150 | 204 | COBL | Proximal | 0 | Not documented | 69 |
| AluSx_dup51652 | Uniquely | No | — | — | SINE | Alu | chr7: 51332086-51332392 | + | 47 | 307 | COBL | Proximal | 0 | Not documented | 70 |
| L1PA16_dup6113 | Uniquely | No | — | — | LINE | L1PA\|B\|x | chr7: 51352941-51354960 | + | 83 | 2020 | COBL | Proximal | 0 | Not documented | 71 |
| L1MDa_dup2652 | Multi | No | — | — | LINE | Other L1 | chr7: 537461-537633 | + | 140 | 173 | PDGFA | Proximal | 0 | Not documented | 72 |
| PABL_A-int_dup166 | Uniquely | No | — | — | LTR | ERV1 | chr7: 54458202-54461001 | − | 43 | 2800 | VSTM2A | Distal | 149018 | Not documented | 73 |
| L1MA10_dup2033 | Uniquely | No | — | — | LINE | Other L1 | chr7: 54479356-54482223 | + | 94 | 2868 | VSTM2A | Distal | 127796 | Not documented | 74 |
| L1MEc_dup8263 | Uniquely | No | — | — | LINE | Other L1 | chr7: 54505487-54506550 | + | 110 | 1064 | VSTM2A | Distal | 103469 | Not documented | 4275 |
| L1MD1_dup2868 | Uniquely | No | — | — | LINE | Other L1 | chr7: 54506966-54509164 | − | 94 | 2199 | VSTM2A | Distal | 100855 | Not documented | 76 |
| AluSx1_dup39720 | Multi/ | No | — | — | SINE | Alu | chr7: 55091061-55091362 | + | 48 | 302 | EGFR | Proximal | 0 | Not documented | 77 |
| | Uniquely | | | | | | | | | | | | | | |
| L2_dup25010 | Uniquely | No | — | — | LINE | L2 | chr7: 55092817-55093321 | − | 140 | 505 | EGFR | Proximal | 0 | Not documented | 78 |
| MER5B_dup10566 | Multi/ | No | — | — | DNA | DNA | chr7: 55093702-55093852 | + | 140 | 151 | EGFR | Proximal | 0 | Not documented | 79 |
| | Uniquely | | | | | | | | | | | | | | |
| LTR19-int_dup53 | Multi | No | — | — | LTR | ERV1 | chr7: 55094042-55094099 | + | 31 | 58 | EGFR | Proximal | 0 | Not documented | 80 |
| LTR19A_dup143 | Multi/ | No | — | — | LTR | ERV1 | chr7: 55094103-55094559 | + | 75 | 457 | EGFR | Proximal | 0 | Not documented | 81 |
| | Uniquely | | | | | | | | | | | | | | |
| MER5A_dup15167 | Uniquely | No | — | — | DNA | DNA | chr7: 55094594-55094768 | + | 110 | 175 | EGFR | Proximal | 0 | Not documented | 82 |
| AluSx1_dup39721 | Uniquely | No | — | — | SINE | Alu | chr7: 55101912-55102138 | − | 54 | 227 | EGFR | Proximal | 0 | Not documented | 83 |
| AluSz6_dup17452 | Multi/ | No | — | — | SINE | Alu | chr7: 55103075-55103406 | + | 63 | 332 | EGFR | Proximal | 0 | Not documented | 84 |
| | Uniquely | | | | | | | | | | | | | | |
| MIRb_dup94650 | Uniquely | No | — | — | SINE | MIR | chr7: 55113273-55113459 | + | 130 | 187 | EGFR | Proximal | 0 | Not documented | 85 |
| L1MB3_dup6727 | Uniquely | No | — | — | LINE | Other L1 | chr7: 55117760-55118254 | − | 80 | 495 | EGFR | Proximal | 0 | Not documented | 86 |
| MSTD_dup3518 | Multi/ | No | — | — | LTR | ERVL- | chr7: 55118954-55119348 | + | 74 | 395 | EGFR | Proximal | 0 | Not documented | 87 |
| | Uniquely | | | | | MaLR | | | | | | | | | |
| L2c_dup62186 | Multi | No | — | — | LINE | L2 | chr7: 55119431-55119617 | + | 110 | 187 | EGFR | Proximal | 0 | Not documented | 88 |
| L3_dup19823 | Uniquely | No | — | — | LINE | CR1 | chr7: 55124446-55124999 | + | 160 | 554 | EGFR | Proximal | 0 | Not documented | 89 |
| L1PA13_dup3814 | Multi | No | — | — | LINE | L1PA\|B\|x | chr7: 55125729-55125806 | + | 48 | 78 | EGFR | Proximal | 0 | Not documented | 90 |
| L1PA13_dup3815 | Multi/ | No | — | — | LINE | L1PA\|B\|x | chr7: 55126103-55126544 | + | 48 | 442 | EGFR | Proximal | 0 | Not documented | 91 |
| | Uniquely | | | | | | | | | | | | | | |
| L1MC2_dup2596 | Uniquely | No | — | — | LINE | Other L1 | chr7: 55126987-55127368 | − | 100 | 382 | EGFR | Proximal | 0 | Not documented | 92 |
| MIRb_dup94653 | Uniquely | No | — | — | SINE | MIR | chr7: 55153739-55153939 | − | 130 | 201 | EGFR | Proximal | 0 | Not documented | 93 |
| MER5A_dup15169 | Multi/ | No | — | — | DNA | DNA | chr7: 55164808-55164907 | + | 76 | 100 | EGFR | Proximal | 0 | Not documented | 94 |
| | Uniquely | | | | | | | | | | | | | | |
| L1M5_dup27328 | Multi/ | No | — | — | LINE | Other L1 | chr7: 55165080-55165167 | + | 100 | 88 | EGFR | Proximal | 0 | Not documented | 95 |
| | Uniquely | | | | | | | | | | | | | | |
| Arthur1B_dup1100 | Multi/ | No | — | — | DNA | DNA | chr7: 55165205-55165290 | + | 94 | 86 | EGFR | Proximal | 0 | Not documented | 96 |
| | Uniquely | | | | | | | | | | | | | | |
| L3_dup19827 | Multi/ | No | — | — | LINE | CR1 | chr7: 55272886-55272949 | + | 120 | 64 | EGFR | Proximal | 0 | Not documented | 97 |
| | Uniquely | | | | | | | | | | | | | | |
| L2c_dup62191 | Multi/ | No | — | — | LINE | L2 | chr7: 55275066-55275362 | − | 140 | 297 | EGFR | Proximal | 0 | Not documented | 98 |
| | Uniquely | | | | | | | | | | | | | | |
| MER5B_dup10568 | Multi/ | No | — | — | DNA | DNA | chr7: 55276536-55276648 | − | 140 | 113 | EGFR | Proximal | 0 | Not documented | 99 |
| | Uniquely | | | | | | | | | | | | | | |
| MER5B_dup10569 | Multi/ | No | — | — | DNA | DNA | chr7: 55276793-55276903 | + | 120 | 111 | EGFR | Proximal | 0 | Not documented | 4300 |
| | Uniquely | | | | | | | | | | | | | | |
| MER5B_dup10570 | Multi/ | No | — | — | DNA | DNA | chr7: 55278068-55278232 | + | 88 | 165 | EGFR | Proximal | 0 | Not documented | 1 |
| | Uniquely | | | | | | | | | | | | | | |
| MER34_dup639 | Uniquely | No | — | — | LTR | ERV1 | chr7: 55434560-55434841 | − | 110 | 282 | LANCL2 | Proximal | 0 | Not documented | 2 |
| AluSz6_dup17457 | Uniquely | No | — | — | SINE | Alu | chr7: 55435136-55435422 | + | 47 | 287 | LANCL2 | Proximal | 0 | Not documented | 3 |
| AluSg_dup15920 | Multi | No | — | — | SINE | Alu | chr7: 55464873-55465179 | + | 41 | 307 | LANCL2 | Proximal | 0 | Not documented | 4 |
| Tigger1_dup5553 | Multi | No | — | — | DNA | DNA | chr7: 55519499-55521571 | − | 56 | 2073 | VOPP1 | Proximal | 0 | Not documented | 5 |
| L1MA4A_dup2692 | Multi | No | — | — | LINE | Other L1 | chr7: 55524647-55528304 | − | 67 | 3658 | VOPP1 | Proximal | 0 | Not documented | 6 |
| L1MA4A_dup2695 | Multi | No | — | — | LINE | Other L1 | chr7: 55529409-55530348 | − | 87 | 940 | VOPP1 | Proximal | 0 | Not documented | 7 |
| AluYa5_dup1725 | Multi | No | — | — | SINE | Alu | chr7: 55530349-55530610 | − | 3.6 | 262 | VOPP1 | Proximal | 0 | Not documented | 8 |
| L1MA4A_dup2696 | Multi | No | — | — | LINE | Other L1 | chr7: 55530611-55532901 | − | 89 | 2291 | VOPP1 | Proximal | 0 | Not documented | 9 |
| AluSc_dup13761 | Multi | No | — | — | SINE | Alu | chr7: 55701030-55701336 | − | 46 | 307 | VOPP1 | Distal | 60350 | Not documented | 10 |
| AluSc_dup13763 | Multi | No | — | — | SINE | Alu | chr7: 55749282-55749606 | + | 43 | 325 | VOPP1 | Distal | 108602 | Not documented | 11 |
| AluSc8_dup8405 | Multi | No | — | — | SINE | Alu | chr7: 55946146-55946436 | + | 45 | 291 | MRPS17 | Distal | 8535 | Not documented | 12 |
| AluY_dup46706 | Multi | No | — | — | SINE | Alu | chr7: 56023134-56023433 | − | 30 | 300 | GBAS | Proximal | 0 | Not documented | 13 |
| AluJo_dup26051 | Multi | No | — | — | SINE | Alu | chr7: 56023459-56023751 | − | 85 | 293 | GBAS | Proximal | 0 | Not documented | 14 |
| AluSp_dup18927 | Multi | No | — | — | SINE | Alu | chr7: 56023821-56024103 | − | 46 | 283 | GBAS | Proximal | 0 | Not documented | 15 |
| L3_dup19835 | Multi/ | No | — | — | LINE | CR1 | chr7: 56046306-56046616 | − | 130 | 311 | GBAS | Proximal | 0 | Not documented | 16 |
| | Uniquely | | | | | | | | | | | | | | |
| AluSx1_dup39785 | Multi | No | — | — | SINE | Alu | chr7: 56052128-56052428 | + | 48 | 301 | GBAS | Proximal | 0 | Not documented | 17 |
| AluY_dup46712 | Multi/ | No | — | — | SINE | Alu | chr7: 56078941-56079235 | + | 28 | 295 | PSPH | Proximal | 0 | Not documented | 18 |
| | Uniquely | | | | | | | | | | | | | | |
| L1M5_dup27361 | Multi | No | — | — | LINE | Other L1 | chr7: 56131064-56131191 | − | 100 | 128 | CCT6A | Proximal | 0 | Not documented | 19 |
| AluSx1_dup39797 | Multi/ | No | — | — | SINE | Alu | chr7: 56132285-56132603 | + | 30 | 319 | SUMF2 | Proximal | 0 | Not documented | 20 |
| | Uniquely | | | | | | | | | | | | | | |
| AluJr_dup28073 | Multi/ | No | — | — | SINE | Alu | chr7: 56146596-56146866 | − | 79 | 271 | SUMF2 | Proximal | 0 | Not documented | 21 |
| | Uniquely | | | | | | | | | | | | | | |
| AluJr_dup28074 | Multi/ | No | — | — | SINE | Alu | chr7: 56147951-56148254 | − | 55 | 304 | SUMF2 | Proximal | 0 | Not documented | 22 |
| | Uniquely | | | | | | | | | | | | | | |
| LTR89_dup488 | Multi/ | No | — | — | LTR | ERVL | chr7: 56148299-56148402 | + | 150 | 104 | SUMF2 | Proximal | 0 | Not documented | 23 |
| | Uniquely | | | | | | | | | | | | | | |
| AluJb_dup53916 | Multi | No | — | — | SINE | Alu | chr7: 56156054-56156233 | + | 94 | 180 | PHKG1 | Proximal | 0 | Not documented | 24 |
| AluJr_dup28076 | Multi | No | — | — | SINE | Alu | chr7: 56156233-56156349 | − | 50 | 117 | PHKG1 | Proximal | 0 | Not documented | 4325 |
| AluJo_dup26079 | Multi | No | — | — | SINE | Alu | chr7: 56168912-56169067 | − | 73 | 156 | CHCHD2 | Proximal | 196 | Not documented | 26 |
| AluJo_dup26080 | Multi | No | — | — | SINE | Alu | chr7: 56169668-56169787 | − | 45 | 120 | CHCHD2 | Proximal | 0 | Not documented | 27 |
| AluSx1_dup39805 | Multi/ | No | — | — | SINE | Alu | chr7: 56170039-56170360 | − | 44 | 322 | CHCHD2 | Proximal | 0 | Not documented | 28 |
| | Uniquely | | | | | | | | | | | | | | |
| AluSp_dup18263 | Multi | No | — | — | SINE | Alu | chr7: 5660803-5661081 | − | 49 | 279 | RNF216 | Proximal | 0 | Not documented | 29 |
| AluSz_dup34668 | Multi | No | — | — | SINE | Alu | chr7: 5940834-5941134 | + | 66 | 301 | CCZ1 | Proximal | 0 | Not documented | 30 |
| L1M3a_dup215 | Multi | No | — | — | LINE | Other L1 | chr7: 63372711-63373221 | − | 140 | 511 | ZNF727 | Distal | 132601 | Not documented | 31 |
| L1PREC2_dup3395 | Uniquely | No | — | — | LINE | L1PA\|B\|x | chr7: 63811180-63813818 | − | 110 | 2639 | ZNF736 | Proximal | 0 | Not documented | 32 |
| AluSq_dup8207 | Uniquely | No | — | — | SINE | Alu | chr7: 64170222-64170525 | + | 67 | 304 | ZNF107 | Proximal | 0 | Not documented | 33 |
| L1MA3_dup4009 | Multi | No | — | — | LINE | Other L1 | chr7: 64435163-64435363 | + | 69 | 201 | ZNF117 | Proximal | 0 | Not documented | 34 |
| MER57E3_dup61 | Multi | No | — | — | LTR | ERV1 | chr7: 64466074-64466559 | + | 61 | 486 | ERV3-1 | Proximal | 0 | Not documented | 35 |
| L1ME4a_dup18785 | Multi | No | — | — | LINE | Other L1 | chr7: 64534498-64534767 | − | 120 | 270 | ERV3-1 | Distal | 67378 | Not documented | 36 |
| L1ME4a_dup18794 | Multi | No | — | — | LINE | Other L1 | chr7: 65228616-65228885 | − | 120 | 270 | VKORC1L1 | Distal | 109370 | Not documented | 37 |
| AluSp_dup19152 | Multi | No | — | — | SINE | Alu | chr7: 65618144-65618438 | + | 54 | 295 | CRCP | Proximal | 0 | Not documented | 38 |
| AluSz6_dup17619 | Multi | No | — | — | SINE | Alu | chr7: 65619158-65619381 | − | 55 | 224 | CRCP | Proximal | 0 | Not documented | 39 |
| MLT2C2_dup588 | Multi | No | — | — | LTR | ERVL | chr7: 65703499-65703779 | − | 75 | 281 | TPST1 | Proximal | 0 | Not documented | 40 |
| L2c_dup62360 | Multi | No | — | — | LINE | L2 | chr7: 65704032-65704142 | + | 150 | 111 | TPST1 | Proximal | 0 | Not documented | 41 |
| FLAM_C_dup8427 | Multi | No | — | — | SINE | Alu | chr7: 65704143-65704267 | − | 80 | 125 | TPST1 | Proximal | 0 | Not documented | 42 |
| L2c_dup62361 | Multi | No | — | — | LINE | L2 | chr7: 65704268-65704411 | + | 150 | 144 | TPST1 | Proximal | 0 | Not documented | 43 |
| AluSx_dup52434 | Multi | Nc | — | — | SINE | Alu | chr7: 65708431-65708734 | − | 73 | 304 | TPST1 | Proximal | 0 | Not documented | 44 |
| AluY_dup47109 | Multi | No | — | — | SINE | Alu | chr7: 65717345-65717619 | − | 21 | 275 | TPST1 | Proximal | 0 | Not documented | 45 |
| L1MEf_dup6099 | Uniquely | No | — | — | LINE | Other L1 | chr7: 65762962-65763785 | − | 100 | 824 | TPST1 | Proximal | 0 | Not documented | 46 |
| L1MEf_dup6100 | Multi | No | — | — | LINE | Other L1 | chr7: 65764187-65764539 | − | 94 | 353 | TPST1 | Proximal | 0 | Not documented | 47 |
| L1MEf_dup6101 | Multi | No | — | — | LINE | Other L1 | chr7: 65764578-65764805 | − | 120 | 228 | TPST1 | Proximal | 0 | Not documented | 48 |
| Tigger1_dup5594 | Multi | No | — | — | DNA | DNA | chr7: 65764856-65765197 | − | 65 | 342 | TPST1 | Proximal | 0 | Not documented | 49 |
| Tigger1_dup5595 | Multi/ | No | — | — | DNA | DNA | chr7: 65765201-65765650 | − | 50 | 450 | TPST1 | Proximal | 0 | Not documented | 4350 |
| | Uniquely | | | | | | | | | | | | | | |
| X7C_LINE_dup269 | Uniquely | No | — | — | LINE | CR1 | chr7: 65776844-65777047 | − | 120 | 204 | TPST1 | Proximal | 0 | Not documented | 51 |
| L1M6_dup3128 | Multi/ | No | — | — | LINE | Other L1 | chr7: 65777700-65778121 | + | 130 | 422 | TPST1 | Proximal | 0 | Not documented | 52 |
| | Uniquely | | | | | | | | | | | | | | |
| AluSx1_dup40298 | Multi | No | — | — | SINE | Alu | chr7: 65782864-65783171 | + | 53 | 308 | TPST1 | Proximal | 0 | Not documented | 53 |
| L1MEe_dup5296 | Multi/ | No | — | — | LINE | Other L1 | chr7: 65783172-65783458 | − | 120 | 287 | TPST1 | Proximal | 0 | Not documented | 54 |
| | Uniquely | | | | | | | | | | | | | | |
| L1M1_dup3889 | Multi/ | No | — | — | LINE | Other L1 | chr7: 65802596-65804639 | + | 70 | 2044 | TPST1 | Proximal | 0 | Not documented | 55 |
| | Uniquely | | | | | | | | | | | | | | |
| L1MCb_dup967 | Multi | No | — | — | LINE | Other L1 | chr7: 65808558-65809101 | + | 84 | 544 | TPST1 | Proximal | 0 | Not documented | 56 |
| AluSx_dup52445 | Multi | No | — | — | SINE | Alu | chr7: 65819313-65819529 | + | 57 | 217 | TPST1 | Proximal | 0 | Not documented | 57 |
| AluSq10_dup837 | Uniquely | No | — | — | SINE | Alu | chr7: 66025409-66025705 | + | 41 | 297 | KCTD7 | Distal | 68164 | Not documented | 58 |
| AluJr_dup28488 | Multi/ | No | — | — | SINE | Alu | chr7: 66204968-66205223 | − | 64 | 256 | RABGEF1 | Proximal | 0 | Not documented | 59 |
| | Uniquely | | | | | | | | | | | | | | |
| AluJr_dup28517 | Multi/ | No | — | — | SINE | Alu | chr7: 66421662-66421961 | − | 59 | 300 | TMEM248 | Proximal | 0 | Not documented | 60 |
| | Uniquely | | | | | | | | | | | | | | |
| FRAM_dup3284 | Multi/ | No | — | — | SINE | Alu | chr7: 66745248-66745406 | + | 83 | 159 | TYW1 | Distal | 40748 | Not documented | 61 |
| | Uniquely | | | | | | | | | | | | | | |
| AluSz_dup36397 | Multi | No | — | — | SINE | Alu | chr7: 66745407-66745708 | + | 71 | 302 | TYW1 | Distal | 40907 | Not documented | 62 |
| AluSx1_dup40432 | Multi | No | — | — | SINE | Alu | chr7: 66745788-66746111 | + | 52 | 324 | TYW1 | Distal | 41288 | Not documented | 63 |
| MER21C_dup2285 | Multi | No | — | — | LTR | ERVL | chr7: 66755448-66755662 | − | 120 | 215 | TYW1 | Distal | 50948 | Not documented | 64 |
| MER84-int_dup56 | Multi | No | — | — | LTR | ERV1 | chr7: 66755928-66756311 | + | 140 | 384 | TYW1 | Distal | 51428 | Not documented | 65 |
| AluSq2_dup21049 | Multi | No | — | — | SINE | Alu | chr7: 66756725-66757024 | − | 68 | 300 | TYW1 | Distal | 52225 | Not documented | 66 |
| MSTA_dup8478 | Multi | No | — | — | LTR | ERVL- | chr7: 66757370-66757754 | − | 58 | 385 | TYW1 | Distal | 52870 | Not documented | 67 |
| | | | | | | MaLR | | | | | | | | | |
| AluSz_dup34796 | Multi | No | — | — | SINE | Alu | chr7: 6863144-6863449 | − | 65 | 306 | CCZ1B | Proximal | 0 | Not documented | 68 |
| MLT1L_dup5478 | Uniquely | No | — | — | LTR | ERVL- | chr7: 69494989-69495190 | − | 130 | 202 | AUTS2 | Proximal | 0 | Not documented | 69 |
| | | | | | | MaLR | | | | | | | | | |
| AluSz6_dup17847 | Multi | No | — | — | SINE | Alu | chr7: 72338782-72339114 | − | 75 | 333 | POM121 | Distal | 10823 | Not documented | 70 |
| AluSz_dup36853 | Multi | No | — | — | SINE | Alu | chr7: 72340196-72340495 | − | 73 | 300 | POM121 | Distal | 9442 | Not documented | 71 |
| AluJo_dup26804 | Multi | No | — | — | SINE | Alu | chr7: 72340500-72340655 | − | 79 | 156 | POM121 | Distal | 9282 | Not documented | 72 |
| LTR5B_dup146 | Multi | No | — | — | LTR | ERVK | chr7: 72421753-72422735 | + | 31 | 983 | POM121 | Proximal | 0 | Not documented | 73 |
| AluSx_dup53182 | Multi | No | — | — | SINE | Alu | chr7: 72422736-72422883 | + | 44 | 148 | POM121 | Proximal | 758 | Not documented | 74 |
| AluJb_dup55032 | Multi | No | — | — | SINE | Alu | chr7: 72463820-72464164 | − | 76 | 345 | AC005488.1 | Proximal | 0 | Not documented | 4375 |
| L1ME3B_dup3494 | Multi | No | — | — | LINE | Other L1 | chr7: 72465108-72465468 | − | 120 | 361 | AC005488.1 | Proximal | 113 | Not documented | 76 |
| FLAM_C_dup8515 | Multi | No | — | — | SINE | Alu | chr7: 72469014-72469148 | − | 57 | 135 | AC005488.1 | Distal | 4019 | Not documented | 77 |
| AluJo_dup26821 | Multi | No | — | — | SINE | Alu | chr7: 72477090-72477221 | − | 69 | 132 | AC005488.1 | Distal | 12095 | Not documented | 78 |
| AluSx1_dup40952 | Multi | No | — | — | SINE | Alu | chr7: 72477513-72477812 | + | 50 | 300 | AC005488.1 | Distal | 12518 | Not documented | 79 |
| MSTA_dup8562 | Multi | No | — | — | LTR | ERVL- | chr7: 72486639-72487025 | + | 70 | 387 | AC005488.1 | Distal | 21644 | Not documented | 80 |
| | | | | | | MaLR | | | | | | | | | |
| AluJo_dup26823 | Multi | No | — | — | SINE | Alu | chr7: 72496606-72496945 | − | 87 | 340 | AC005488.1 | Distal | 31611 | Not documented | 81 |
| MSTA_dup8563 | Multi | No | — | — | LTR | ERVL- | chr7: 72514701-72515087 | + | 70 | 387 | AC005488.1 | Distal | 49706 | Not documented | 82 |
| | | | | | | MaLR | | | | | | | | | |
| AluJo_dup26826 | Multi | No | — | — | SINE | Alu | chr7: 72524668-72525007 | − | 85 | 340 | AC005488.1 | Distal | 59673 | Not documented | 83 |
| MER58A_dup5596 | Multi | No | — | — | DNA | DNA | chr7: 72614869-72615059 | + | 110 | 191 | NSUN5 | Distal | 101456 | Not documented | 84 |
| AluSx1_dup40981 | Multi | No | — | — | SINE | Alu | chr7: 72615060-72615352 | + | 51 | 293 | NSUN5 | Distal | 101163 | Not documented | 85 |
| AluSx_dup53235 | Multi | No | — | — | SINE | Alu | chr7: 72656923-72657216 | + | 43 | 294 | NSUN5 | Distal | 59299 | Not documented | 86 |
| Charlie8_dup1228 | Multi | No | — | — | DNA | DNA | chr7: 72657217-72659145 | − | 92 | 1929 | NSUN5 | Distal | 57370 | Not documented | 87 |
| L1ME3B_dup3497 | Multi | No | — | — | LINE | Other L1 | chr7: 72700053-72700413 | − | 110 | 361 | NSUN5 | Distal | 16102 | Not documented | 88 |
| L2c_dup62703 | Multi | No | — | — | LINE | L2 | chr7: 72983945-72984065 | + | 100 | 121 | TBL2 | Proximal | 0 | Not documented | 89 |
| MIRb_dup95410 | Multi | No | — | — | SINE | MIR | chr7: 72984274-72984365 | − | 120 | 92 | TBL2 | Proximal | 0 | Not documented | 90 |
| L2a_dup75891 | Uniquely | No | — | — | LINE | L2 | chr7: 73109879-73110171 | + | 130 | 293 | WBSCR22 | Proximal | 0 | Not documented | 91 |
| L2a_dup75892 | Uniquely | No | — | — | LINE | L2 | chr7: 73110213-73110381 | + | 160 | 169 | WBSCR22 | Proximal | 0 | Not documented | 92 |
| FLAM_C_dup8545 | Multi | No | — | — | SINE | Alu | chr7: 73112344-73112482 | + | 75 | 139 | WBSCR22 | Proximal | 0 | Not documented | 93 |
| AluSz_dup36974 | Multi | No | — | — | SINE | Alu | chr7: 73150569-73150869 | − | 42 | 301 | ABHD11 | Proximal | 0 | Not documented | 94 |
| AluSx1_dup41144 | Multi/ | No | — | — | SINE | Alu | chr7: 73646009-73646309 | − | 48 | 301 | RFC2 | Proximal | 0 | Not documented | 95 |
| | Uniquely | | | | | | | | | | | | | | |
| MER58A_dup5601 | Multi | No | — | — | DNA | DNA | chr7: 74168558-74168748 | + | 110 | 191 | GTF21 | Proximal | 0 | Not documented | 96 |
| AluSx_dup53569 | Multi | No | — | — | SINE | Alu | chr7: 74210623-74210916 | + | 45 | 294 | GTF2IRD2 | Proximal | 0 | Not documented | 97 |
| Charlie8_dup1236 | Multi | No | — | — | DNA | DNA | chr7: 74210917-74212845 | − | 91 | 1929 | GTF2IRD2 | Proximal | 0 | Not documented | 98 |
| L1MB7_dup8882 | Multi | No | — | — | LINE | Other L1 | chr7: 74266568-74267052 | + | 75 | 485 | GTF2IRD2 | Proximal | 0 | Not documented | 99 |
| AluJb_dup55336 | Multi | No | — | — | SINE | Alu | chr7: 74294086-74294437 | − | 76 | 352 | GTF2IRD2 | Distal | 26240 | Not documented | 4400 |
| L1ME3B_dup3503 | Multi | No | — | — | LINE | Other L1 | chr7: 74295379-74295739 | − | 110 | 361 | GTF2IRD2 | Distal | 27533 | Not documented | 1 |
| FLAM_C_dup8587 | Multi | No | — | — | SINE | Alu | chr7: 74299270-74299404 | − | 50 | 135 | GTF2IRD2 | Distal | 31424 | Not documented | 2 |
| AluJo_dup27071 | Multi | No | — | — | SINE | Alu | chr7: 74307359-74307490 | − | 65 | 132 | GTF2IRD2 | Distal | 39513 | Not documented | 3 |
| AluSx1_dup41299 | Multi | No | — | — | SINE | Alu | chr7: 74307782-74308081 | + | 50 | 300 | GTF2IRD2 | Distal | 39936 | Not documented | 4 |
| MSTA_dup8568 | Multi | No | — | — | LTR | ERVL- | chr7: 74316785-74317171 | + | 74 | 387 | GTF2IRD2 | Distal | 48939 | Not documented | 5 |
| | | | | | | MaLR | | | | | | | | | |
| AluJo_dup27073 | Multi | No | — | — | SINE | Alu | chr7: 74327470-74327809 | − | 85 | 340 | GATSL1 | Distal | 51275 | Not documented | 6 |
| Charlie8_dup1239 | Multi | No | — | — | DNA | DNA | chr7: 74563259-74565187 | + | 91 | 1929 | GTF2IRD2B | Proximal | 0 | Not documented | 7 |
| AluSx_dup53671 | Multi | No | — | — | SINE | Alu | chr7: 74565188-74565482 | − | 45 | 295 | GTF2IRD2B | Proximal | 0 | Not documented | 8 |
| MER58A_dup5606 | Multi | No | — | — | DNA | DNA | chr7: 74607379-74607569 | − | 110 | 191 | GTF2IRD2B | Distal | 41757 | Not documented | 9 |
| AluJo_dup27122 | Multi | No | — | — | SINE | Alu | chr7: 74697616-74697955 | + | 85 | 340 | GATSL2 | Distal | 109545 | Not documented | 10 |
| MSTA_dup8577 | Multi | No | — | — | LTR | ERVL- | chr7: 74707535-74707921 | − | 70 | 387 | GATSL2 | Distal | 99579 | Not documented | 11 |
| | | | | | | MaLR | | | | | | | | | |
| AluJo_dup27146 | Multi | No | — | — | SINE | Alu | chr7: 74911880-74912219 | + | 87 | 340 | GATSL2 | Distal | 44372 | Not documented | 12 |
| MSTA_dup8583 | Multi | No | — | — | LTR | ERVL- | chr7: 74921800-74922186 | − | 70 | 387 | GATSL2 | Distal | 54292 | Not documented | 13 |
| | | | | | | MaLR | | | | | | | | | |
| AluJo_dup27149 | Multi | No | — | — | SINE | Alu | chr7: 74939900-74940239 | + | 85 | 340 | AC006014.1 | Distal | 59670 | Not documented | 14 |
| MSTA_dup8584 | Multi | No | — | — | LTR | ERVL- | chr7: 74949822-74950208 | − | 70 | 387 | AC006014.1 | Distal | 49701 | Not documented | 15 |
| | | | | | | MaLR | | | | | | | | | |
| AluJo_dup27152 | Multi | No | — | — | SINE | Alu | chr7: 74967923-74968255 | + | 86 | 333 | AC006014.1 | Distal | 31654 | Not documented | 16 |
| MSTA_dup8585 | Multi | No | — | — | LTR | ERVL- | chr7: 74977843-74978225 | − | 69 | 383 | AC006014.1 | Distal | 21684 | Not documented | 17 |
| | | | | | | MaLR | | | | | | | | | |
| AluSx1_dup41438 | Multi | No | — | — | SINE | Alu | chr7: 74987083-74987382 | − | 50 | 300 | AC006014.1 | Distal | 12527 | Not documented | 18 |
| AluJo_dup27154 | Multi | No | — | — | SINE | Alu | chr7: 74987674-74987805 | + | 69 | 132 | AC006014.1 | Distal | 12104 | Not documented | 19 |
| FLAM_C_dup8605 | Multi | No | — | — | SINE | Alu | chr7: 74995758-74995892 | + | 57 | 135 | AC006014.1 | Distal | 4017 | Not documented | 20 |
| L1ME3B_dup3506 | Multi | No | — | — | LINE | Other L1 | chr7: 74999436-74999785 | + | 110 | 350 | AC006014.1 | Proximal | 124 | Not documented | 21 |
| AluJb_dup55477 | Multi | No | — | — | SINE | Alu | chr7: 75000740-75001084 | + | 78 | 345 | AC006014.1 | Proximal | 0 | Not documented | 22 |
| AluSx_dup53763 | Multi | No | — | — | SINE | Alu | chr7: 75042021-75042165 | − | 43 | 145 | TRIM73 | Proximal | 1743 | Not documented | 23 |
| LTR5B_dup148 | Multi | No | — | — | LTR | ERVK | chr7: 75042166-75043148 | − | 32 | 983 | TRIM73 | Proximal | 1888 | Not documented | 24 |
| MIR_dup75875 | Multi | No | — | — | SINE | MIR | chr7: 75043835-75044030 | − | 130 | 196 | POM121C | Distal | 2037 | Not documented | 4425 |
| MIR3_dup38948 | Multi | No | — | — | SINE | MIR | chr7: 75045095-75045181 | + | 120 | 87 | POM121C | Proximal | 886 | Not documented | 16 |
| AluJo_dup27172 | Multi | No | — | — | SINE | Alu | chr7: 75124917-75125072 | + | 76 | 156 | POM121C | Distal | 9370 | Not documented | 17 |
| AluSz_dup37321 | Multi | No | — | — | SINE | Alu | chr7: 75125077-75125356 | + | 76 | 280 | POM121C | Distal | 9530 | Not documented | 18 |
| AluSx_dup53780 | Multi | No | — | — | SINE | Alu | chr7: 75135319-75135539 | − | 50 | 22 | POM121C | Distal | 19772 | Not documented | 19 |
| AluSq2_dup21419 | Multi | No | — | — | SINE | Alu | chr7: 75136379-75136678 | − | 67 | 300 | POM121C | Distal | 20832 | Not documented | 20 |
| MER84-int_dup66 | Multi | No | — | — | LTR | ERV1 | chr7: 75136877-75137003 | + | 160 | 127 | POM121C | Distal | 21330 | Not documented | 21 |
| MSTA_dup8588 | Multi | No | — | — | LTR | ERVL- | chr7: 75137024-75137407 | − | 57 | 384 | POM121C | Distal | 21477 | Not documented | 22 |
| | | | | | | MaLR | | | | | | | | | |
| MIRb_dup95580 | Multi/ | No | — | — | SINE | MIR | chr7: 75517732-75517874 | − | 120 | 143 | RHBDD2 | Proximal | 0 | Not documented | 23 |
| | Uniquely | | | | | | | | | | | | | | |
| AluJr_dup29729 | Multi | No | — | — | SINE | Alu | chr7: 75932585-75932670 | + | 21 | 86 | HSPB1 | Proximal | 0 | Not documented | 24 |
| AluSc_dup13304 | Multi | No | — | — | SINE | Alu | chr7: 7605410-7605713 | + | 39 | 304 | MIOS | Proximal | 791 | Not documented | 4425 |
| L2b_dup39791 | Multi/ | No | — | — | LINE | L2 | chr7: 7605823-7606208 | + | 120 | 386 | MIOS | Proximal | 296 | Not documented | 26 |
| | Uniquely | | | | | | | | | | | | | | |
| MSTA_dup8590 | Multi | No | — | — | LTR | ERVL- | chr7: 76156865-76157248 | + | 58 | 384 | UPK3B | Proximal | 0 | Not documented | 27 |
| | | | | | | MaLR | | | | | | | | | |
| AluSq2_dup21490 | Multi | No | — | — | SINE | Alu | chr7: 76157594-76157893 | + | 67 | 300 | UPK3B | Proximal | 0 | Not documented | 28 |
| AluSz6_dup18073 | Multi | No | — | — | SINE | Alu | chr7: 76167343-76167682 | − | 72 | 340 | UPK3B | Proximal | 0 | Not documented | 29 |
| AluSx1_dup41616 | Multi | No | — | — | SINE | Alu | chr7: 76168385-76168693 | − | 59 | 309 | UPK3B | Proximal | 0 | Not documented | 30 |
| AluSz_dup37465 | Multi | No | — | — | SINE | Alu | chr7: 76168762-76169061 | − | 71 | 300 | UPK3B | Proximal | 0 | Not documented | 31 |
| AluJo_dup27341 | Multi | No | — | — | SINE | Alu | chr7: 76169066-76169221 | − | 76 | 156 | UPK3B | Proximal | 0 | Not documented | 32 |
| AluSx1_dup41619 | Multi/ | No | — | — | SINE | Alu | chr7: 76183852-76184176 | − | 43 | 325 | UPK3B | Proximal | 0 | Not documented | 33 |
| | Uniquely | | | | | | | | | | | | | | |
| THE1C-int_dup852 | Uniquely | No | — | — | LTR | ERVL- | chr7: 76222376-76223565 | − | 54 | 1190 | UPK3B | Proximal | 0 | Not documented | 34 |
| | | | | | | MaLR | | | | | | | | | |
| L1PA15_dup3556 | Multi | No | — | — | LINE | L1PA\|B\|x | chr7: 76223935-76228295 | + | 66 | 4361 | UPK3B | Proximal | 0 | Not documented | 35 |
| AluJo_dup27366 | Multi | No | — | — | SINE | Alu | chr7: 76658004-76658331 | − | 90 | 328 | UPK3B | Distal | 9665 | Not documented | 36 |
| AluSz_dup37482 | Multi | No | — | — | SINE | Alu | chr7: 76687816-76688113 | − | 69 | 298 | UPK3B | Distal | 39477 | Not documented | 37 |
| AluSx_dup54109 | Multi | No | — | — | SINE | Alu | chr7: 77233527-77233830 | − | 48 | 304 | PTPN12 | Proximal | 0 | Not documented | 38 |
| AluSq2_dup21525 | Multi | No | — | — | SINE | Alu | chr7: 77235263-77235570 | − | 60 | 308 | PTPN12 | Proximal | 0 | Not documented | 39 |
| AluJb_dup55762 | Multi | No | — | — | SINE | Alu | chr7: 77235715-77235874 | − | 88 | 160 | PTPN12 | Proximal | 0 | Not documented | 4450 |
| Charlie7a_dup713 | Multi | No | — | — | DNA | DNA | chr7: 77313169-77313351 | − | 120 | 183 | RSBN1L | Dista | 12410 | Not documented | 51 |
| MIR_dup75994 | Uniquely | No | — | — | SINE | MIR | chr7: 77671805-77672037 | + | 130 | 233 | MAGI2 | Proximal | 0 | Not documented | 52 |
| MLT2C1_dup1141 | Uniquely | No | — | — | LTR | ERVL | chr7: 77907836-77908209 | + | 82 | 374 | MAGI2 | Proximal | 0 | Not documented | 53 |
| CR1_Mam_dup822 | Multi/ | No | — | — | LINE | CR1 | chr7: 78050258-78050752 | + | 130 | 495 | MAGI2 | Proximal | 0 | Not documented | 54 |
| | Uniquely | | | | | | | | | | | | | | |
| AluJb_dup55843 | Uniquely | No | — | — | SINE | Alu | chr7: 78050849-78051146 | + | 65 | 298 | MAGI2 | Proximal | 0 | Not documented | 55 |
| L4_dup7842 | Multi/ | No | — | — | LINE | RTE | chr7: 78909661-78909721 | − | 140 | 61 | MAGI2 | Proximal | 0 | Not documented | 56 |
| | Uniquely | | | | | | | | | | | | | | |
| AluJr4_dup7358 | Multi/ | No | — | — | SINE | Alu | chr7: 78909965-78910272 | + | 84 | 308 | MAGI2 | Proximal | 0 | Not documented | 57 |
| | Uniquely | | | | | | | | | | | | | | |
| AluSc_dup14161 | Multi | No | — | — | SINE | Alu | chr7: 78928763-78928889 | + | 29 | 127 | MAGI2 | Proximal | 0 | Not documented | 58 |
| LTR78B_dup1623 | Uniquely | No | — | — | LTR | ERV1 | chr7: 79061843-79062585 | + | 160 | 743 | MAGI2 | Proximal | 0 | Not documented | 59 |
| L2_dup25389 | Multi | No | — | — | LINE | L2 | chr7: 79088912-79089103 | − | 150 | 192 | MAGI2 | Distal | 6023 | Not documented | 60 |
| L3_dup20113 | Multi | No | — | — | LINE | CR1 | chr7: 79090532-79090824 | + | 150 | 293 | MAGI2 | Distal | 7643 | Not documented | 61 |
| L3_dup20114 | Multi/ | No | — | — | LINE | CR1 | chr7: 79091390-79091739 | + | 170 | 350 | MAGI2 | Distal | 8501 | Not documented | 62 |
| | Uniquely | | | | | | | | | | | | | | |
| L3_dup20115 | Multi | No | — | — | LINE | CR1 | chr7: 79091772-79091831 | + | 150 | 60 | MAGI2 | Distal | 8883 | Not documented | 63 |
| L1ME1_dup13154 | Uniquely | No | — | — | LINE | Other L1 | chr7: 8065202-8065987 | + | 110 | 786 | GLCCI1 | Proximal | 0 | Not documented | 64 |
| L1MA2_dup2814 | Multi/ | No | — | — | LINE | Other L1 | chr7: 8067137-8071329 | + | 50 | 4193 | GLCCI1 | Proximal | 0 | Not documented | 65 |
| | Uniquely | | | | | | | | | | | | | | |
| L1ME1_dup13155 | Uniquely | No | — | — | LINE | Other L1 | chr7: 8071350-8074210 | + | 100 | 2861 | GLCCI1 | Proximal | 0 | Not documented | 66 |
| L1PB4_dup2972 | Uniquely | No | — | — | LINE | L1PA\|B\|x | chr7: 8075511-8077740 | + | 110 | 2230 | GLCCI1 | Proximal | 0 | Not documented | 67 |
| L1PB4_dup2973 | Uniquely | No | — | — | LINE | L1PA\|B\|x | chr7: 8077738-8079345 | + | 72 | 1608 | GLCCI1 | Proximal | 0 | Not documented | 68 |
| MER6A_dup484 | Uniquely | No | — | — | DNA | DNA | chr7: 8084550-8085088 | − | 80 | 539 | GLCCI1 | Proximal | 0 | Not documented | 69 |
| MLT2B3_dup1522 | Multi | No | — | — | LTR | ERVL | chr7: 80999052-80999635 | + | 92 | 584 | AC005008.2 | Distal | 170622 | Not documented | 70 |
| AluJo_dup25235 | Uniquely | No | — | — | SINE | Alu | chr7: 8103237-8103556 | − | 92 | 320 | GLCCI1 | Proximal | 0 | Not documented | 71 |
| MSTB_dup3597 | Multi | No | — | — | LTR | ERVL- | chr7: 81040859-81041195 | − | 94 | 337 | AC005008.2 | Distal | 212429 | Not documented | 72 |
| | | | | | | MaLR | | | | | | | | | |
| MIR3_dup39119 | Multi | No | — | — | SINE | MIR | chr7: 81057354-81057525 | − | 140 | 172 | AC005008.2 | Distal | 228924 | Not documented | 73 |
| MER61-int_dup535 | Multi | No | — | — | LTR | ERV1 | chr7: 86952700-86956041 | − | 75 | 3342 | CROT | Distal | 18957 | Not documented | 74 |
| MIRb_dup96253 | Multi/ | No | — | — | SINE | MIR | chr7: 87834631-87834792 | − | 130 | 162 | SRI | Proximal | 0 | Not documented | 4475 |
| | Uniquely | | | | | | | | | | | | | | |
| L1ME4a_dup19055 | Multi/ | No | — | — | LINE | Other L1 | chr7: 87834830-87834942 | − | 120 | 113 | SRI | Proximal | 0 | Not documented | 76 |
| | Uniquely | | | | | | | | | | | | | | |
| L1ME4a_dup19056 | Multi/ | No | — | — | LINE | Other L1 | chr7: 87835051-87835162 | − | 90 | 112 | SRI | Proximal | 0 | Not documented | 77 |
| | Uniquely | | | | | | | | | | | | | | |
| L1PB1_dup6066 | Uniquely | No | — | — | LINE | L1PA\|B\|x | chr7: 91448306-91454839 | − | 49 | 6534 | MTERF | Proximal | 0 | Not documented | 78 |
| MLT1D_dup8528 | Uniquely | No | — | — | LTR | ERVL- | chr7: 91502432-91502912 | − | 95 | 481 | MTERF | Proximal | 0 | Not documented | 79 |
| | | | | | | MaLR | | | | | | | | | |
| AluSg7_dup3312 | Multi | No | — | — | SINE | AIL | chr7: 91741862-91742161 | + | 29 | 300 | CYP51A1 | Proximal | 0 | Not documented | 80 |
| AluSx1_dup41961 | Multi/ | No | — | — | SINE | Alu | chr7: 91829672-91829965 | − | 53 | 294 | KRIT1 | Proximal | 0 | Not documented | 81 |
| | Uniquely | | | | | | | | | | | | | | |
| AluSx4_dup2312 | Uniquely | No | — | — | SINE | Alu | chr7: 91869022-91869317 | − | 40 | 296 | KRIT1 | Proximal | 0 | Not documented | 82 |
| MER20B_dup1853 | Multi | No | — | — | DNA | DNA | chr7: 91874185-91874340 | + | 120 | 156 | KRIT1 | Proximal | 0 | Not documented | 83 |
| L2_dup25690 | Multi/ | No | — | — | LINE | L2 | chr7: 91978039-91978630 | − | 140 | 592 | ANKIB1 | Proximal | 0 | Not documented | 84 |
| | Uniquely | | | | | | | | | | | | | | |
| AluSx3_dup11898 | Multi | No | — | — | SINE | Alu | chr7: 92085903-92085940 | + | 72 | 38 | GATAD1 | Proximal | 0 | Not documented | 85 |
| AluSx3_dup11899 | Multi | No | — | — | SINE | Alu | chr7: 92085944-92086004 | + | 100 | 61 | GATAD1 | Proximal | 0 | Not documented | 86 |
| AluSx_dup54449 | Multi | No | — | — | SINE | Alu | chr7: 92086169-92086495 | + | 49 | 327 | GATAD1 | Proximal | 0 | Not documented | 87 |
| AluSx_dup54450 | Multi | No | — | — | SINE | Alu | chr7: 92086496-92086796 | + | 42 | 301 | GATAD1 | Proximal | 0 | Not documented | 88 |
| AluSz_dup37752 | Multi | No | — | — | SINE | Alu | chr7: 92087169-92087470 | + | 53 | 302 | GATAD1 | Proximal | 0 | Not documented | 89 |
| AluSg_dup16537 | Multi | No | — | — | SINE | Alu | chr7: 92166399-92166683 | − | 45 | 285 | RBM48 | Proximal | 0 | Not documented | 90 |
| L2a_dup76938 | Uniquely | No | — | — | LINE | L2 | chr7: 92192710-92193609 | + | 140 | 900 | FAM133B | Proximal | 0 | Not documented | 91 |
| L1ME2z_dup3084 | Multi | No | — | — | LINE | Other L1 | chr7: 92774994-92775069 | − | 78 | 76 | SAMD9L | Proximal | 0 | Not documented | 92 |
| L2a_dup76971 | Multi/ | No | — | — | LINE | L2 | chr7: 92775142-92775894 | + | 130 | 753 | SAMD9L | Proximal | 0 | Not documented | 93 |
| | Uniquely | | | | | | | | | | | | | | |
| L1PB1_dup6082 | Uniquely | No | — | — | LINE | L1PA\|B\|x | chr7: 94805444-94810484 | + | 42 | 5041 | PPP1R9A | Proximal | 0 | EVE annotated | 94 |
| L1PB1_dup6089 | Uniquely | No | — | — | LINE | L1PA\|B\|x | chr7: 94858640-94860069 | + | 52 | 1430 | PPP1R9A | Proximal | 0 | Not documented | 95 |
| HAL1_dup12515 | Multi/ | No | — | — | LINE | Other L1 | chr7: 95041990-95042071 | + | 120 | 82 | PON2 | Proximal | 0 | Not documented | 96 |
| | Uniquely | | | | | | | | | | | | | | |
| L2a_dup77081 | Multi | No | — | — | LINE | L2 | chr7: 95042103-95042147 | + | 50 | 45 | PON2 | Proximal | 0 | Not documented | 97 |
| L1M5_dup28100 | Multi/ | No | — | — | LINE | Other L1 | chr7: 95042149-95042308 | − | 150 | 160 | PON2 | Proximal | 0 | Not documented | 98 |
| | Uniquely | | | | | | | | | | | | | | |
| AluJr_dup30054 | Multi | No | — | — | SINE | Alu | chr7: 95042309-95042612 | + | 75 | 304 | PON2 | Proximal | 0 | Not documented | 99 |
| L1M5_dup28101 | Multi/ | No | — | — | LINE | Other L1 | chr7: 95042615-95043029 | − | 130 | 415 | PON2 | Proximal | 0 | Not documented | 4500 |
| | Uniquely | | | | | | | | | | | | | | |
| L1MB3_dup6860 | Multi/ | No | — | — | LINE | Other L1 | chr7: 95043362-95043451 | − | 65 | 90 | PON2 | Proximal | 0 | Not documented | 1 |
| | Uniquely | | | | | | | | | | | | | | |
| L3b_dup3237 | Multi/ | No | — | — | LINE | CR1 | chr7: 95044162-95044407 | − | 120 | 246 | PON2 | Proximal | 0 | Not documented | 2 |
| | Uniquely | | | | | | | | | | | | | | |
| AluSq_dup8517 | Multi/ | No | — | — | SINE | Alu | chr7: 95044984-95045294 | + | 40 | 311 | PON2 | Proximal | 0 | Not documented | 3 |
| | Uniquely | | | | | | | | | | | | | | |
| AluSx_dup54602 | Multi | No | — | — | SINE | Alu | chr7: 97552097-97552399 | − | 54 | 303 | ASNS | Distal | 50244 | Not documented | 4 |
| LTR5A_dup109 | Uniquely | No | — | — | LTR | ERVK | chr7: 97570329-97571358 | − | 45 | 1030 | 0CM2 | Distal | 42639 | Not documented | 5 |
| SATR2_dup108 | Uniquely | No | — | — | Other | Other | chr7: 97593719-97595337 | + | 79 | 1619 | OCM2 | Distal | 18660 | Not documented | 6 |
| | | | | | | Repeats | | | | | | | | | |
| AluY_dup48713 | Multi | No | — | — | SINE | Alu | chr7: 97599682-97599990 | − | 19 | 309 | OCM2 | Distal | 14007 | Not documented | 7 |
| AluJr_dup30100 | Multi | No | — | — | SINE | Alu | chr7: 97600536-97600853 | − | 57 | 318 | OCM2 | Distal | 13144 | Not documented | 8 |
| AluSx1_dup42107 | Multi | No | — | — | SINE | Alu | chr7: 97845871-97846175 | − | 33 | 305 | TECPR1 | Proximal | 0 | Not documented | 9 |
| L1MD2_dup4539 | Multi | No | — | — | LINE | Other L1 | chr7: 98730568-98730806 | + | 100 | 239 | SMURF1 | Proximal | 0 | Not documented | 10 |
| L1MD2_dup4540 | Multi | No | — | — | LINE | Other L1 | chr7: 98730879-98731024 | + | 100 | 146 | SMURF1 | Proximal | 0 | Not documented | 11 |
| MIR3_dup39572 | Multi/ | No | — | — | SINE | MIR | chr7: 99007610-99007772 | − | 110 | 163 | BUD31 | Proximal | 0 | Not documented | 12 |
| | Uniquely | | | | | | | | | | | | | | |
| LTR13_dup142 | Multi/ | No | — | — | LTR | ERVK | chr7: 99012668-99013646 | − | 20 | 979 | BUD31 | Proximal | 0 | Not documented | 13 |
| | Uniquely | | | | | | | | | | | | | | |
| Charlie12_dup6 | Uniquely | No | — | — | DNA | DNA | chr7: 99265999-99268740 | + | 53 | 2742 | CYP3A5 | Proximal | 0 | Not documented | 14 |
| MIRb_dup96915 | Multi | No | — | — | SINE | MIR | chr7: 99488839-99489025 | + | 150 | 187 | TRIM4 | Proximal | 0 | Not documented | 15 |
| MLT1L_dup5595 | Multi/ | No | — | — | LTR | ERVL- | chr7: 99489317-99489404 | − | 88 | 88 | TRIM4 | Proximal | 0 | Not documented | 16 |
| | Uniquely | | | | | MaLR | | | | | | | | | |
| AluSx1_dup42311 | Multi | No | — | — | SINE | Alu | chr7: 99634058-99634364 | + | 41 | 307 | ZKSCAN1 | Proximal | 0 | Not documented | 17 |
| AluSx3_dup11970 | Multi | No | — | — | SINE | Alu | chr7: 99635359-99635654 | + | 35 | 296 | ZKSCAN1 | Proximal | 0 | Not documented | 18 |
| AluSc8_dup8813 | Multi | No | — | — | SINE | Alu | chr7: 99636337-99636631 | + | 43 | 295 | ZKSCAN1 | Proximal | 0 | Not documented | 19 |
| AluSx1_dup42312 | Multi | No | — | — | SINE | Alu | chr7: 99636653-99636958 | + | 42 | 30€ | ZKSCAN1 | Proximal | 0 | Not documented | 20 |
| MIR3_dup39588 | Multi | No | — | — | SINE | MIR | chr7: 99722818-99722923 | + | 180 | 106 | CNPY4 | Proximal | 0 | Not documented | 21 |
| AluSg_dup16662 | Uniquely | No | — | — | SINE | Alu | chr7: 99745477-99745770 | + | 32 | 294 | LAMTOR4 | Proximal | 76. | Not documented | 22 |
| MLT1A0_dup9536 | Uniquely | No | — | — | LTR | ERVL- | chr7: 99810604-99810933 | − | 91 | 330 | STAG3 | Proximal | 0 | Not documented | 23 |
| | | | | | | MaLR | | | | | | | | | |
| AluSx_dup54916 | Multi | No | — | — | SINE | Alu | chr7: 99905671-99905983 | + | 51 | 313 | SPDYE3 | Proximal | 0 | Not documented | 24 |
| AluJb_dup56664 | Multi | No | — | — | SINE | Alu | chr7: 99907036-99907373 | + | 75 | 338 | SPDYE3 | Proximal | 0 | Not documented | 4525 |
| AluJb_dup56665 | Multi | No | — | — | SINE | Alu | chr7: 99908422-99908759 | + | 77 | 338 | SPDYE3 | Proximal | 0 | Not documented | 26 |
| AluJb_dup56666 | Multi | No | — | — | SINE | Alu | chr7: 99909812-99910149 | + | 81 | 338 | SPDYE3 | Proximal | 0 | Not documented | 27 |
| AluJb_dup56667 | Multi | No | — | — | SINE | Alu | chr7: 99911202-99911537 | + | 76 | 336 | SPDYE3 | Proximal | 0 | Not documented | 28 |
| AluJo_dup27929 | Multi | No | — | — | SINE | Alu | chr7: 99912594-99912933 | + | 84 | 340 | SPDYE3 | Proximal | 0 | Not documented | 29 |
| MSTA_dup8737 | Multi/ | No | — | — | LTR | ERVL- | chr7: 99923235-99923621 | − | 67 | 387 | SPDYE3 | Distal | 3417 | Not documented | 30 |
| | Uniquely | | | | | MaLR | | | | | | | | | |
| AluSx1_dup42359 | Multi | No | — | — | SINE | Alu | chr7: 99932345-99932645 | − | 50 | 301 | PILRB | Proximal | 1093 | Not documented | 31 |
| LTR49_dup646 | Multi | No | — | — | LTR | ERV1 | chr7: 99946988-99947533 | − | 110 | 546 | PILRB | Proximal | 0 | Not documented | 32 |
| AluJb_dup56673 | Multi | No | — | — | SINE | Alu | chr7: 99948857-99948924 | − | 54 | 68 | PILRB | Proximal | 0 | Not documented | 33 |
| L1MD_dup3702 | Multi/ | No | — | — | LINE | Other L1 | chr7: 99952749-99952855 | − | 120 | 107 | PILRB | Proximal | 0 | Not documented | 34 |
| | Uniquely | | | | | | | | | | | | | | |
| MLT1J2_dup3124 | Multi/ | No | — | — | LTR | ERVL- | chr7: 99964960-99965296 | + | 140 | 337 | PILRB | Proximal | 0 | Not documented | 35 |
| | Uniquely | | | | | MaLR | | | | | | | | | |
| Charlie1b_dup1612 | Multi | No | — | — | DNA | DNA | chr8: 100008859-100009290 | − | 69 | 432 | VPS13B | Distal | 16205 | Not documented | 36 |
| LTR56_dup499 | Multi | No | — | — | LTR | ERV1 | chr8: 100904274-100904410 | − | 65 | 137 | COX6C | Proximal | 0 | Not documented | 37 |
| MER44A_dup1267 | Multi/ | No | — | — | DNA | DNA | chr8: 101165634-101165961 | − | 65 | 328 | POLR2K | Proximal | 0 | Not documented | 38 |
| | Uniquely | | | | | | | | | | | | | | |
| MER5A_dup17355 | Multi | No | — | — | DNA | DNA | chr8: 101166150-101166219 | − | 120 | 70 | POLR2K | Proximal | 0 | Not documented | 39 |
| MER34B-int_dup391 | Multi | No | — | — | LTR | ERV1 | chr8: 101931930-101932247 | − | 49 | 318 | YWHAZ | Proximal | 0 | Not documented | 40 |
| AluJb_dup64043 | Multi | No | — | — | SINE | Alu | chr8: 102218732-102218909 | + | 55 | 178 | ZNF706 | Proximal | 312 | Not documented | 41 |
| MER74A_dup716 | Uniquely | No | — | — | LTR | ERVL | chr8: 10328116-10328624 | + | 84 | 509 | MSRA | Distal | 41716 | Not documented | 42 |
| AluJb_dup64080 | Multi | No | — | — | SINE | Alu | chr8: 103365996-103366276 | + | 76 | 281 | UBR5 | Proximal | 0 | Not documented | 43 |
| L1MC4a_dup13492 | Multi | No | — | — | LINE | Other L1 | chr8: 103412264-103412358 | + | 110 | 95 | UBR5 | Proximal | 0 | Not documented | 44 |
| AluJo_dup31870 | Multi | No | — | — | SINE | Alu | chr8: 103412367-103412538 | + | 83 | 172 | UBR5 | Proximal | 0 | Not documented | 45 |
| ERVL-E-int_{—} | Uniquely | No | — | — | LTR | ERVL | chr8: 10344122-10345075 | + | 130 | 954 | PRSS55 | Distal | 37982 | Not documented | 46 |
| dup4615 | | | | | | | | | | | | | | | |
| L1MC4a_dup13493 | Uniquely | No | — | — | LINE | Other L1 | chr8: 103658724-103659397 | + | 91 | 674 | KLF10 | Proximal | 1611 | Not documented | 47 |
| MLT1F2_dup2929 | Uniquely | No | — | — | LTR | ERVL- | chr8: 103892119-103892274 | + | 81 | 15€ | AZIN1 | Proximal | 0 | Not documented | 48 |
| | | | | | | MaLR | | | | | | | | | |
| MIRb_dup106707 | Multi | No | — | — | SINE | MIR | chr8: 104178040-104178159 | + | 130 | 120 | BAALC | Proximal | 0 | Not documented | 49 |
| L2b_dup46482 | Multi | No | — | — | LINE | L2 | chr8: 104241740-104241800 | − | 140 | 61 | BAALC | Proximal | 0 | Not documented | 4550 |
| L1PA7_dup6921 | Multi | No | — | — | LINE | L1PA\|B\|x | chr8: 109133337-109135710 | − | 45 | 2374 | RSPO2 | Distal | 37425 | Not documented | 51 |
| L2b_dup46643 | Multi | No | — | — | LINE | L2 | chr8: 109153060-109153287 | + | 170 | 228 | RSPO2 | Distal | 57148 | Not documented | 52 |
| AluJb_dup59978 | Multi | No | — | — | SINE | Alu | chr8: 11644138-11644447 | − | 92 | 310 | NEIL2 | Proximal | 0 | Not documented | 53 |
| THE1C-int_dup983 | Uniquely | No | — | — | LTR | ERVL- | chr8: 116483761-116485357 | − | 53 | 1597 | TRPS1 | Proximal | 0 | Not documented | 54 |
| | | | | | | MaLR | | | | | | | | | |
| AluJb_dup64526 | Multi | No | — | — | SINE | Alu | chr8: 118937826-118938168 | + | 69 | 343 | EXT1 | Proximal | 0 | Not documented | 55 |
| AluJb_dup64538 | Uniquely | No | — | — | SINE | Alu | chr8: 119102387-119102668 | + | 79 | 282 | EXT1 | Proximal | 0 | Not documented | 56 |
| AluSx3_dup13519 | Uniquely | No | — | — | SINE | Alu | chr8: 120143460-120143762 | − | 53 | 303 | COLEC10 | Distal | 24640 | Not documented | 57 |
| L1M2_dup4064 | Multi | No | — | — | LINE | Other L1 | chr8: 12414108-12416270 | + | 76 | 2163 | FAM86B2 | Distal | 120194 | Not documented | 58 |
| LTR5A_dup154 | Multi | No | — | — | LTR | ERVK | chr8: 12423489-12424512 | + | 38 | 1024 | FAM86B2 | Distal | 129575 | Not documented | 59 |
| L1ME1_dup16014 | Uniquely | No | — | — | LINE | Other L1 | chr8: 126330854-126332136 | + | 90 | 1283 | NSMCE2 | Proximal | 0 | Not documented | 60 |
| L1MC3_dup6595 | Uniquely | No | — | — | LINE | Other L1 | chr8: 129009846-129010765 | − | 91 | 920 | TMEM75 | Distal | 49256 | Not documented | 61 |
| L2c_dup67083 | Multi | No | — | — | LINE | L2 | chr8: 12940890-12941010 | − | 120 | 121 | DLC1 | Proximal | 0 | Not documented | 62 |
| MIRc_dup51938 | Multi | No | — | — | SINE | MIR | chr8: 137877089-137877309 | + | 120 | 221 | KHDRBS3 | Distal | 1208125 | Not documented | 63 |
| L1PA7_dup7091 | Uniquely | No | — | — | LINE | L1PA\|B\|x | chr8: 141912434-141915275 | − | 34 | 2842 | PTK2 | Proximal | 0 | EVE annotated | 64 |
| MIR3_dup45519 | Multi | No | — | — | SINE | MIR | chr8: 143817956-143818054 | − | 97 | 99 | THEM6 | Proximal | 0 | Not documented | 65 |
| L2b_dup48422 | Multi/ | No | — | — | LINE | L2 | chr8: 144363090-144363196 | + | 170 | 107 | GLI4 | Distal | 3990 | Not documented | 66 |
| | Uniquely | | | | | | | | | | | | | | |
| LTR50_dup1387 | Multi | No | — | — | LTR | ERVL | chr8: 144363779-144364006 | − | 120 | 228 | GLI4 | Distal | 4679 | Not documented | 67 |
| MLT1E2_dup2031 | Multi | No | — | — | LTR | ERVL- | chr8: 144916197-144916760 | + | 110 | 564 | NRBP2 | Proximal | 0 | Not documented | 68 |
| | | | | | | MaLR | | | | | | | | | |
| L2_dup30041 | Multi | No | — | — | LINE | L2 | chr8: 144916867-144917273 | − | 140 | 407 | NRBP2 | Proximal | 0 | Not documented | 69 |
| MIR_dup88702 | Multi | No | — | — | SINE | MIR | chr8: 145158193-145158461 | − | 140 | 269 | SHARPIN | Proximal | 0 | Not documented | 70 |
| MER115_dup1390 | Multi | No | — | — | DNA | DNA | chr8: 145750473-145750694 | − | 130 | 222 | LRRC24 | Proximal | 0 | Not documented | 71 |
| L1MC1_dup7227 | Uniquely | No | — | — | LINE | Other L1 | chr8: 145975397-145976231 | − | 81 | 835 | ZNF251 | Proximal | 0 | Not documented | 72 |
| L2b_dup48437 | Multi | No | — | — | LINE | L2 | chr8: 146075117-146075646 | + | 130 | 530 | COMMD5 | Proximal | 0 | Not documented | 73 |
| L2a_dup89099 | Multi/ | No | — | — | LINE | L2 | chr8: 146280335-146280450 | + | 130 | 116 | C8orf33 | Proximal | 0 | Not documented | 74 |
| | Uniquely | | | | | | | | | | | | | | |
| LTR13_dup183 | Multi/ | No | — | — | LTR | ERVK | chr8: 146280512-146281504 | + | 25 | 993 | C8orf33 | Proximal | 0 | Not documented | 4575 |
| | Uniquely | | | | | | | | | | | | | | |
| MIR3_dup41719 | Uniquely | No | — | — | SINE | MIR | chr8: 17089565-17089730 | + | 140 | 166 | CNOT7 | Proximal | 0 | Not documented | 76 |
| LTR5B_dup156 | Multi | No | — | — | LTR | ERVK | chr8: 23148997-23149045 | − | 65 | 49 | R3HCC1 | Proximal | 0 | Not documented | 77 |
| MIRb_dup101912 | Multi/ | No | — | — | SINE | MIR | chr8: 26362710-26362880 | − | 120 | 171 | PNMA2 | Proximal | 0 | Not documented | 78 |
| | Uniquely | | | | | | | | | | | | | | |
| AluSx1_dup45696 | Multi/ | No | — | — | SINE | Alu | chr8: 26363227-26363509 | + | 35 | 283 | PNMA2 | Proximal | 0 | Not documented | 79 |
| | Uniquely | | | | | | | | | | | | | | |
| MIRb_dup101913 | Multi/ | No | — | — | SINE | MIR | chr8: 26363602-26363836 | + | 130 | 235 | PNMA2 | Proximal | 0 | Not documented | 80 |
| | Uniquely | | | | | | | | | | | | | | |
| L2c_dup67707 | Multi/ | No | — | — | LINE | L2 | chr8: 26364224-26364392 | + | 110 | 169 | PNMA2 | Proximal | 0 | Not documented | 81 |
| | Uniquely | | | | | | | | | | | | | | |
| AluJb_dup60648 | Multi/ | No | — | — | SINE | Alu | chr8: 26364663-26364979 | + | 75 | 317 | PNMA2 | Proximal | 0 | Not documented | 82 |
| | Uniquely | | | | | | | | | | | | | | |
| MamGyp-int_dup157 | Multi/ | No | — | — | LTR | Gypsy | chr8: 26365257-26366372 | − | 150 | 1116 | PNMA2 | Proximal | 0 | Not documented | 83 |
| | Uniquely | | | | | | | | | | | | | | |
| MIRc_dup47827 | Multi | No | — | — | SINE | MIR | chr8: 26514443-26514531 | − | 140 | 89 | DPYSL2 | Proximal | 0 | Not documented | 84 |
| MER103C_dup4447 | Multi/ | No | — | — | DNA | DNA | chr8: 27465719-27465833 | + | 89 | 115 | CLU | Proximal | 0 | Not documented | 85 |
| | Uniquely | | | | | | | | | | | | | | |
| L2a_dup81859 | Multi/ | No | — | — | LINE | L2 | chr8: 27466092-27466216 | + | 150 | 125 | CLU | Proximal | 0 | Not documented | 86 |
| | Uniquely | | | | | | | | | | | | | | |
| L1ME4a_dup20528 | Multi | No | — | — | LINE | Other L1 | chr8: 27471189-27471380 | − | 140 | 192 | CLU | Proximal | 0 | Not documented | 87 |
| MIRc_dup47869 | Multi/ | No | — | — | SINE | MIR | chr8: 27471799-27471947 | + | 140 | 149 | CLU | Proximal | 0 | Not documented | 88 |
| | Uniquely | | | | | | | | | | | | | | |
| Charlie7_dup1894 | Multi | No | — | — | DNA | DNA | chr8: 27534105-27534250 | + | 130 | 146 | SCARA3 | Proximal | 0 | Not documented | 89 |
| MARNA_dup1681 | Multi | No | — | — | DNA | DNA | chr8: 28203321-28203713 | + | 140 | 393 | ZNF395 | Proximal | 0 | Not documented | 90 |
| AluSz6_dup19773 | Multi | No | — | — | SINE | Alu | chr8: 28831322-28831629 | − | 38 | 308 | HMBOX1 | Proximal | 0 | Not documented | 91 |
| AluJr_dup33021 | Multi | No | — | — | SINE | Alu | chr8: 30013363-30013637 | − | 66 | 275 | LEPROTL1 | Proximal | 0 | Not documented | 92 |
| MLT1J_dup7381 | Uniquely | No | — | — | LTR | ERVL- | chr8: 30022390-30022591 | − | 100 | 202 | DCTN6 | Proximal | 0 | Not documented | 93 |
| | | | | | | MaLR | | | | | | | | | |
| L2a_dup81997 | Multi | No | — | — | LINE | L2 | chr8: 30210951-30211032 | + | 83 | 82 | RBPMS | Distal | 30913 | Not documented | 94 |
| LTR33_dup4479 | Multi | No | — | — | LTR | ERVL | chr8: 32785298-32785732 | + | 150 | 435 | NRG1 | Distal | 162751 | Not documented | 95 |
| MIR_dup81599 | Multi | No | — | — | SINE | MIR | chr8: 32901860-32901996 | − | 110 | 137 | NRG1 | Distal | 279313 | Not documented | 96 |
| L1MB4_dup3958 | Multi | No | — | — | LINE | Other L1 | chr8: 33358567-33358701 | + | 70 | 135 | MAK16 | Proximal | 0 | Not documented | 97 |
| AluJo_dup30460 | Multi | No | — | — | SINE | Alu | chr8: 37636194-37636451 | + | 63 | 258 | PROSC | Proximal | 0 | Not documented | 98 |
| L1MC4a_dup12931 | Multi | No | — | — | LINE | Other L1 | chr8: 38069885-38070483 | − | 75 | 599 | BAG4 | Proximal | 0 | Not documented | 99 |
| AluJr_dup33380 | Uniquely | No | — | — | SINE | Alu | chr8: 38279925-38280219 | − | 65 | 295 | FGFR1 | Proximal | 0 | Not documented | 4600 |
| L1P2_dup768 | Uniquely | No | — | — | LINE | L1PA\|B\|x | chr8: 39000001-39001875 | − | 40 | 1875 | ADAM32 | Proximal | 0 | Not documented | 1 |
| AluY_dup52614 | Multi | No | — | — | SINE | Alu | chr8: 40139543-40139847 | − | 28 | 305 | C8orf4 | Distal | 126723 | Not documented | 2 |
| MER6_dup400 | Uniquely | No | — | — | DNA | DNA | chr8: 42033765-42034481 | + | 72 | 717 | PLAT | Proximal | 0 | Not documented | 3 |
| MER4A_dup485 | Uniquely | No | — | — | LTR | ERV1 | chr8: 42043555-42044204 | + | 52 | 550 | PLAT | Proximal | 0 | Not documented | 4 |
| MIRc_dup48468 | Uniquely | No | — | — | SINE | MIR | chr8: 42048476-42048622 | + | 140 | 147 | PLAT | Proximal | 0 | Not documented | 5 |
| AluSx3_dup13029 | Multi | No | — | — | SINE | Alu | chr8: 48889544-48889845 | + | 42 | 302 | MCM4 | Proximal | 0 | Not documented | 6 |
| AluJb_dup61801 | Multi/ | No | — | — | SINE | Alu | chr8: 48890052-48890318 | − | 89 | 267 | MCM4 | Proximal | 0 | Not documented | 7 |
| | Uniquely | | | | | | | | | | | | | | |
| Tigger2a_dup1649 | Multi/ | No | — | — | DNA | DNA | chr8: 51556816-51557279 | + | 67 | 464 | SNTG1 | Proximal | 0 | Not documented | 8 |
| | Uniquely | | | | | | | | | | | | | | |
| LTR17_dup439 | Uniquely | No | — | — | LTR | ERV1 | chr8: 55060881-55061641 | − | 52 | 761 | MRPL15 | Proximal | 421 | Not documented | 9 |
| MIR_dup82455 | Multi | No | — | — | SINE | MIR | chr8: 56652218-56652274 | − | 110 | 57 | TMEM68 | Proximal | 0 | Not documented | 10 |
| L1MC4_dup14087 | Multi | No | — | — | LINE | Other L1 | chr8: 56692940-56693861 | − | 110 | 922 | TGS1 | Proximal | 0 | Not documented | 11 |
| Tigger6a_dup389 | Uniquely | No | — | — | DNA | DNA | chr8: 59018631-59019628 | + | 93 | 998 | FAM110B | Proximal | 0 | Not documented | 12 |
| MLT1D-int_dup354 | Multi | No | — | — | LTR | ERVL- | chr8: 59361978-59363260 | − | 120 | 1283 | UBXN2B | Proximal | 0 | Not documented | 13 |
| | | | | | | MaLR | | | | | | | | | |
| L1MB3_dup7726 | Multi | No | — | — | LINE | Other L1 | chr8: 60882514-60882963 | − | 65 | 450 | CA8 | Distal | 216944 | Not documented | 14 |
| LTR47B_dup187 | Multi | No | — | — | LTR | ERVL | chr8: 60883038-60883410 | + | 83 | 373 | CA8 | Distal | 216497 | Not documented | 15 |
| L1PA7_dup6690 | Uniquely | No | — | — | LINE | L1PA\|B\|x | chr8: 63151475-63155248 | − | 55 | 3774 | NKAIN3 | Distal | 5903 | EVE annotated | 16 |
| L1PA11_dup2013 | Uniquely | No | — | — | LINE | L1PA\|B\|x | chr8: 63769684-63771882 | − | 97 | 2199 | NKAIN3 | Proximal | 0 | Not documented | 17 |
| L1ME2_dup6257 | Multi | No | — | — | LINE | Other L1 | chr8: 63878984-63879213 | − | 110 | 230 | NKAIN3 | Proximal | 0 | Not documented | 18 |
| MIRc_dup49014 | Multi | No | — | — | SINE | MIR | chr8: 67428966-67429105 | − | 100 | 140 | C8orf46 | Proximal | 0 | Not documented | 19 |
| MADE2_dup1310 | Multi | No | — | — | DNA | DNA | chr8: 67429317-67429391 | − | 73 | 75 | C8orf46 | Proximal | 0 | Not documented | 20 |
| MIRb_dup104133 | Multi | No | — | — | SINE | MIR | chr8: 67429503-67429679 | − | 140 | 177 | C8orf46 | Proximal | 0 | Not documented | 21 |
| MER117_dup2090 | Multi | No | — | — | DNA | DNA | chr8: 67429735-67429823 | + | 150 | 89 | C8orf46 | Proximal | 0 | Not documented | 22 |
| FLAM_A_dup7518 | Multi | No | — | — | SINE | Alu | chr8: 67430423-67430549 | − | 82 | 127 | C8orf46 | Proximal | 0 | Not documented | 23 |
| AluSx_dup60743 | Uniquely | No | — | — | SINE | Alu | chr8: 67590049-67590346 | + | 49 | 298 | C8orf44 | Proximal | 0 | Not documented | 24 |
| L1PB2_dup1357 | Multi | No | — | — | LINE | L1PA\|B\|x | chr8: 69158480-69160478 | − | 60 | 1999 | PREX2 | Distal | 9216 | Not documented | 4625 |
| L1MC1_dup6892 | Multi | No | — | — | LINE | Other L1 | chr8: 69258514-69259177 | − | 65 | 664 | C8orf34 | Proximal | 0 | Not documented | 26 |
| MLT1E1A_dup1683 | Multi | No | — | — | LTR | ERVL- | chr8: 69353358-69353644 | − | 89 | 287 | C8orf34 | Proximal | 0 | Not documented | 27 |
| | | | | | | MaLR | | | | | | | | | |
| THE1B_dup11147 | Multi | No | — | — | LTR | ERVL- | chr8: 69574610-69574951 | + | 66 | 342 | C8orf34 | Proximal | 0 | Not documented | 28 |
| | | | | | | MaLR | | | | | | | | | |
| AluSc_dup15857 | Multi | No | — | — | SINE | Alu | chr8: 74235889-74236184 | − | 41 | 296 | RDH10 | Proximal | 0 | Not documented | 29 |
| L1ME2z_dup3405 | Multi | No | — | — | LINE | Other L1 | chr8: 74876562-74876749 | + | 110 | 188 | TCEB1 | Proximal | 0 | Not documented | 30 |
| FLAM_C_dup9762 | Multi | No | — | — | SINE | Alu | chr8: 74876750-74876884 | + | 67 | 135 | TCEB1 | Proximal | 0 | Not documented | 31 |
| AluSz_dup42650 | Multi | No | — | — | SINE | Alu | chr8: 74891278-74891563 | − | 62 | 286 | TMEM70 | Proximal | 0 | Not documented | 32 |
| AluJr_dup34280 | Multi | No | — | — | SINE | Alu | chr8: 77734689-77734975 | − | 70 | 287 | ZFHX4 | Proximal | 0 | Not documented | 33 |
| Tigger1_dup6314 | Multi | No | — | — | DNA | DNA | chr8: 77900534-77901148 | − | 60 | 615 | PEX2 | Proximal | 0 | Not documented | 34 |
| L1MA6_dup2734 | Uniquely | No | — | — | LINE | Other L1 | chr8: 79738850-79740520 | + | 70 | 1671 | IL7 | Distal | 21093 | Not documented | 35 |
| LTR6A_dup91 | Multi | No | — | — | LTR | ERV1 | chr8: 81471111-81471140 | − | 15 | 30 | ZBTB10 | Distal | 32612 | Not documented | 36 |
| L1MA4A_dup3122 | Uniquely | No | — | — | LINE | Other L1 | chr8: 82293281-82299554 | − | 95 | 6274 | PMP2 | Distal | 53008 | Not documented | 37 |
| L1MC4_dup14332 | Multi/ | No | — | — | LINE | Other L1 | chr8: 82352797-82352912 | − | 84 | 116 | PMP2 | Proximal | 0 | Not documented | 38 |
| | Uniquely | | | | | | | | | | | | | | |
| L1MC4_dup14333 | Multi/ | No | — | — | LINE | Other L1 | chr8: 82353037-82353755 | − | 110 | 719 | PMP2 | Proximal | 0 | Not documented | 39 |
| | Uniquely | | | | | | | | | | | | | | |
| L1MC4_dup14334 | Multi/ | No | — | — | LINE | Other L1 | chr8: 82353851-82354515 | − | 110 | 665 | PMP2 | Proximal | 0 | Not documented | 40 |
| | Uniquely | | | | | | | | | | | | | | |
| AluY_dup53900 | Multi/ | No | — | — | SINE | Alu | chr8: 82357449-82357757 | − | 24 | 309 | PMP2 | Proximal | 0 | Not documented | 41 |
| | Uniquely | | | | | | | | | | | | | | |
| Tigger4_dup784 | Multi | No | — | — | DNA | DNA | chr8: 87484608-87485321 | + | 49 | 714 | RMDN1 | Proximal | 0 | Not documented | 42 |
| MIRb_dup105415 | Multi | No | — | — | SINE | MIR | chr8: 87527605-87527786 | − | 180 | 182 | CPNE3 | Proximal | 0 | Not documented | 43 |
| L1MD1_dup3298 | Uniquely | No | — | — | LINE | Other L1 | chr8: 90587181-90590808 | − | 82 | 3628 | RIPK2 | Distal | 179168 | Not documented | 44 |
| AluSx1_dup47822 | Uniquely | No | — | — | SINE | Alu | chr8: 94812130-94812438 | − | 65 | 309 | TMEM67 | Proximal | 0 | Not documented | 45 |
| MIR_dup84500 | Uniquely | No | — | — | SINE | MIR | chr8: 94812754-94812946 | − | 120 | 193 | TMEM67 | Proximal | 0 | Not documented | 46 |
| AluSq2_dup24475 | Multi/ | No | — | — | SINE | Alu | chr8: 95269425-95269709 | − | 50 | 285 | GEM | Proximal | 0 | Not documented | 47 |
| | Uniquely | | | | | | | | | | | | | | |
| MIRb_dup105956 | Multi/ | No | — | — | SINE | MIR | chr8: 95270755-95270995 | + | 130 | 241 | GEM | Proximal | 0 | Not documented | 48 |
| | Uniquely | | | | | | | | | | | | | | |
| MIRb_dup105957 | Multi | No | — | — | SINE | MIR | chr8: 95271025-95271201 | + | 150 | 177 | GEM | Proximal | 0 | Not documented | 49 |
| AluJo_dup31616 | Uniquely | No | — | — | SINE | Alu | chr8: 95273587-95273880 | − | 50 | 294 | GEM | Proximal | 0 | Not documented | 4650 |
| MSTD-int_dup369 | Uniquely | No | — | — | LTR | ERVL- | chr8: 97334889-97336641 | − | 100 | 1753 | PTDSS1 | Proximal | 0 | Not documented | 51 |
| | | | | | | MaLR | | | | | | | | | |
| L1PA7_dup7526 | Uniquely | No | — | — | LINE | L1PA\|B\|x | chr9: 108290004-108292064 | + | 33 | 2061 | FSD1L | Proximal | 0 | EVE annotated | 52 |
| MER91A_dup1919 | Multi | No | — | — | DNA | DNA | chr9: 111680562-111680726 | + | 130 | 165 | IKBKAP | Proximal | 0 | Not documented | 53 |
| MER8_dup1160 | Multi/ | No | — | — | DNA | DNA | chr9: 111702345-111702580 | + | 110 | 236 | FAM206A | Proximal | 0 | Not documented | 54 |
| | Uniquely | | | | | | | | | | | | | | |
| MLT1B_dup9897 | Multi | No | — | — | LTR | ERVL- | chr9: 115233533-115233856 | + | 86 | 324 | C9orf147 | Proximal | 0 | Not documented | 55 |
| | | | | | | MaLR | | | | | | | | | |
| AluJr_dup37473 | Multi | No | — | — | SINE | Alu | chr9: 115233860-115233943 | + | 60 | 84 | C9orf147 | Proximal | 0 | Not documented | 56 |
| MIR3_dup48423 | Multi | No | — | — | SINE | MIR | chr9: 115234198-115234283 | − | 120 | 86 | C9orf147 | Proximal | 0 | Not documented | 57 |
| LTR54B_dup476 | Multi | No | — | — | LTR | ERV1 | chr9: 115234361-115234715 | + | 73 | 355 | C9orf147 | Proximal | 0 | Not documented | 58 |
| L3_dup25257 | Multi | No | — | — | LINE | CR1 | chr9: 115449615-115449667 | − | 140 | 53 | INIP | Proximal | 0 | Not documented | 59 |
| L1PA10_dup3799 | Multi/ | No | — | — | LINE | L1PA\|B\|x | chr9: 115750431-115756749 | − | 38 | 6319 | ZFP37 | Distal | 43912 | EVE annotated | 60 |
| | Uniquely | | | | | | | | | | | | | | |
| Tigger7_dup1730 | Multi | No | — | — | DNA | DNA | chr9: 115760757-115761001 | + | 98 | 245 | ZFP37 | Distal | 39660 | Not documented | 61 |
| Tigger7_dup1731 | Multi/ | No | — | — | DNA | DNA | chr9: 115761020-115761099 | + | 80 | 80 | ZFP37 | Distal | 39562 | Not documented | 62 |
| | Uniquely | | | | | | | | | | | | | | |
| MER21C_dup2959 | Multi/ | No | — | — | LTR | ERVL | chr9: 115761606-115762425 | − | 110 | 820 | ZFP37 | Distal | 38236 | Not documented | 63 |
| | Uniquely | | | | | | | | | | | | | | |
| MER4C_dup631 | Multi/ | No | — | — | LTR | ERV1 | chr9: 117790859-117791209 | + | 57 | 351 | TNC | Proximal | 0 | Not documented | 64 |
| | Uniquely | | | | | | | | | | | | | | |
| MIRc_dup55749 | Uniquely | No | — | — | SINE | MIR | chr9: 117800758-117801006 | + | 130 | 249 | TNC | Proximal | 0 | Not documented | 65 |
| AluSx_dup67838 | Multi | No | — | — | SINE | Alu | chr9: 117801095-117801408 | − | 52 | 314 | TNC | Proximal | 0 | Not documented | 66 |
| MIRb_dup119281 | Multi | No | — | — | SINE | MIR | chr9: 117801466-117801590 | + | 160 | 125 | TNC | Proximal | 0 | Not documented | 67 |
| MIRc_dup55750 | Uniquely | No | — | — | SINE | MIR | chr9: 117801844-117802037 | − | 110 | 194 | TNC | Proximal | 0 | Not documented | 68 |
| MIRb_dup119284 | Multi/ | No | — | — | SINE | MIR | chr9: 117805701-117805907 | + | 120 | 207 | TNC | Proximal | 0 | Not documented | 69 |
| | Uniquely | | | | | | | | | | | | | | |
| MIR3_dup48707 | Multi/ | No | — | — | SINE | MIR | chr9: 117807332-117807472 | + | 140 | 141 | TNC | Proximal | 0 | Not documented | 70 |
| | Uniquely | | | | | | | | | | | | | | |
| AluJb_dup69609 | Multi/ | No | — | — | SINE | Alu | chr9: 117807661-117807960 | − | 76 | 300 | TNC | Proximal | 0 | Not documented | 71 |
| | Uniquely | | | | | | | | | | | | | | |
| MIRb_dup119286 | Multi/ | No | — | — | SINE | MIR | chr9: 117808406-117808613 | − | 120 | 208 | TNC | Proximal | 0 | Not documented | 72 |
| | Uniquely | | | | | | | | | | | | | | |
| MER103C_dup5132 | Multi/ | No | — | — | DNA | DNA | chr9: 117809691-117809966 | − | 100 | 276 | TNC | Proximal | 0 | Not documented | 73 |
| | Uniquely | | | | | | | | | | | | | | |
| MIRb_dup119287 | Multi/ | No | — | — | SINE | MIR | chr9: 117810944-117811152 | − | 120 | 209 | TNC | Proximal | 0 | Not documented | 74 |
| | Uniquely | | | | | | | | | | | | | | |
| MIRc_dup55752 | Multi/ | No | — | — | SINE | MIR | chr9: 117811619-117811824 | − | 140 | 206 | TNC | Proximal | 0 | Not documented | 4675 |
| | Uniquely | | | | | | | | | | | | | | |
| MIRb_dup119288 | Multi | No | — | — | SINE | MIR | chr9: 117812996-117813233 | − | 160 | 238 | TNC | Proximal | 0 | Not documented | 76 |
| MIRc_dup55753 | Multi | No | — | — | SINE | MIR | chr9: 117813609-117813707 | − | 120 | 99 | TNC | Proximal | 0 | Not documented | 77 |
| L1MA7_dup4618 | Multi | No | — | — | LINE | Other L1 | chr9: 117814256-117814309 | + | 34 | 54 | TNC | Proximal | 0 | Not documented | 78 |
| L1MA7_dup4619 | Multi/ | No | — | — | LINE | Other L1 | chr9: 117814377-117814754 | + | 60 | 378 | TNC | Proximal | 0 | Not documented | 79 |
| | Uniquely | | | | | | | | | | | | | | |
| L1MA7_dup4620 | Multi | No | — | — | LINE | Other L1 | chr9: 117814792-117814912 | + | 60 | 121 | TNC | Proximal | 0 | Not documented | 80 |
| MER103C_dup5133 | Multi/ | No | — | — | DNA | DNA | chr9: 117815633-117815923 | − | 140 | 291 | TNC | Proximal | 0 | Not documented | 81 |
| | Uniquely | | | | | | | | | | | | | | |
| MIRb_dup119289 | Multi/ | No | — | — | SINE | MIR | chr9: 117822612-117822852 | + | 150 | 241 | TNC | Proximal | 0 | Not documented | 82 |
| | Uniquely | | | | | | | | | | | | | | |
| Charlie15a_{—} | Multi/ | No | — | — | DNA | DNA | chr9: 117823551-117823745 | + | 150 | 195 | TNC | Proximal | 0 | Not documented | 83 |
| dup1860 | Uniquely | | | | | | | | | | | | | | |
| MIRb_dup119290 | Multi/ | No | — | — | SINE | MIR | chr9: 117824428-117824597 | − | 150 | 170 | TNC | Proximal | 0 | Not documented | 84 |
| | Uniquely | | | | | | | | | | | | | | |
| AluJo_dup34410 | Multi/ | No | — | — | SINE | Alu | chr9: 117824608-117824903 | + | 68 | 296 | TNC | Proximal | 0 | Not documented | 85 |
| | Uniquely | | | | | | | | | | | | | | |
| MER91C_dup857 | Multi | No | — | — | DNA | DNA | chr9: 117826684-117826741 | − | 130 | 58 | TNC | Proximal | 0 | Not documented | 86 |
| AluSx1_dup52598 | Multi/ | No | — | — | SINE | Alu | chr9: 117827393-117827693 | + | 48 | 301 | TNC | Proximal | 0 | Not documented | 87 |
| | Uniquely | | | | | | | | | | | | | | |
| AluSx_dup67839 | Multi/ | No | — | — | SINE | Alu | chr9: 117827936-117828203 | + | 56 | 268 | TNC | Proximal | 0 | Not documented | 88 |
| | Uniquely | | | | | | | | | | | | | | |
| L2a_dup94046 | Uniquely | No | — | — | LINE | L2 | chr9: 117832295-117832799 | − | 150 | 505 | TNC | Proximal | 0 | Not documented | 89 |
| L2c_dup78785 | Uniquely | No | — | — | LINE | L2 | chr9: 117833150-117833450 | + | 160 | 301 | TNC | Proximal | 0 | Not documented | 90 |
| MIRb_dup119293 | Multi/ | No | — | — | SINE | MIR | chr9: 117841918-117842104 | − | 150 | 187 | TNC | Proximal | 0 | Not documented | 91 |
| | Uniquely | | | | | | | | | | | | | | |
| AluSx1_dup52599 | Uniquely | No | — | — | SINE | Alu | chr9: 117842909-117843190 | + | 48 | 282 | TNC | Proximal | 0 | Not documented | 92 |
| AluSx_dup67843 | Multi | No | — | — | SINE | Alu | chr9: 117854849-117855163 | − | 68 | 315 | TNC | Proximal | 0 | Not documented | 93 |
| MIRb_dup119302 | Uniquely | No | — | — | SINE | MIR | chr9: 117859385-117859646 | + | 120 | 262 | TNC | Proximal | 0 | Not documented | 94 |
| L2c_dup78787 | Multi | No | — | — | LINE | L2 | chr9: 117861559-117861659 | − | 110 | 101 | TNC | Proximal | 0 | Not documented | 95 |
| AluYc_dup4289 | Multi/ | No | — | — | SINE | Alu | chr9: 117873158-117873371 | − | 32 | 214 | TNC | Proximal | 0 | Not documented | 96 |
| | Uniquely | | | | | | | | | | | | | | |
| MLT1F2_dup3214 | Multi/ | No | — | — | LTR | ERVL- | chr9: 117873471-117873678 | + | 110 | 208 | TNC | Proximal | 0 | Not documented | 97 |
| | Uniquely | | | | | MaLR | | | | | | | | | |
| AluSq2_dup27071 | Multi | No | — | — | SINE | Alu | chr9: 117873679-117873988 | − | 47 | 310 | TNC | Proximal | 0 | Not documented | 98 |
| MLT1F2_dup3215 | Multi/ | No | — | — | LTR | ERVL- | chr9: 117873989-117874343 | + | 110 | 355 | TNC | Proximal | 0 | Not documented | 99 |
| | Uniquely | | | | | MaLR | | | | | | | | | |
| MIR3_dup48711 | Multi | No | — | — | SINE | MIR | chr9: 117874479-117874586 | + | 140 | 108 | TNC | Proximal | 0 | Not documented | 4700 |
| Charlie15a_{—} | Multi | No | — | — | DNA | DNA | chr9: 117874625-117874769 | − | 130 | 145 | TNC | Proximal | 0 | Not documented | 1 |
| dup1861 | | | | | | | | | | | | | | | |
| LTR52-int_dup99 | Uniquely | No | — | — | LTR | ERVL | chr9: 119468952-119470937 | + | 110 | 1986 | ASTN2 | Proximal | 0 | Not documented | 2 |
| L1PA8_dup4578 | Uniquely | No | — | — | LINE | L1PA\|B\|x | chr9: 119960327-119962362 | − | 43 | 2036 | ASTN2 | Proximal | 0 | Not documented | 3 |
| AluJb_dup69771 | Multi | No | — | — | SINE | Alu | chr9: 123605777-123606070 | + | 54 | 294 | PSMD5 | Proximal | 516 | Not documented | 4 |
| AluJb_dup69904 | Multi | No | — | — | SINE | Alu | chr9: 125769653-125769994 | − | 66 | 342 | RABGAP1 | Proximal | 0 | Not documented | 5 |
| L1MC4a_dup14846 | Multi | No | — | — | LINE | Other L1 | chr9: 125769995-125770104 | − | 130 | 110 | RABGAP1 | Proximal | 0 | Not documented | 6 |
| AluSg7_dup4061 | Multi | No | — | — | SINE | Alu | chr9: 126141082-126141383 | − | 27 | 302 | CRB2 | Proximal | 0 | Not documented | 7 |
| AluSx_dup68221 | Uniquely | No | — | — | SINE | Alu | chr9: 127067552-127067862 | + | 53 | 311 | NEK6 | Proximal | 0 | Not documented | 8 |
| MIRc_dup56583 | Multi | No | — | — | SINE | MIR | chr9: 127114013-127114210 | + | 100 | 198 | NEK6 | Proximal | 0 | Not documented | 9 |
| MER58A_dup7044 | Uniquely | No | — | — | DNA | DNA | chr9: 127119463-127119681 | − | 100 | 219 | PSMB7 | Proximal | 0 | Not documented | 10 |
| AluSc_dup17885 | Multi | No | — | — | SINE | Alu | chr9: 127997487-127997755 | − | 40 | 269 | HSPA5 | Proximal | 0 | Not documented | 11 |
| MIR3_dup49641 | Multi | No | — | — | SINE | MIR | chr9: 130213359-130213440 | − | 140 | 82 | RPL12 | Proximal | 0 | Not documented | 12 |
| MIR3_dup49709 | Multi | No | — | — | SINE | MIR | chr9: 130648286-130648357 | − | 130 | 72 | ST6GALNAC6 | Proximal | 0 | Not documented | 13 |
| L2c_dup79908 | Multi | No | — | — | LINE | L2 | chr9: 130699117-130699217 | − | 140 | 101 | DPM2 | Proximal | 0 | Not documented | 14 |
| MIR_dup95449 | Multi | No | — | — | SINE | MIR | chr9: 130699501-130699659 | + | 150 | 159 | DPM2 | Proximal | 0 | Not documented | 15 |
| MIR3_dup49735 | Multi | No | — | — | SINE | MIR | chr9: 130947680-130947826 | − | 120 | 147 | CIZ1 | Proximal | 0 | Not documented | 16 |
| L1ME4a_dup23997 | Multi | No | — | — | LINE | Other L1 | chr9: 130950127-130950680 | + | 140 | 554 | CIZ1 | Proximal | 0 | Not documented | 17 |
| FAM_dup2649 | Multi | No | — | — | SINE | Alu | chr9: 131071433-131071603 | − | 64 | 171 | TRUB2 | Proximal | 0 | Not documented | 18 |
| MER5B_dup13725 | Multi/ | No | — | — | DNA | DNA | chr9: 131085507-131085577 | − | 150 | 71 | COQ4 | Proximal | 0 | Not documented | 19 |
| | Uniquely | | | | | | | | | | | | | | |
| L2a_dup95181 | Multi | No | — | — | LINE | L2 | chr9: 131085737-131085857 | + | 120 | 121 | COQ4 | Proximal | 0 | Not documented | 20 |
| AluSg_dup20625 | Uniquely | No | — | — | SINE | Alu | chr9: 131140536-131140851 | + | 36 | 316 | URM1 | Proximal | 0 | Not documented | 21 |
| AluSx_dup68762 | Uniquely | No | — | — | SINE | Alu | chr9: 131361419-131361713 | − | 55 | 295 | SPTAN1 | Proximal | 0 | Not documented | 22 |
| L2b_dup52501 | Multi | No | — | — | LINE | L2 | chr9: 131584359-131584564 | − | 140 | 206 | ENDOG | Proximal | 0 | Not documented | 23 |
| MIR_dup95530 | Multi | No | — | — | SINE | MIR | chr9: 131698924-131698994 | + | 75 | 71 | PHYHD1 | Proximal | 0 | Not documented | 24 |
| MER 41C_dup390 | Multi | No | — | — | LTR | ERV1 | chr9: 132100761-132101175 | − | 32 | 415 | IER5L | Distal | 160222 | Not documented | 4725 |
| MIRb_dup122547 | Uniquely | No | — | — | SINE | MIR | chr9: 132397265-132397405 | + | 140 | 141 | NTMT1 | Proximal | 0 | Not documented | 26 |
| AluY_dup61215 | Multi | No | — | — | SINE | Alu | chr9: 132398382-132398689 | + | 30 | 308 | NTMT1 | Proximal | 174 | Not documented | 27 |
| AluSp_dup24407 | Multi/ | No | — | — | SINE | Alu | chr9: 132590057-132590371 | − | 42 | 315 | C9orf78 | Proximal | 0 | Not documented | 28 |
| | Uniquely | | | | | | | | | | | | | | |
| AluSx3_dup14903 | Multi | No | — | — | SINE | Alu | chr9: 133579635-133579934 | + | 49 | 300 | EXOSC2 | Proximal | 0 | Not documented | 29 |
| MIR3_dup49949 | Multi | No | — | — | SINE | MIR | chr9: 133996837-133997002 | − | 130 | 166 | AIF1L | Proximal | 0 | Not documented | 30 |
| L2c_dup80058 | Multi | No | — | — | LINE | L2 | chr9: 133997326-133997463 | − | 150 | 138 | AIF1L | Proximal | 0 | Not documented | 31 |
| MLT1l_dup5874 | Uniquely | No | — | — | LTR | ERVL- | chr9: 13408164-13408508 | + | 140 | 345 | MPDZ | Distal | 128576 | Not documented | 32 |
| | | | | | | MaLR | | | | | | | | | |
| MER112_dup2587 | Multi | No | — | — | DNA | DNA | chr9: 134399864-134400067 | + | 130 | 204 | UCK1 | Proximal | 0 | Not documented | 33 |
| AluJo_dup35007 | Multi/ | No | — | — | SINE | Alu | chr9: 136892566-136892831 | − | 74 | 266 | BRD3 | Distal | 2597 | Not documented | 34 |
| | Uniquely | | | | | | | | | | | | | | |
| LTR79_dup2542 | Multi | No | — | — | LTR | ERVL | chr9: 139687679-139687967 | − | 130 | 289 | RP11-216L13.17 | Proximal | 0 | Not documented | 35 |
| AluSz_dup48348 | Multi/ | No | — | — | SINE | Alu | chr9: 140510539-140510844 | + | 68 | 306 | C9orf37 | Proximal | 0 | Not documented | 36 |
| | Uniquely | | | | | | | | | | | | | | |
| MIR_dup89558 | Uniquely | No | — | — | SINE | MIR | chr9: 14093929-14094171 | − | 130 | 243 | NFIB | Proximal | 0 | Not documented | 37 |
| AluSx_dup64135 | Uniquely | No | — | — | SINE | Alu | chr9: 14233418-14233726 | − | 41 | 309 | NFIB | Proximal | 0 | Not documented | 38 |
| L1MA4A_dup3284 | Uniquely | No | — | — | LINE | Other L1 | chr9: 14637610-14639647 | + | 70 | 2038 | ZDHHC21 | Proximal | 0 | Not documented | 39 |
| L1M5_dup32923 | Multi | No | — | — | LINE | Other L1 | chr9: 15460105-15460232 | − | 120 | 128 | SNAPC3 | Proximal | 0 | Not documented | 40 |
| AluSq_dup9888 | Multi | No | — | — | SINE | Alu | chr9: 15460396-15460687 | − | 47 | 292 | SNAPC3 | Proximal | 0 | Not documented | 41 |
| MER4-int_dup1288 | Multi | No | — | — | LTR | ERV1 | chr9: 21332306-21332442 | + | 110 | 137 | KLHL9 | Proximal | 0 | Not documented | 42 |
| MIRc_dup53082 | Multi | No | — | — | SINE | MIR | chr9: 21967783-21967866 | + | 140 | 84 | CDKN2A | Proximal | 0 | Not documented | 43 |
| AluSx_dup64425 | Multi/ | No | — | — | SINE | Alu | chr9: 22007077-22007388 | + | 50 | 312 | CDKN2B | Proximal | 0 | Not documented | 44 |
| | Uniquely | | | | | | | | | | | | | | |
| L1MC4_dup15120 | Multi | No | — | — | LINE | Other L1 | chr9: 27327317-27327943 | + | 110 | 627 | MOB3B | Proximal | 0 | Not documented | 45 |
| AluJb_dup66476 | Multi | No | — | — | SINE | Alu | chr9: 27327947-27328081 | + | 100 | 135 | MOB3B | Proximal | 0 | Not documented | 46 |
| AluY_dup57054 | Uniquely | No | — | — | SINE | Alu | chr9: 32553198-32553486 | − | 31 | 289 | NDUFB6 | Proximal | 0 | Not documented | 47 |
| LTR33_dup4909 | Uniquely | No | — | — | LTR | ERVL | chr9: 3263687-3264172 | + | 130 | 486 | RFX3 | Proximal | 0 | Not documented | 48 |
| AluSx_dup64617 | Multi | No | — | — | SINE | Alu | chr9: 33045561-33045858 | + | 50 | 298 | SMU1 | Proximal | 0 | Not documented | 49 |
| FLAM_C_dup10318 | Multi | No | — | — | SINE | Alu | chr9: 33461464-33461583 | − | 68 | 120 | NOL6 | Proximal | 0 | Not documented | 4750 |
| L2c_dup75822 | Multi | No | — | — | LINE | L2 | chr9: 33461833-33461916 | + | 120 | 84 | NOL6 | Proximal | 0 | Not documented | 51 |
| Tigger3b_dup3546 | Uniquely | No | — | — | DNA | DNA | chr9: 3434771-3435482 | − | 55 | 712 | RFX3 | Proximal | 0 | Not documented | 52 |
| L2b_dup48558 | Uniquely | No | — | — | LINE | L2 | chr9: 3445735-3446138 | + | 180 | 404 | RFX3 | Proximal | 0 | Not documented | 53 |
| AluJr_dup35571 | Uniquely | No | — | — | SINE | Alu | chr9: 3452309-3452573 | + | 87 | 265 | AL365202.1 | Proximal | 0 | Not documented | 54 |
| AluSc_dup16541 | Multi | No | — | — | SINE | Alu | chr9: 3456867-3457169 | + | 42 | 303 | AL365202.1 | Proximal | 0 | Not documented | 55 |
| L2c_dup75896 | Uniquely | No | — | — | LINE | L2 | chr9: 34637989-34638401 | − | 160 | 413 | GALT | Proximal | 0 | Not documented | 56 |
| L1M4_dup8021 | Multi/ | No | — | — | LINE | Other L1 | chr9: 3477255-3479318 | − | 110 | 2064 | RFX3 | Proximal | 0 | Not documented | 57 |
| | Uniquely | | | | | | | | | | | | | | |
| MLT1G1_dup1890 | Uniquely | No | — | — | LTR | ERVL- | chr9: 3480068-3480518 | − | 110 | 451 | RFX3 | Proximal | 0 | Not documented | 58 |
| | | | | | | MaLR | | | | | | | | | |
| HERVH-int_dup3380 | Uniquely | No | — | — | LTR | ERV1 | chr9: 35020805-35021442 | − | 44 | 638 | C9orf131 | Distal | 19651 | EVE annotated | 59 |
| AluJr4_dup8658 | Uniquely | No | — | — | SINE | Alu | chr9: 3546788-3546897 | + | 45 | 110 | RFX3 | Distal | 20785 | Not documented | 60 |
| L1MEg_dup9586 | Uniquely | No | — | — | LINE | Other L1 | chr9: 3663781-3665108 | + | 140 | 1328 | RFX3 | Distal | 137778 | Not documented | 61 |
| FLAM_A_dup8097 | Multi | No | — | — | SINE | Alu | chr9: 37088296-37088425 | − | 91 | 130 | ZCCHC7 | Distal | 32112 | Not documented | 62 |
| L1MC5_dup10425 | Multi | No | — | — | LINE | Other L1 | chr9: 37089367-37089471 | − | 120 | 105 | ZCCHC7 | Distal | 31066 | Not documented | 63 |
| MER2_dup4964 | Multi | No | — | — | DNA | DNA | chr9: 37089484-37089782 | − | 70 | 299 | ZCCHC7 | Distal | 30755 | Not documented | 64 |
| L1M1_dup4457 | Uniquely | No | — | — | LINE | Other L1 | chr9: 3712730-3719579 | + | 58 | 6850 | GLIS3 | Distal | 104549 | Not documented | 65 |
| AluJo_dup33207 | Multi | No | — | — | SINE | Alu | chr9: 37503295-37503600 | + | 76 | 306 | POLR1E | Proximal | 0 | Not documented | 66 |
| UCON28b_dup45 | Multi/ | No | — | — | Other | Other | chr9: 3975970-3976106 | − | 150 | 137 | GLIS3 | Proximal | 0 | Not documented | 67 |
| | Uniquely | | | | | Repeats | | | | | | | | | |
| UCON28a_dup86 | Multi | No | — | — | Other | Other | chr9: 3976131-3976221 | − | 130 | 91 | GLIS3 | Proximal | 0 | Not documented | 68 |
| | | | | | | Repeats | | | | | | | | | |
| MER45A_dup1711 | Multi | No | — | — | DNA | DNA | chr9: 4057170-4057347 | + | 110 | 178 | GLIS3 | Proximal | 0 | Not documented | 69 |
| L1MCc_dup1940 | Multi | No | — | — | LINE | Other L1 | chr9: 4058462-4058702 | − | 120 | 241 | GLIS3 | Proximal | 0 | Not documented | 70 |
| MIRb_dup115047 | Multi | No | — | — | SINE | MIR | chr9: 41954852-41954939 | + | 110 | 88 | ANKRD20A2 | Distal | 413365 | Not documented | 71 |
| MER90_dup378 | Multi | No | — | — | LTR | ERV1 | chr9: 42018547-42018966 | + | 120 | 420 | ANKRD20A2 | Distal | 349338 | Not documented | 72 |
| MIRb_dup115048 | Multi | No | — | — | SINE | MIR | chr9: 42019102-42019140 | − | 100 | 39 | ANKRD20A2 | Distal | 349164 | Not documented | 73 |
| AluJr4_dup8885 | Multi | No | — | — | SINE | Alu | chr9: 42217142-42217404 | − | 80 | 263 | ANKRD20A2 | Distal | 150900 | Not documented | 74 |
| THE1B-int_dup2471 | Multi | No | — | — | LTR | ERVL- | chr9: 42232823-42234116 | − | 50 | 1294 | ANKRD20A2 | Distal | 134188 | Not documented | 4775 |
| | | | | | | MaLR | | | | | | | | | |
| L1ME1_dup16626 | Multi | No | — | — | LINE | Other L1 | chr9: 42236271-42236717 | + | 130 | 447 | ANKRD20A2 | Distal | 131587 | Not documented | 76 |
| MER58A_dup6695 | Multi | No | — | — | DNA | DNA | chr9: 42236720-42236893 | + | 110 | 174 | ANKRD20A2 | Distal | 131411 | Not documented | 77 |
| AluSc5_dup3341 | Multi | No | — | — | SINE | Alu | chr9: 42236921-42237218 | + | 50 | 298 | ANKRD20A2 | Distal | 131086 | Not documented | 78 |
| L1ME3B_dup4223 | Multi | No | — | — | LINE | Other L1 | chr9: 42247948-42249533 | − | 140 | 1586 | ANKRD20A2 | Distal | 118771 | Not documented | 79 |
| L1PA17_dup2487 | Multi | No | — | — | LINE | L1PA\|B\|x | chr9: 42250144-42250594 | + | 150 | 451 | ANKRD20A2 | Distal | 117710 | Not documented | 80 |
| SST1_dup58 | Multi | No | — | — | Other | Other | chr9: 42251223-42252481 | − | 30 | 1259 | ANKRD20A2 | Distal | 115823 | Not documented | 81 |
| | | | | | | Repeats | | | | | | | | | |
| GSATII_dup13 | Multi | No | — | — | Other | Other | chr9: 42254026-42257767 | + | 45 | 3742 | ANKRD20A2 | Distal | 110537 | Not documented | 82 |
| | | | | | | Repeats | | | | | | | | | |
| Tigger1_dup6598 | Uniquely | No | — | — | DNA | DNA | chr9: 4233342-4234775 | − | 57 | 1434 | GLIS3 | Proximal | 0 | Not documented | 83 |
| MER90a_dup607 | Multi | No | — | — | LTR | ERV1 | chr9: 44246025-44246239 | − | 110 | 215 | BX088651.2 | Distal | 79678 | Not documented | 84 |
| MER90a_dup610 | Multi | No | — | — | LTR | ERV1 | chr9: 44401599-44401814 | + | 110 | 216 | BX088651.1 | Proximal | 0 | Not documented | 85 |
| L1M4_dup8345 | Multi | No | — | — | LINE | Other L1 | chr9: 45352993-45355981 | + | 99 | 2989 | AL354718.1 | Distal | 85293 | Not documented | 86 |
| GSATII_dup14 | Multi | No | — | — | Other | Other | chr9: 45435147-45439527 | − | 49 | 4381 | AL354718.1 | Proximal | 1747 | Not documented | 87 |
| | | | | | | Repeats | | | | | | | | | |
| SST1_dup80 | Multi | No | — | — | Other | Other | chr9: 45441072-45442328 | + | 30 | 1257 | AL354718.1 | Proximal | 0 | Not documented | 88 |
| | | | | | | Repeats | | | | | | | | | |
| L1PA17_dup2494 | Multi | No | — | — | LINE | L1PA\|B\|x | chr9: 45442959-45443409 | − | 150 | 451 | AL354718.1 | Proximal | 1418 | Not documented | 89 |
| L1ME3B_dup4234 | Multi | No | — | — | LINE | Other L1 | chr9: 45444020-45445605 | + | 150 | 1586 | AL354718.1 | Distal | 2479 | Not documented | 90 |
| AluSc5_dup3359 | Multi | No | — | — | SINE | Alu | chr9: 45456305-45456610 | − | 55 | 306 | AL354718.1 | Distal | 14764 | Not documented | 91 |
| MER58A_dup6699 | Multi | No | — | — | DNA | DNA | chr9: 45456630-45456803 | − | 110 | 174 | AL354718.1 | Distal | 15089 | Not documented | 92 |
| AluJr4_dup8888 | Multi | No | — | — | SINE | Alu | chr9: 45476125-45476389 | + | 79 | 265 | AL354718.1 | Distal | 34584 | Not documented | 93 |
| SST1_dup81 | Multi | No | — | — | Other | Other | chr9: 45726673-45727484 | + | 110 | 812 | FAM27A | Proximal | 0 | Not documented | 94 |
| | | | | | | Repeats | | | | | | | | | |
| MIRb_dup115226 | Multi | No | — | — | SINE | MIR | chr9: 46687902-46687940 | + | 100 | 39 | FAM27D1 | Distal | 296347 | Not documented | 95 |
| MER90_dup379 | Multi | No | — | — | LTR | ERV1 | chr9: 46688076-46688301 | − | 110 | 226 | FAM27D1 | Distal | 296521 | Not documented | 96 |
| L1PA13_dup4552 | Multi/ | No | — | — | LINE | L1PA\|B\|x | chr9: 4731115-4731508 | − | 49 | 394 | AK3 | Proximal | 0 | Not documented | 97 |
| | Uniquely | | | | | | | | | | | | | | |
| LTR89_dup579 | Uniquely | No | — | — | LTR | ERVL | chr9: 6011589-6012053 | − | 110 | 465 | RANBP6 | Proximal | 0 | Not documented | 98 |
| L1M1_dup4627 | Multi | No | — | — | LINE | Other L1 | chr9: 66458644-66460514 | − | 76 | 1871 | SPATA31A7 | Distal | 949035 | Not documented | 99 |
| L1PREC2_dup4173 | Multi/ | No | — | — | LINE | L1PA\|B\|x | chr9: 66460512-66462772 | − | 57 | 2261 | SPATA31A7 | Distal | 950903 | Not documented | 4800 |
| | Uniquely | | | | | | | | | | | | | | |
| L1M1_dup4628 | Uniquely | No | — | — | LINE | Other L1 | chr9: 66470890-66473936 | + | 96 | 3047 | SPATA31A7 | Distal | 961281 | Not documented | 1 |
| L1M4_dup8360 | Multi | No | — | — | LINE | Other L1 | chr9: 66490114-66493134 | + | 99 | 3021 | SPATA31A7 | Distal | 980505 | Not documented | 2 |
| MER90_dup382 | Multi | No | — | — | LTR | ERV1 | chr9: 66553056-66553281 | + | 110 | 226 | SPATA31A7 | Distal | 1043447 | Not documented | 3 |
| MIRb_dup115278 | Multi | No | — | — | SINE | MIR | chr9: 66553417-66553455 | − | 100 | 39 | SPATA31A7 | Distal | 1043808 | Not documented | 4 |
| CER_dup15 | Multi/ | No | — | — | Other | Other | chr9: 66858042-66863340 | + | 59 | 5299 | FAM27E3 | Distal | 921605 | Not documented | 5 |
| | Uniquely | | | | | Repeats | | | | | | | | | |
| AluJr4_dup8894 | Multi | No | — | — | SINE | Alu | chr9: 68263861-68264120 | − | 73 | 260 | RP11-195B21.3 | Distal | 275864 | Not documented | 6 |
| MER58A_dup6709 | Multi | No | — | — | DNA | DNA | chr9: 68284830-68285003 | + | 110 | 174 | RP11-195B21.3 | Distal | 296833 | Not documented | 7 |
| SST1_dup106 | Multi | Nc | — | — | Other | Other | chr9: 68299166-68300426 | − | 30 | 1261 | RP11-195B21.3 | Distal | 311169 | Not documented | 8 |
| | | | | | | Repeats | | | | | | | | | |
| L1PA6_dup3369 | Multi | No | — | — | LINE | L1PA\|B\|x | chr9: 68383016-68385185 | + | 46 | 2170 | RP11-195B21.3 | Distal | 395019 | Not documented | 9 |
| L1M1_dup4637 | Multi | No | — | — | LINE | Other L1 | chr9: 68406677-68408546 | + | 76 | 1870 | RP11-195B21.3 | Distal | 418680 | Not documented | 10 |
| L1HS_dup888 | Multi | No | — | — | LINE | L1PA\|B\|x | chr9: 68741410-68741811 | + | 20 | 402 | FOXD4L6 | Distal | 457670 | Not documented | 11 |
| CER_dup21 | Multi | No | — | — | Other | Other | chr9: 68995848-69000000 | + | 65 | 4153 | FOXD4L6 | Distal | 199481 | Not documented | 12 |
| | | | | | | Repeats | | | | | | | | | |
| CER_dup22 | Multi | No | — | — | Other | Other | chr9: 69000026-69004778 | + | 61 | 4753 | FOXD4L6 | Distal | 194703 | Not documented | 13 |
| | | | | | | Repeats | | | | | | | | | |
| L1MA9_dup8910 | Multi | No | — | — | LINE | Other L1 | chr9: 69040126-69042361 | − | 98 | 2236 | FOXD4L6 | Distal | 157120 | Not documented | 14 |
| L1HS_dup890 | Multi | No | — | — | LINE | L1PA\|B\|x | chr9: 69080416-69080817 | + | 20 | 402 | FOXD4L6 | Distal | 118664 | Not documented | 15 |
| Charlie16a_{—} | Multi | No | — | — | DNA | DNA | chr9: 69244997-69245181 | + | 150 | 185 | CBWD6 | Proximal | 0 | Not documented | 16 |
| dup1037 | | | | | | | | | | | | | | | |
| AluJr4_dup8907 | Multi | No | — | — | SINE | Alu | chr9: 70611983-70612247 | − | 79 | 265 | AL591479.1 | Distal | 34343 | Not documented | 17 |
| THE1B-int_dup2511 | Multi | No | — | — | LTR | ERVL- | chr9: 70627650-70628942 | − | 50 | 1293 | AL591479.1 | Distal | 17648 | Not documented | 18 |
| | | | | | | MaLR | | | | | | | | | |
| L1ME1_dup16701 | Multi | No | — | — | LINE | Other L1 | chr9: 70631097-70631543 | + | 130 | 447 | AL591479.1 | Distal | 15047 | Not documented | 19 |
| MER58A_dup6715 | Multi | No | — | — | DNA | DNA | chr9: 70631546-70631719 | + | 110 | 174 | AL591479.1 | Distal | 14871 | Not documented | 20 |
| AluSc5_dup3378 | Multi | No | — | — | SINE | AIL | chr9: 70631747-70632044 | + | 52 | 298 | AL591479.1 | Distal | 14546 | Not documented | 21 |
| L1PA17_dup2506 | Multi | No | — | — | LINE | L1PA\|B\|x | chr9: 70644955-70645405 | + | 150 | 451 | AL591479.1 | Proximal | 1185 | Not documented | 22 |
| SST1_dup107 | Multi | No | — | — | Other | Other | chr9: 70646088-70647346 | − | 29 | 1259 | AL591479.1 | Proximal | 0 | Not documented | 23 |
| | | | | | | Repeats | | | | | | | | | |
| GSATII_dup18 | Multi | No | — | — | Other | Other | chr9: 70648890-70653266 | + | 45 | 4377 | AL591479.1 | Proximal | 0 | Not documented | 24 |
| | | | | | | Repeats | | | | | | | | | |
| Charlie16a_{—} | Multi | No | — | — | DNA | DNA | chr9: 70874245-70874429 | − | 150 | 185 | CBWD3 | Proximal | 0 | Not documented | 4825 |
| dup1039 | | | | | | | | | | | | | | | |
| AluSx3_dup14188 | Uniquely | No | — | — | SINE | Alu | chr9: 71796153-71796463 | − | 47 | 311 | TJP2 | Proximal | 0 | Not documented | 26 |
| Tigger1_dup6880 | Uniquely | No | — | — | DNA | DNA | chr9: 72334547-72336901 | + | 51 | 2355 | PTAR1 | Proximal | 0 | Not documented | 27 |
| Charlie15a_{—} | Uniquely | No | — | — | DNA | DNA | chr9: 72365396-72365472 | − | 89 | 77 | PTAR1 | Proximal | 0 | Not documented | 28 |
| dup1797 | | | | | | | | | | | | | | | |
| AluSz6_dup21895 | Uniquely | No | — | — | SINE | Alu | chr9: 72837773-72838075 | + | 69 | 303 | MAMDC2 | Proximal | 0 | Not documented | 29 |
| L2_dup30068 | Uniquely | No | — | — | LINE | L2 | chr9: 72875983-72876923 | − | 140 | 941 | SMC5 | Proximal | 0 | Not documented | 30 |
| L2_dup31010 | Uniquely | No | — | — | LINE | L2 | chr9: 72908936-72910099 | − | 150 | 1164 | SMC5 | Proximal | 0 | Not documented | 31 |
| Tigger1_dup6881 | Multi/ | No | — | — | DNA | DNA | chr9: 72923840-72924783 | − | 55 | 944 | SMC5 | Proximal | 0 | Not documented | 32 |
| | Uniquely | | | | | | | | | | | | | | |
| Tigger1_dup6882 | Multi/ | No | — | — | DNA | DNA | chr9: 72925064-72926528 | − | 55 | 1465 | SMC5 | Proximal | 0 | Not documented | 33 |
| | Uniquely | | | | | | | | | | | | | | |
| L1ME2_dup6844 | Uniquely | No | — | — | LINE | Other L1 | chr9: 72947464-72948223 | + | 110 | 760 | SMC5 | Proximal | 0 | Not documented | 34 |
| AluSx3_dup14199 | Multi | No | — | — | SINE | Alu | chr9: 72969128-72969440 | − | 37 | 313 | SMC5 | Proximal | 0 | Not documented | 35 |
| AluY_dup58809 | Multi | No | — | — | SINE | Alu | chr9: 74966929-74967247 | + | 44 | 319 | ZFAND5 | Proximal | 0 | Not documented | 36 |
| MIR_dup91594 | Multi | No | — | — | SINE | MIR | chr9: 74967703-74967866 | − | 100 | 164 | ZFAND5 | Proximal | 0 | Not documented | 37 |
| MIR3_dup47136 | Multi/ | No | — | — | SINE | MIR | chr9: 74978356-74978519 | + | 110 | 164 | ZFAND5 | Proximal | 0 | Not documented | 38 |
| | Uniquely | | | | | | | | | | | | | | |
| MIR3_dup47167 | Multi | No | — | — | SINE | MIR | chr9: 75768432-75768542 | − | 140 | 111 | ANXA1 | Proximal | 0 | Not documented | 39 |
| L2c_dup76754 | Multi/ | No | — | — | LINE | L2 | chr9: 75768653-75769047 | − | 160 | 395 | ANXA1 | Proximal | 0 | Not documented | 40 |
| | Uniquely | | | | | | | | | | | | | | |
| AluSz6_dup21941 | Multi | No | — | — | SINE | Alu | chr9: 75769340-75769654 | − | 69 | 315 | ANXA1 | Proximal | 0 | Not documented | 41 |
| MSTB1_dup2590 | Uniquely | No | — | — | LTR | ERVL- | chr9: 75776801-75777170 | − | 87 | 370 | ANXA1 | Proximal | 0 | Not documented | 42 |
| | | | | | | MaLR | | | | | | | | | |
| MSTB1_dup2591 | Multi/ | No | — | — | LTR | ERVL- | chr9: 75777828-75778241 | − | 65 | 414 | ANXA1 | Proximal | 0 | Not documented | 43 |
| | Uniquely | | | | | MaLR | | | | | | | | | |
| L2a_dup91776 | Multi/ | No | — | — | LINE | L2 | chr9: 75779107-75779216 | + | 150 | 110 | ANXA1 | Proximal | 0 | Not documented | 44 |
| | Uniquely | | | | | | | | | | | | | | |
| MIRc_dup54003 | Multi | No | — | — | SINE | MIR | chr9: 75779505-75779635 | − | 170 | 131 | ANXA1 | Proximal | 0 | Not documented | 45 |
| L2b_dup49949 | Multi | No | — | — | LINE | L2 | chr9: 75779787-75779901 | − | 170 | 115 | ANXA1 | Proximal | 0 | Not documented | 46 |
| L4_dup9645 | Multi/ | No | — | — | LINE | RTE | chr9: 75780552-75780700 | − | 140 | 149 | ANXA1 | Proximal | 0 | Not documented | 47 |
| | Uniquely | | | | | | | | | | | | | | |
| L1PA16_dup7682 | Multi | No | — | — | LINE | L1PA\|B\|x | chr9: 75781881-75782041 | − | 75 | 161 | ANXA1 | Proximal | 0 | Not documented | 48 |
| L2c_dup76757 | Multi/ | No | — | — | LINE | L2 | chr9: 75783266-75783541 | − | 170 | 276 | ANXA1 | Proximal | 0 | Not documented | 49 |
| | Uniquely | | | | | | | | | | | | | | |
| L2b_dup50025 | Multi | No | — | — | LINE | L2 | chr9: 78609638-78610285 | + | 160 | 648 | PCSK5 | Proximal | 0 | Not documented | 4850 |
| FLAM_C_dup10538 | Multi | No | — | — | SINE | Alu | chr9: 79001786-79001917 | − | 52 | 132 | RFK | Proximal | 0 | Not documented | 51 |
| LTR6A_dup99 | Multi | No | — | — | LTR | ERV1 | chr9: 79013621-79013650 | − | 15 | 30 | RFK | Distal | 4189 | Not documented | 52 |
| MER58B_dup3500 | Multi | No | — | — | DNA | DNA | chr9: 79228190-79228476 | − | 77 | 287 | PRUNE2 | Proximal | 0 | Not documented | 53 |
| MIRb_dup116111 | Multi | No | — | — | SINE | MIR | chr9: 79242610-79242848 | + | 170 | 239 | PRUNE2 | Proximal | 0 | Not documented | 54 |
| L1M5_dup34026 | Uniquely | No | — | — | LINE | Other L1 | chr9: 84276774-84277023 | + | 130 | 250 | TLE1 | Proximal | 0 | Not documented | 55 |
| MER52D_dup338 | Multi/ | No | — | — | LTR | ERV1 | chr9: 84304228-84304442 | − | 95 | 215 | TLE1 | Proximal | 9 | Not documented | 56 |
| | Uniquely | | | | | | | | | | | | | | |
| HSMAR1_dup407 | Uniquely | No | — | — | DNA | DNA | chr9: 86327249-86328520 | + | 36 | 1272 | UBQLN1 | Distal | 4132 | Not documented | 57 |
| SVA_D_dup691 | Multi | No | — | — | Other | SVA | chr9: 86343658-86344307 | + | 6.8 | 650 | GKAP1 | Distal | 10030 | Not documented | 58 |
| AluSx_dup66335 | Uniquely | No | — | — | SINE | Alu | chr9: 87357705-87358015 | − | 47 | 311 | NTRK2 | Proximal | 0 | Not documented | 59 |
| L1MA1_dup2109 | Uniquely | No | — | — | LINE | Other L1 | chr9: 87379520-87380270 | + | 40 | 751 | NTRK2 | Proximal | 0 | Not documented | 60 |
| Charlie8_dup1482 | Multi/ | No | — | — | DNA | DNA | chr9: 87428092-87428351 | − | 110 | 260 | NTRK2 | Proximal | 0 | Not documented | 61 |
| | Uniquely | | | | | | | | | | | | | | |
| L3b_dup3911 | Multi/ | No | — | — | LINE | CR1 | chr9: 87429554-87429657 | − | 150 | 104 | NTRK2 | Proximal | 0 | Not documented | 62 |
| | Uniquely | | | | | | | | | | | | | | |
| L2a_dup92386 | Uniquely | No | — | — | LINE | L2 | chr9: 87455275-87456415 | + | 130 | 1141 | NTRK2 | Proximal | 0 | Not documented | 63 |
| MIR3_dup47524 | Multi/ | No | — | — | SINE | MIR | chr9: 88641429-88641513 | + | 93 | 85 | GOLM1 | Proximal | 0 | Not documented | 64 |
| | Uniquely | | | | | | | | | | | | | | |
| L1PA7_dup7471 | Uniquely | No | — | — | LINE | L1PA\|B\|x | chr9: 88703373-88706134 | − | 38 | 2762 | GOLM1 | Proximal | 0 | Not documented | 65 |
| MIR3_dup47528 | Multi | No | — | — | SINE | MIR | chr9: 88880173-88880299 | + | 160 | 127 | ISCA1 | Proximal | 0 | Not documented | 66 |
| FLAM_A_dup8304 | Multi | No | — | — | SINE | Alu | chr9: 91925237-91925370 | − | 61 | 134 | CKS2 | Proximal | 744 | Not documented | 67 |
| MLT1C_dup10082 | Multi | No | — | — | LTR | ERVL- | chr9: 94053202-94053561 | − | 96 | 360 | AUH | Proximal | 0 | Not documented | 68 |
| | | | | | | MaLR | | | | | | | | | |
| L1MC3_dup6953 | Uniquely | No | — | — | LINE | Other L1 | chr9: 94920164-94921242 | − | 100 | 1079 | SPTLC1 | Distal | 42499 | Not documented | 69 |
| MARNA_dup1906 | Multi | No | — | — | DNA | DNA | chr9: 96208877-96209108 | − | 150 | 232 | FAM120AOS | Proximal | 0 | Not documented | 70 |
| MIR3_dup47728 | Uniquely | No | — | — | SINE | MIR | chr9: 99179153-99179305 | + | 130 | 153 | ZNF367 | Proximal | 0 | Not documented | 71 |
| L1M4c_dup3063 | Multi | No | — | — | LINE | Other L1 | chr9: 99572259-99572953 | + | 96 | 695 | ZNF782 | Distal | 5802 | Not documented | 72 |
| AluJo_dup33970 | Multi/ | No | — | — | SINE | Alu | chr9: 99572954-99573261 | + | 68 | 308 | ZNF782 | Distal | 5494 | Not documented | 73 |
| | Uniquely | | | | | | | | | | | | | | |
| L1ME4a_dup25432 | Multi | No | — | — | LINE | Other L1 | chrX: 100882046-100882479 | + | 130 | 434 | ARMCX3 | Proximal | 0 | Not documented | 74 |
| Mam_R4_dup354 | Multi | No | — | — | LINE | Dong-R4 | chrX: 100910404-100910637 | + | 150 | 234 | ARMCX2 | Proximal | 0 | Not documented | 4875 |
| L2c_dup84065 | Uniquely | No | — | — | LINE | L2 | chrX: 101145882-101146713 | − | 160 | 832 | ZMAT1 | Proximal | 0 | Not documented | 76 |
| L2c_dup84067 | Uniquely | No | — | — | LINE | L2 | chrX: 101148543-101149114 | − | 150 | 572 | ZMAT1 | Proximal | 0 | Not documented | 77 |
| L1ME4a_dup25455 | Multi | No | — | — | LINE | Other L1 | chrX: 102317439-102317695 | − | 120 | 257 | BEX1 | Proximal | 0 | Not documented | 78 |
| L1ME4a_dup25459 | Multi | No | — | — | LINE | Other L1 | chrX: 102508104-102508350 | − | 160 | 247 | TCEAL8 | Proximal | 0 | Not documented | 79 |
| L1MEe_dup7337 | Multi | No | — | — | LINE | Other L1 | chrX: 102508348-102508595 | + | 140 | 248 | TCEAL8 | Proximal | 0 | Not documented | 80 |
| HAL1b_dup2911 | Multi | No | — | — | LINE | Other L1 | chrX: 102586313-102586585 | + | 130 | 273 | TCEAL7 | Proximal | 0 | Not documented | 81 |
| L1MEe_dup7338 | Multi | No | — | — | LINE | Other L1 | chrX: 102586614-102586778 | − | 130 | 165 | TCEAL7 | Proximal | 0 | Not documented | 82 |
| L1ME4a_dup25464 | Multi | No | — | — | LINE | Other L1 | chrX: 102586831-102587051 | + | 120 | 221 | TCEAL7 | Proximal | 0 | Not documented | 83 |
| L1ME4a_dup25469 | Multi | No | — | — | LINE | Other L1 | chrX: 102612902-102613135 | − | 120 | 234 | WBP5 | Proximal | 0 | Not documented | 84 |
| L1ME4a_dup25470 | Multi | No | — | — | LINE | Other L1 | chrX: 102613211-102613374 | + | 110 | 164 | WBP5 | Proximal | 0 | Not documented | 85 |
| L1ME4a_dup25471 | Multi | No | — | — | LINE | Other L1 | chrX: 102632961-102633117 | + | 150 | 157 | NGFRAP1 | Proximal | 0 | Not documented | 86 |
| L1ME4a_dup25477 | Multi | No | — | — | LINE | Other L1 | chrX: 102842387-102842565 | + | 120 | 179 | TCEAL4 | Proximal | 0 | Not documented | 87 |
| L1MEe_dup7339 | Multi | No | — | — | LINE | Other L1 | chrX: 102885306-102885487 | − | 130 | 182 | TCEAL1 | Proximal | 0 | Not documented | 88 |
| L1ME4a_dup25479 | Multi | No | — | — | LINE | Other L1 | chrX: 102885544-102885769 | + | 110 | 226 | TCEAL1 | Proximal | 0 | Not documented | 89 |
| MIRc_dup59714 | Multi | No | — | — | SINE | MIR | chrX: 102939993-102940152 | − | 150 | 160 | MORF4L2 | Proximal | 0 | Not documented | 90 |
| L1M2_dup5366 | Multi | No | — | — | LINE | Other L1 | chrX: 108296198-108297349 | − | 90 | 1152 | IRS4 | Distal | 316548 | Not documented | 91 |
| L1MA1_dup2762 | Multi | No | — | — | LINE | Other L1 | chrX: 115047427-115052815 | − | 66 | 5389 | RP1-241P17.4 | Distal | 93759 | Not documented | 92 |
| L1PB1_dup8746 | Uniquely | No | — | — | LINE | L1PA\|B\|x | chrX: 128340455-128345249 | − | 50 | 4795 | SMARCA1 | Distal | 235232 | EVE annotated | 93 |
| L1M1_dup6144 | Uniquely | No | — | — | LINE | Other L1 | chrX: 128404800-128408063 | − | 77 | 3264 | SMARCA1 | Distal | 172418 | Not documented | 94 |
| L2_dup34517 | Uniquely | No | — | — | LINE | L2 | chrX: 128636099-128637656 | − | 160 | 1558 | SMARCA1 | Proximal | 0 | Not documented | 95 |
| L2_dup34518 | Uniquely | No | — | — | LINE | L2 | chrX: 128638247-128638524 | − | 160 | 278 | SMARCA1 | Proximal | 0 | Not documented | 96 |
| L1MB8_dup9683 | Multi | No | — | — | LINE | Other L1 | chrX: 135045177-135045477 | + | 63 | 301 | MMGT1 | Proximal | 0 | Not documented | 97 |
| AluJr_dup41082 | Multi | No | — | — | SINE | Alu | chrX: 135748519-135748679 | − | 70 | 161 | ARHGEF6 | Proximal | 0 | Not documented | 98 |
| MIRb_dup123887 | Multi | No | — | — | SINE | MIR | chrX: 13721953-13722083 | − | 130 | 131 | RAB9A | Proximal | 0 | Not documented | 99 |
| AluSp_dup24808 | Multi | No | — | — | SINE | Alu | chrX: 13731081-13731238 | + | 60 | 158 | TRAPPC2 | Proximal | 0 | Not documented | 4900 |
| AluSx_dup70506 | Multi | No | — | — | SINE | Alu | chrX: 13731287-13731596 | + | 53 | 310 | TRAPPC2 | Proximal | 0 | Not documented | 1 |
| AluSg_dup21073 | Multi | No | — | — | SINE | Alu | chrX: 13731655-13731944 | + | 42 | 290 | TRAPPC2 | Proximal | 0 | Not documented | 2 |
| AluSg_dup21074 | Multi | No | — | — | SINE | Alu | chrX: 13731983-13732282 | + | 33 | 300 | TRAPPC2 | Proximal | 0 | Not documented | 3 |
| MER45B_dup837 | Multi | No | — | — | DNA | DNA | chrX: 13848046-13849016 | + | 89 | 971 | GPM6B | Proximal | 0 | Not documented | 4 |
| AluJb_dup72128 | Multi/ | No | — | — | SINE | Alu | chrX: 13895662-13895970 | + | 72 | 309 | GPM6B | Proximal | 0 | Not documented | 5 |
| | Uniquely | | | | | | | | | | | | | | |
| MER5A_dup21194 | Multi | No | — | — | DNA | DNA | chrX: 148562320-148562378 | + | 92 | 59 | IDS | Proximal | 0 | Not documented | 6 |
| MER33_dup5537 | Multi | No | — | — | DNA | DNA | chrX: 148563767-148563828 | + | 66 | 62 | IDS | Proximal | 0 | Not documented | 7 |
| L1ME4a_dup26319 | Multi | No | — | — | LINE | Other L1 | chrX: 150574560-150574681 | − | 110 | 122 | VMA21 | Proximal | 0 | Not documented | 8 |
| AluSx1_dup58256 | Multi | No | — | — | SINE | Alu | chrX: 150574837-150575152 | − | 47 | 316 | VMA21 | Proximal | 0 | Not documented | 9 |
| AluSq_dup11637 | Multi/ | No | — | — | SINE | Alu | chrX: 150576351-150576663 | − | 46 | 313 | VMA21 | Proximal | 0 | Not documented | 10 |
| | Uniquely | | | | | | | | | | | | | | |
| MamRep434_dup1432 | Multi | No | — | — | DNA | DNA | chrX: 150577152-150577410 | + | 120 | 259 | VMA21 | Proximal | 0 | Not documented | 11 |
| MIRc_dup61446 | Multi | No | — | — | SINE | MIR | chrX: 150577440-150577530 | − | 120 | 91 | VMA21 | Proximal | 0 | Not documented | 12 |
| L1PA5_dup7385 | Multi | No | — | — | LINE | L1PA\|B\|x | chrX: 152713367-152714006 | + | 19 | 640 | TREX2 | Proximal | 0 | Not documented | 13 |
| L1M2_dup5625 | Multi | No | — | — | LINE | Other L1 | chrX: 153213909-153214098 | + | 130 | 190 | HCFC1 | Proximal | 0 | Not documented | 14 |
| MIR3_dup54468 | Multi/ | No | — | — | SINE | MIR | chrX: 153712995-153713070 | + | 120 | 76 | UBL4A | Proximal | 0 | Not documented | 15 |
| | Uniquely | | | | | | | | | | | | | | |
| L4_dup10206 | Multi | No | — | — | LINE | RTE | chrX: 15870568-15870629 | − | 97 | 62 | AP1S2 | Proximal | 0 | Not documented | 16 |
| MIR_dup96917 | Multi | No | — | — | SINE | MIR | chrX: 20143100-20143312 | − | 140 | 213 | EIF1AX | Proximal | 0 | Not documented | 17 |
| L4_dup10225 | Multi | No | — | — | LINE | RTE | chrX: 20146931-20147208 | + | 160 | 278 | EIF1AX | Proximal | 0 | Not documented | 18 |
| FLAM_A_dup8718 | Multi | No | — | — | SINE | Alu | chrX: 20147408-20147530 | − | 96 | 123 | EIF1AX | Proximal | 0 | Not documented | 19 |
| AluSx3_dup15183 | Multi | No | — | — | SINE | Alu | chrX: 20148138-20148449 | + | 36 | 312 | EIF1AX | Proximal | 0 | Not documented | 20 |
| L1PA15_dup4611 | Multi | No | — | — | LINE | L1PA\|B\|x | chrX: 23874497-23874671 | + | 55 | 175 | APOO | Proximal | 0 | Not documented | 21 |
| AluSx_dup70094 | Multi | No | — | — | SINE | Alu | chrX: 2405410-2405670 | − | 49 | 261 | ZBED1 | Proximal | 0 | Not documented | 22 |
| AluSq2_dup27830 | Multi | No | — | — | SINE | Alu | chrX: 2406227-2406515 | − | 45 | 289 | ZBED1 | Proximal | 0 | Not documented | 23 |
| MSTA_dup11165 | Uniquely | No | — | — | LTR | ERVL- | chrX: 3195564-3195951 | − | 60 | 388 | CXorf28 | Proximal | 0 | Not documented | 24 |
| | | | | | | MaLR | | | | | | | | | |
| MIR_dup96109 | Uniquely | No | — | — | SINE | MIR | chrX: 3202372-3202458 | + | 110 | 87 | CXorf28 | Proximal | 0 | Not documented | 4925 |
| L2c_dup81684 | Multi | No | — | — | LINE | L2 | chrX: 37699073-37699122 | + | 85 | 50 | DYNLT3 | Proximal | 0 | Not documented | 26 |
| L2a_dup97427 | Multi | No | — | — | LINE | L2 | chrX: 38185409-38185542 | + | 140 | 134 | RPGR | Proximal | 0 | Not documented | 27 |
| MER112_dup2674 | Multi | No | — | — | DNA | DNA | chrX: 38185612-38185851 | + | 110 | 240 | RPGR | Proximal | 0 | Not documented | 28 |
| L1M1_dup5005 | Uniquely | No | — | — | LINE | Other L1 | chrX: 40579359-40582635 | + | 61 | 3277 | MED14 | Proximal | 0 | Not documented | 29 |
| MER34B-int_dup448 | Multi | No | — | — | LTR | ERV1 | chrX: 41534155-41534332 | − | 57 | 178 | CASK | Proximal | 0 | Not documented | 30 |
| MIR3_dup51195 | Multi/ | No | — | — | SINE | MIR | chrX: 43626155-43626309 | + | 120 | 155 | MAOB | Proximal | 0 | Not documented | 31 |
| | Uniquely | | | | | | | | | | | | | | |
| AluSz_dup49950 | Multi | No | — | — | SINE | Alu | chrX: 46333091-46333386 | − | 49 | 296 | KRBOX4 | Proximal | 0 | Not documented | 32 |
| MER44C_dup555 | Multi | No | — | — | DNA | DNA | chrX: 46333387-46333921 | + | 75 | 535 | KRBOX4 | Proximal | 0 | Not documented | 33 |
| AluSx_dup69708 | Multi | No | — | — | SINE | Alu | chrX: 47054634-47054949 | − | 39 | 316 | UBA1 | Proximal | 0 | Not documented | 34 |
| L1MEe_dup7131 | Multi | No | — | — | LINE | Other L1 | chrX: 48381959-48382117 | − | 110 | 159 | EBP | Proximal | 0 | Not documented | 35 |
| L2b_dup53998 | Multi | No | — | — | LINE | L2 | chrX: 48932114-48932206 | + | 140 | 93 | AF196779.12 | Proximal | 0 | Not documented | 36 |
| L1ME3B_dup4632 | Multi | No | — | — | LINE | Other L1 | chrX: 48963785-48964056 | + | 130 | 272 | WDR45 | Distal | 5678 | Not documented | 37 |
| MIR_dup98343 | Multi | No | — | — | SINE | MIR | chrX: 48964086-48964279 | + | 120 | 194 | WDR45 | Distal | 5979 | Not documented | 38 |
| MER117_dup2554 | Multi/ | No | — | — | DNA | DNA | chrX: 51645221-51645375 | − | 150 | 155 | MAGED1 | Proximal | 0 | Not documented | 39 |
| | Uniquely | | | | | | | | | | | | | | |
| MIR_dup98590 | Multi | No | — | — | SINE | MIR | chrX: 53406072-53406224 | − | 78 | 153 | SMC1A | Proximal | 0 | Not documented | 40 |
| L2c_dup82363 | Uniquely | No | — | — | LINE | L2 | chrX: 53406222-53406477 | + | 120 | 256 | SMC1A | Proximal | 0 | Not documented | 41 |
| L1PA10_dup3985 | Uniquely | No | — | — | LINE | L1PA\|B\|x | chrX: 53996792-53998475 | + | 35 | 1684 | PHF8 | Proximal | 0 | Not documented | 42 |
| MER117_dup2556 | Multi/ | No | — | — | DNA | DNA | chrX: 54842311-54842447 | − | 120 | 137 | MAGED2 | Proximal | 0 | Not documented | 43 |
| | Uniquely | | | | | | | | | | | | | | |
| L3_dup26524 | Multi | No | — | — | LINE | CR1 | chrX: 54953294-54953419 | − | 140 | 126 | TRO | Proximal | 0 | Not documented | 44 |
| L1PA15_dup4775 | Uniquely | No | — | — | LINE | L1PA\|B\|x | chrX: 56020642-56023332 | − | 95 | 2691 | AL353698.1 | Distal | 77426 | Not documented | 45 |
| MamRep605_dup2815 | Multi | No | — | — | Other | Other | chrX: 56843587-56843944 | + | 160 | 358 | SPIN3 | Distal | 158860 | Not documented | 46 |
| | | | | | | Repeats | | | | | | | | | |
| HERVH48-int_dup68 | Multi | No | — | — | LTR | ERV1 | chrX: 57245761-57246886 | + | 28 | 1126 | FAAH2 | Distal | 66254 | Not documented | 47 |
| L1PA4_dup7088 | Uniquely | No | — | — | LINE | L1PA\|B\|x | chrX: 57650003-57655813 | + | 30 | 5811 | ZXDB | Distal | 26098 | EVE annotated | 48 |
| AluSz_dup48703 | Multi | No | — | — | SINE | Alu | chrX: 5906824-5907138 | + | 52 | 315 | NLGN4X | Proximal | 0 | Not documented | 49 |
| MER57-int_dup693 | Uniquely | No | — | — | LTR | ERV1 | chrX: 62619420-62619784 | − | 66 | 365 | SPIN4 | Distal | 48198 | Not documented | 4950 |
| LTR46-int_dup35 | Multi | No | — | — | LTR | ERV1 | chrX: 62646749-62647932 | − | 130 | 1184 | SPIN4 | Distal | 75527 | EVE annotated | 51 |
| LTR46-int_dup34 | Multi/ | No | — | — | LTR | ERV1 | chrX: 62648256-62653802 | − | 94 | 5547 | SPIN4 | Distal | 77034 | EVE annotated | 52 |
| | Uniquely | | | | | | | | | | | | | | |
| MIRb_dup127175 | Multi | No | — | — | SINE | MIR | chrX: 69509377-69509497 | − | 170 | 121 | PDZD11 | Proximal | 0 | Not documented | 53 |
| AluSg7_dup4346 | Multi | No | — | — | SINE | Alu | chrX: 70520285-70520369 | − | 37 | 85 | NONO | Proximal | 0 | Not documented | 54 |
| AluSg7_dup4347 | Multi | No | — | — | SINE | Alu | chrX: 70520370-70520464 | − | 48 | 95 | NONO | Proximal | 0 | Not documented | 55 |
| L2a_dup98877 | Multi | No | — | — | LINE | L2 | chrX: 73042269-73042349 | + | 130 | 81 | CHIC1 | Distal | 135333 | Not documented | 56 |
| L2a_dup98878 | Multi | No | — | — | LINE | L2 | chrX: 73043321-73043383 | + | 150 | 63 | CHIC1 | Distal | 136385 | Not documented | 57 |
| MIRc_dup59147 | Multi | No | — | — | SINE | MIR | chrX: 73043930-73043999 | − | 140 | 70 | CHIC1 | Distal | 136994 | Not documented | 58 |
| L2b_dup54578 | Multi | No | — | — | LINE | L2 | chrX: 73044011-73044061 | + | 140 | 51 | CHIC1 | Distal | 137075 | Not documented | 59 |
| MIRc_dup59148 | Multi | No | — | — | SINE | MIR | chrX: 73044222-73044279 | − | 140 | 58 | CHIC1 | Distal | 137286 | Not documented | 60 |
| L2b_dup54579 | Multi | No | — | — | LINE | L2 | chrX: 73044308-73044351 | + | 110 | 44 | CHIC1 | Distal | 137372 | Not documented | 61 |
| MIRc_dup59149 | Multi | No | — | — | SINE | MIR | chrX: 73044838-73044890 | − | 87 | 53 | CHIC1 | Distal | 137902 | Not documented | 62 |
| L2b_dup54580 | Multi | No | — | — | LINE | L2 | chrX: 73044936-73044977 | + | 140 | 42 | CHIC1 | Distal | 138000 | Not documented | 63 |
| MIRc_dup59150 | Multi | No | — | — | SINE | MIR | chrX: 73045246-73045287 | − | 87 | 42 | CHIC1 | Distal | 138310 | Not documented | 64 |
| L2b_dup54581 | Multi | No | — | — | LINE | L2 | chrX: 73045307-73045352 | + | 160 | 46 | CHIC1 | Distal | 138371 | Not documented | 65 |
| MER58C_dup1513 | Multi | No | — | — | DNA | DNA | chrX: 73045399-73045570 | + | 110 | 172 | CHIC1 | Distal | 138463 | Not documented | 66 |
| L1MC3_dup7498 | Multi/ | No | — | — | LINE | Other L1 | chrX: 73056273-73057558 | + | 68 | 1286 | CHIC1 | Distal | 149337 | Not documented | 67 |
| | Uniquely | | | | | | | | | | | | | | |
| MIRc_dup59151 | Multi | No | — | — | SINE | MIR | chrX: 73061652-73061776 | − | 150 | 125 | CHIC1 | Distal | 154716 | Not documented | 68 |
| FLAM_C_dup11549 | Multi | No | — | — | SINE | Alu | chrX: 73067240-73067354 | − | 51 | 115 | CHIC1 | Distal | 160304 | Not documented | 69 |
| AluSp_dup25694 | Multi | No | — | — | SINE | Alu | chrX: 73166776-73167088 | − | 39 | 313 | CHIC1 | Distal | 259840 | Not documented | 70 |
| L1M4b_dup3612 | Uniquely | No | — | — | LINE | Other L1 | chrX: 73185368-73186025 | − | 110 | 658 | CHIC1 | Distal | 278432 | Not documented | 71 |
| L1MD3_dup2928 | Multi | No | — | — | LINE | Other L1 | chrX: 73193671-73194597 | − | 120 | 927 | CHIC1 | Distal | 286735 | Not documented | 72 |
| AluSp_dup25698 | Multi | No | — | — | SINE | Alu | chrX: 73214662-73214873 | − | 41 | 212 | CHIC1 | Distal | 307726 | Not documented | 73 |
| L1MA7_dup5030 | Multi | No | — | — | LINE | Other L1 | chrX: 73218467-73218733 | + | 120 | 267 | ZCCHC13 | Distal | 305293 | Not documented | 74 |
| L1MA7_dup5031 | Multi | No | — | — | LINE | Other L1 | chrX: 73219042-73220370 | + | 120 | 1329 | ZCCHC13 | Distal | 303656 | Not documented | 4975 |
| L1MA7_dup5035 | Multi | No | — | — | LINE | Other L1 | chrX: 73223421-73224585 | + | 98 | 1165 | ZCCHC13 | Distal | 299441 | Not documented | 76 |
| L1PA8_dup4842 | Multi | No | — | — | LINE | L1PA\|B\|x | chrX: 73291825-73297937 | − | 48 | 6113 | ZCCHC13 | Distal | 226089 | Not documented | 77 |
| L1MA9_dup9870 | Uniquely | No | — | — | LINE | Other L1 | chrX: 73332664-73334841 | + | 80 | 2178 | ZCCHC13 | Distal | 189185 | Not documented | 78 |
| HERVH-int_dup3693 | Multi | No | — | — | LTR | ERV1 | chrX: 73341830-73346583 | − | 82 | 4754 | ZCCHC13 | Distal | 177443 | EVE annotated | 79 |
| HERVH-int_dup3695 | Uniquely | No | — | — | LTR | ERV1 | chrX: 73348549-73350032 | − | 110 | 1484 | ZCCHC13 | Distal | 173994 | Not documented | 80 |
| L1MA9_dup9871 | Multi | No | — | — | LINE | Other L1 | chrX: 73416212-73418390 | − | 77 | 2179 | ZCCHC13 | Distal | 105636 | Not documented | 81 |
| HSMAR2_dup1053 | Uniquely | No | — | — | DNA | DNA | chrX: 73418491-73419776 | + | 52 | 1286 | ZCCHC13 | Distal | 104250 | Not documented | 82 |
| L1MB7_dup12423 | Multi | No | — | — | LINE | Other L1 | chrX: 73445598-73446502 | + | 120 | 905 | ZCCHC13 | Distal | 77524 | Not documented | 83 |
| AluJb_dup74739 | Multi | No | — | — | SINE | Alu | chrX: 73446519-73446713 | + | 65 | 195 | ZCCHC13 | Distal | 77313 | Not documented | 84 |
| L1MB7_dup12424 | Multi | No | — | — | LINE | Other L1 | chrX: 73446717-73447024 | + | 93 | 308 | ZCCHC13 | Distal | 77002 | Not documented | 85 |
| AluJo_dup36947 | Multi | No | — | — | SINE | Alu | chrX: 73447025-73447328 | + | 78 | 304 | ZCCHC13 | Distal | 76698 | Not documented | 86 |
| MER21C_dup3095 | Multi | No | — | — | LTR | ERVL | chrX: 73471284-73471584 | + | 99 | 301 | ZCCHC13 | Distal | 52442 | Not documented | 87 |
| MER21C_dup3096 | Multi | No | — | — | LTR | ERVL | chrX: 73471652-73471724 | + | 74 | 73 | ZCCHC13 | Distal | 52302 | Not documented | 88 |
| AluY_dup64006 | Multi/ | No | — | — | SINE | Alu | chrX: 73472111-73472412 | + | 33 | 302 | ZCCHC13 | Distal | 51614 | Not documented | 89 |
| | Uniquely | | | | | | | | | | | | | | |
| AluJb_dup74773 | Uniquely | No | — | — | SINE | Alu | chrX: 73806647-73806949 | + | 70 | 303 | RLIM | Proximal | 0 | Not documented | 90 |
| L1PA4_dup7277 | Uniquely | No | — | — | LINE | L1PA\|B\|x | chrX: 74533357-74539492 | − | 27 | 6136 | UPRT | Distal | 8923 | EVE annotated | 91 |
| HERVK9-int_dup389 | Uniquely | No | — | — | LTR | ERVK | chrX: 74547838-74549194 | + | 28 | 1357 | UPRT | Distal | 23404 | Not documented | 92 |
| L1P4a_dup349 | Uniquely | No | — | — | LINE | L1PA\|B\|x | chrX: 74892845-74894486 | + | 110 | 1642 | MAGEE2 | Distal | 108338 | Not documented | 93 |
| L1PA7_dup8083 | Uniquely | No | — | — | LINE | L1PA\|B\|x | chrX: 74939868-74944836 | − | 55 | 4969 | MAGEE2 | Distal | 57988 | Not documented | 94 |
| AluSp_dup25733 | Uniquely | No | — | — | SINE | Alu | chrX: 74960039-74960331 | − | 34 | 293 | MAGEE2 | Distal | 42493 | Not documented | 95 |
| MIRc_dup59239 | Multi | No | — | — | SINE | MIR | chrX: 77385280-77385483 | − | 100 | 204 | TAF9B | Proximal | 0 | Not documented | 96 |
| Plat_L3_dup2179 | Multi | No | — | — | LINE | CR1 | chrX: 77386008-77386068 | + | 100 | 61 | TAF9B | Proximal | 0 | Not documented | 97 |
| L1PA10_dup4158 | Uniquely | No | — | — | LINE | L1PA\|B\|x | chrX: 82690745-82694929 | − | 54 | 4185 | POU3F4 | Distal | 68341 | Not documented | 98 |
| L1M1_dup5628 | Uniquely | No | — | — | LINE | Other L1 | chrX: 86816114-86819435 | + | 90 | 3322 | KLHL4 | Proximal | 0 | Not documented | 99 |
| L1PB1_dup8302 | Uniquely | No | — | — | LINE | L1PA\|B\|x | chrX: 86892966-86896024 | + | 50 | 3059 | KLHL4 | Proximal | 0 | Not documented | 5000 |
| L1PB1_dup8303 | Uniquely | No | — | — | LINE | L1PA\|B\|x | chrX: 86896035-86898076 | + | 53 | 2042 | KLHL4 | Proximal | 0 | Not documented | 1 |
| LTR6A_dup115 | Multi | No | — | — | LTR | ERV1 | chrX: 86959195-86959224 | + | 15 | 30 | KLHL4 | Distal | 34146 | Not documented | 2 |
| LTR4_dup36 | Multi | No | — | — | LTR | ERV1 | chrX: 89713046-89713602 | − | 74 | 557 | TGIF2LX | Distal | 535165 | Not documented | 3 |
| ALR/Alpha_dup679 | Multi | No | — | — | Other | Other | chrY: 10093391-10104539 | − | 75 | 11149 | FAM197Y1 | Distal | 708699 | Not documented | 4 |
| | | | | | | Repeats | | | | | | | | | |
| CER_dup28 | Multi | No | — | — | Other | Other | chrY: 13337493-13341870 | + | 47 | 4378 | SLC9B1P1 | Distal | 154372 | Not documented | 5 |
| | | | | | | Repeats | | | | | | | | | |
| AluSx1_dup59209 | Multi/ | No | — | — | SINE | Alu | chrY: 21153222-21153521 | + | 47 | 300 | HSFY2 | Distal | 162675 | Not documented | 6 |
| | Uniquely | | | | | | | | | | | | | | |
| AluSx_dup75761 | Multi | No | — | — | SINE | Alu | chrY: 2355410-2355670 | − | 49 | 261 | SRY | Distal | 299227 | Not documented | 7 |
| AluSq2_dup30175 | Multi | No | — | — | SINE | Alu | chrY: 2356227-2356515 | − | 45 | 289 | SRY | Distal | 298382 | Not documented | 8 |
| MER4B_dup1052 | Multi | No | — | — | LTR | ERV1 | chrY: 23784589-23785241 | − | 77 | 653 | RBMY1A1 | Distal | 73378 | Not documented | 9 |
| LTR5_Hs_dup369 | Multi | No | — | — | LTR | ERVK | chrY: 26672935-26673902 | − | 3.6 | 968 | BPY2B | Distal | 79806 | Not documented | 5010 |
| LTR5_Hs_dup370 | Multi | No | — | — | LTR | ERVK | chrY: 27288495-27289462 | + | 4.1 | 968 | BPY2C | Distal | 79801 | Not documented | 1 |
| LTR4_dup47 | Multi | No | — | — | LTR | ERV1 | chrY: 3903820-3904377 | − | 76 | 558 | TGIF2LY | Distal | 455739 | Not documented | 2 |
| L3_dup27994 | Multi | No | — | — | LINE | CR1 | chrY: 5075960-5076044 | − | 130 | 85 | PCDH11Y | Proximal | 0 | Not documented | 3 |
| LTR5_Hs_dup358 | Multi | No | — | — | LTR | ERVK | chrY: 6616930-6617896 | + | 13 | 967 | AMELY | Distal | 116064 | Not documented | 4 |
| HUERS-P3-int_{—} | Multi | No | — | — | LTR | ERV1 | chrY: 8979290-8979514 | − | 120 | 225 | TSPY4 | Distal | 195560 | Not documented | 5 |
| dup366 | | | | | | | | | | | | | | | |
| MER4B_dup1013 | Multi | No | — | — | LTR | ERV1 | chrY: 9083418-9084070 | + | 77 | 653 | TSPY4 | Distal | 91004 | Not documented | 6 |
| L1HS_dup1060 | Multi | No | — | — | LINE | L1PA\|B\|x | chrY: 9428650-9429493 | + | 4.1 | 844 | FAM197Y1 | Distal | 43958 | Not documented | 7 |
| MER31-int_dup1419 | Multi | No | — | — | LTR | ERV1 | chrY: 9806195-9806504 | − | 150 | 310 | FAM197Y1 | Distal | 421503 | Not documented | 8 |
| HERVK22-int_{—} | Multi | No | — | — | LTR | ERVK | chrY: 9811447-9818183 | + | 71 | 6737 | FAM197Y1 | Distal | 426755 | EVE annotated | 9 |
| dup234 | | | | | | | | | | | | | | | |
| HERVH-int_dup3973 | Multi | No | — | — | LTR | ERV1 | chrY: 9885695-9887758 | − | 75 | 2064 | FAM197Y1 | Distal | 501003 | Not documented | 5020 |

[0431] Table 3 refers to the detailed identification of the peptides derived from neoplastic-TE signature by immunopeptidomics, corresponding to the neoantigenic peptides of SEQ ID NO: 1 to 370. The peptides are identified by their SEQ ID NO:; for example PEP:0001 corresponds to the peptide of SEQ ID NO: 1 in the attached sequence listing.

[0432] The column numbers refer to the following:
[0433] Column n° 1: Peptide_ID
[0434] Column n° 2: Analysis
[0435] Column n° 3: TE_Class
[0436] Column n° 4: TE_Category
[0437] Column n° 5: Median age_million
[0438] Column n° 6: Specificity
[0439] Column n° 7: n_Genomic_TEs_coding_peptides
[0440] Column n° 8: Peptide_sequence
[0441] Column n° 9: Group
[0442] Column n° 10: Immunogenicity_TD

TABLE 3

| 1 | 2 | 3 | 4 | 5 | 6 | 7 | 8 | 9 | 10 |
|---|---|---|---|---|---|---|---|---|---|
| PEP: 0001 | Multi | LINE | Other L1 | 124 | Non redundant | 1 | ADILTLRL | Group2 | — |
| PEP: 0002 | Uniquely | LINE | L1PA\|B\|x | 42.3 | Non redundant | 1 | AEAVPTSPPF | Group2 | — |
| PEP: 0003 | Multi/Uniquely | LINE | L1PA\|B\|x | 34.1 | Redundant | 11 | AGHAGLLR | Group1 | — |
| PEP: 0004 | Multi | Other | SVA | 19.5 | Redundant | 217 | AHYNLHLPA | Group1 | — |
| PEP: 0005 | Multi | Other | SVA | 19.5 | Redundant | 189 | AHYNLHLPAA | Group1 | — |
| PEP: 0006 | Uniquely | SINE | Alu | 47.3 | Redundant | 367 | AILLHQPPK | Group1 | — |
| PEP: 0007 | Multi/Uniquely | LINE | L1PA\|B\|x | 34.1 | Redundant | 40 | AILPKVINR | Group1 | — |
| PEP: 0008 | Multi/Uniquely | SINE | Alu | 57.3 | Redundant | 2830 | AILVPQPPK | Group2 | — |
| PEP: 0009 | Multi/Uniquely | LINE | L2 | 154 | Non redundant | 1 | ALPVYLLSK | Group2 | — |
| PEP: 0010 | Multi | LTR | ERV1 | 32.3 | Redundant | 101 | ALRAVTLTVK | Group1 | — |
| PEP: 0011 | Multi | DNA | DNA | 145 | Non redundant | 1 | ALSPTGNAK | Group2 | — |
| PEP: 0012 | Uniquely | Other | SVA | 20.9 | Redundant | 282 | ALWNRKAGKVGK | Group1 | — |
| PEP: 0013 | Uniquely | LINE | L1PA\|B\|x | 76.4 | Non redundant | 1 | ANLILSSY | Group1 | — |
| PEP: 0014 | Multi | Other | SVA | 11.4 | Redundant | 68 | APLLGRNPV | Group1 | — |
| PEP: 0015 | Multi/Uniquely | LINE | L1PA\|B\|x | 40.9 | Redundant | 54 | AQFELPGSF | Group1 | — |
| PEP: 0016 | Uniquely | Other | SVA | 20.7 | Redundant | 1060 | ARYNLHLPA | Group1 | — |
| PEP: 0017 | Uniquely | Other | SVA | 20.7 | Redundant | 984 | ARYNLHLPAA | Group1 | — |
| PEP: 0018 | Multi | LTR | ERVL-MaLR | 80 | Non redundant | 1 | ASASGDNLKK | Group2 | — |
| PEP: 0019 | Multi | LINE | L1PA\|B\|x | 38.6 | Redundant | 103 | ASEITSHIY | Group1 | — |
| PEP: 0020 | Multi | Other | Other Repeats | 58.6 | Redundant | 2 | ASITNKSLR | Group1 | — |
| PEP: 0021 | Uniquely | LTR | ERV1 | 46.4 | Redundant | 185 | ATAHSLGPR | Group1 | — |
| PEP: 0022 | Uniquely | LINE | L1PA\|B\|x | 42.7 | Non redundant | 1 | ATAIGQEKK | Group2 | — |
| PEP: 0023 | Multi | LTR | ERV1 | 66.8 | Non redundant | 1 | ATLQATTVYKK | Group2 | — |
| PEP: 0024 | Multi | LINE | L1PA\|B\|x | 2.27 | Redundant | 5462 | ATPRHIIVRF | Group1 | — |
| PEP: 0025 | Uniquely | LINE | L1PA\|B\|x | 37.3 | Redundant | 41 | ATPRHLIVRF | Group1 | — |
| PEP: 0026 | Multi | Other | SVA | 17.7 | Redundant | 304 | AVLSNRKGGNVGK | Group1 | — |
| PEP: 0027 | Multi | DNA | DNA | 130 | Non redundant | 1 | AYKDKDISFF | Group1 | — |
| PEP: 0028 | Uniquely | LINE | L1PA\|B\|x | 58.6 | Redundant | 10 | DAGLIEQV | Group1 | — |
| PEP: 0029 | Multi/Uniquely | LINE | L1PA\|B\|x | 1.82 | Redundant | 1950 | DQLEERVSA | Group1 | — |
| PEP: 0030 | Uniquely | LINE | L1PA\|B\|x | 79.5 | Non redundant | 1 | DQTVVGVWVY | Group2 | — |
| PEP: 0031 | Multi | Other | Other Repeats | 58.2 | Non redundant | 1 | EEFFKSAVSKQRFN | Group1 | — |
| PEP: 0032 | Uniquely | LINE | L1PA\|B\|x | 28.2 | Non redundant | 1 | EEKKREKNQIDA | Group1 | — |
| PEP: 0033 | Multi | LINE | L1PA\|B\|x | 38.6 | Redundant | 5 | EGAAVGAASTDL | Group1 | — |
| PEP: 0034 | Multi | LINE | L1PA\|B\|x | 29.1 | Redundant | 41 | EHLTHLHLR | Group1 | — |
| PEP: 0035 | Uniquely | LINE | L2 | 126 | Non redundant | 1 | EIIGGQSI | Group2 | — |
| PEP: 0036 | Uniquely | Other | Other Repeats | 142 | Non redundant | 1 | EIRDLQSHI | Group2 | — |
| PEP: 0037 | Uniquely | Other | Other Repeats | 61.8 | Redundant | 6 | EKELSSNR | Group1 | — |
| PEP: 0038 | Uniquely | LTR | ERV1 | 26.8 | Non redundant | 1 | EKKKDIVK | Group1 | — |
| PEP: 0039 | Uniquely | DNA | DNA | 116 | Non redundant | 1 | ELNHLHIFHI | Group1 | — |
| PEP: 0040 | Multi | LINE | Other L1 | 122 | Non redundant | 1 | ELVEQIENI | Group1 | — |
| PEP: 0041 | Multi | Other | Other Repeats | 84.5 | Redundant | 9 | ERMISLPILQ | Group1 | — |
| PEP: 0042 | Multi | DNA | DNA | 120 | Non redundant | 1 | ESFGQYWGVR | Group2 | — |
| PEP: 0043 | Multi | SINE | Alu | 55.5 | Redundant | 433 | ESHSVTQAGVR | Group1 | — |
| PEP: 0044 | Multi | SINE | Alu | 48.2 | Redundant | 45 | ESQHFGSPR | Group2 | — |
| PEP: 0045 | Multi | LTR | ERV1 | 62.7 | Non redundant | 1 | ESRQTGLSR | Group2 | — |
| PEP: 0046 | Multi/Uniquely | LTR | ERV1 | 67.3 | Redundant | 2 | ETLGKTLWR | Group1 | — |
| PEP: 0047 | Multi | SINE | Alu | 62.7 | Redundant | 217 | ETPSLKNK | Group2 | — |
| PEP: 0048 | Multi | LTR | ERV1 | 85.9 | Non redundant | 1 | ETTNPSIKK | Group2 | — |
| PEP: 0049 | Uniquely | SINE | MIR | 108 | Non redundant | 1 | EVASIKSKY | Group1 | — |
| PEP: 0050 | Uniquely | LINE | Other L1 | 104 | Non redundant | 1 | FFFFFWGCV | Group1 | — |
| PEP: 0051 | Multi/Uniquely | LINE | Other L1 | 113 | Redundant | 2 | FFLLPSTIS | Group2 | — |
| PEP: 0052 | Uniquely | LINE | L1PA\|B\|x | 44.5 | Redundant | 224 | FIDSMLFLS | Group1 | pMS16 |
| PEP: 0053 | Multi/Uniquely | LINE | L1PA\|B\|x | 10.9 | Redundant | 5048 | FIIFYCVYL | Group1 | pMS17 |
| PEP: 0054 | Uniquely | LINE | L1PA\|B\|x | 75.5 | Non redundant | 1 | FIIKGYQI | Group1 | — |
| PEP: 0055 | Uniquely | LINE | L1PA\|B\|x | 47.7 | Redundant | 45 | FIYLFKESA | Group1 | — |
| PEP: 0056 | Uniquely | LINE | L1PA\|B\|x | 2.27 | Redundant | 409 | FKYKWTKF | Group1 | — |
| PEP: 0057 | Multi/Uniquely | DNA | DNA | 97.3 | Non redundant | 1 | FLMQYHIFL | Group2 | pMS18 |
| PEP: 0058 | Multi | DNA | DNA | 130 | Non redundant | 1 | FLTEINSTV | Group1 | — |
| PEP: 0059 | Multi | LINE | L1PA\|B\|x | 30.5 | Redundant | 67 | FPAFLMIAI | Group1 | — |
| PEP: 0060 | Uniquely | DNA | DNA | 51.8 | Non redundant | 1 | FPLEKIVPR | Group2 | — |
| PEP: 0061 | Multi | LINE | L1PA\|B\|x | 50.5 | Non redundant | 1 | FPSFLPSPR | Group2 | — |
| PEP: 0062 | Multi/Uniquely | LINE | L1PA\|B\|x | 12.7 | Redundant | 291 | FSISSPAPV | Group1 | — |
| PEP: 0063 | Uniquely | LINE | L2 | 163 | Non redundant | 1 | FSTKIISVL | Group1 | — |
| PEP: 0064 | Uniquely | LINE | Other L1 | 74.5 | Non redundant | 1 | FTDSCKPTKY | Group1 | — |
| PEP: 0065 | Uniquely | LINE | L2 | 122 | Non redundant | 1 | FYDTVKVL | Group2 | — |
| PEP: 0066 | Uniquely | LINE | Other L1 | 71.8 | Non redundant | 1 | FYSDILTIFKL | Group1 | — |
| PEP: 0067 | Multi | LINE | L2 | 128 | Redundant | 2 | GEKWIWETF | Group2 | — |
| PEP: 0068 | Multi/Uniquely | LINE | Other L1 | 121 | Non redundant | 1 | GESQILQTR | Group1 | — |
| PEP: 0069 | Multi | Other | Other Repeats | 64.5 | Redundant | 2 | GFSMFVPHIGF | Group1 | — |
| PEP: 0070 | Uniquely | LINE | L2 | 126 | Non redundant | 1 | GGRHPIIKGL | Group1 | — |
| PEP: 0071 | Multi/Uniquely | LINE | Other L1 | 125 | Non redundant | 1 | GKIILSQEL | Group2 | — |
| PEP: 0072 | Uniquely | SINE | MIR | 117 | Non redundant | 1 | GLIISIFQMRK | Group2 | — |
| PEP: 0073 | Uniquely | LINE | L1PA\|B\|x | 99.1 | Non redundant | 1 | GNASWVDLGKIR | Group2 | — |
| PEP: 0074 | Multi/Uniquely | SINE | Alu | 52.3 | Redundant | 2533 | GQAGLKLLI | Group1 | — |
| PEP: 0075 | Multi/Uniquely | Other | SVA | 19.3 | Redundant | 2797 | GRLCPAAPTGK | Group1 | — |
| PEP: 0076 | Multi | LINE | Other L1 | 103 | Non redundant | 1 | GSIKRQGI | Group1 | — |
| PEP: 0077 | Multi/Uniquely | SINE | Alu | 49.8 | Redundant | 1350 | GSLQPLSPR | Group1 | — |
| PEP: 0078 | Uniquely | LINE | L2 | 151 | Non redundant | 1 | GTHLSPHYI | Group1 | — |
| PEP: 0079 | Multi | DNA | DNA | 54.5 | Non redundant | 1 | GVRELTSILK | Group1 | — |
| PEP: 0080 | Multi/Uniquely | LINE | L1PA\|B\|x | 2.95 | Redundant | 573 | HETISHTW | Group1 | — |
| PEP: 0081 | Uniquely | SINE | MIR | 135 | Redundant | 2 | HHSLSVNR | Group2 | — |
| PEP: 0082 | Multi | LTR | ERV1 | 66.8 | Non redundant | 1 | HILHALLNK | Group2 | — |
| PEP: 0083 | Uniquely | LINE | Other L1 | 74.5 | Non redundant | 1 | HIYEAGLTFK | Group1 | — |
| PEP: 0084 | Multi | LINE | Other L1 | 85.5 | Redundant | 6 | HLAEVVFAR | Group2 | — |
| PEP: 0085 | Multi | LINE | Other L1 | 85.5 | Redundant | 6 | HLAEVVFARF | Group2 | — |
| PEP: 0086 | Multi | LTR | ERV1 | 50.5 | Redundant | 2 | HLQEAYRIY | Group2 | — |
| PEP: 0087 | Multi | Other | Other Repeats | 70.9 | Redundant | 22 | HLTELNRS | Group2 | — |
| PEP: 0088 | Uniquely | LINE | L1PA\|B\|x | 49.1 | Non redundant | 1 | HPTESPKSI | Group2 | — |
| PEP: 0089 | Uniquely | SINE | Alu | 74.5 | Non redundant | 1 | HSLHAVATA | Group2 | — |
| PEP: 0090 | Multi | DNA | DNA | 43.6 | Redundant | 4 | HTVQWWLKK | Group2 | — |
| PEP: 0091 | Multi | LINE | Other L1 | 136 | Non redundant | 1 | HTYGFFTSK | Group1 | — |
| PEP: 0092 | Multi | SINE | Alu | 51.4 | Redundant | 2014 | HTYNPSTLGGR | Group1 | — |
| PEP: 0093 | Multi | Other | Other Repeats | 72.3 | Non redundant | 1 | HVHVHILQKE | Group1 | — |
| PEP: 0094 | Multi | LINE | Other L1 | 85.5 | Non redundant | 1 | HVISRAHTNK | Group2 | — |
| PEP: 0095 | Uniquely | LINE | Other L1 | 133 | Non redundant | 1 | IAAEITFTNS | Group1 | — |
| PEP: 0096 | Uniquely | LINE | Other L1 | 82.7 | Redundant | 2 | IDIDKIIQ | Group2 | — |
| PEP: 0097 | Multi | SINE | Alu | 60.5 | Redundant | 361 | ILAQCNLHL | Group1 | — |
| PEP: 0098 | Uniquely | LINE | Other L1 | 98.2 | Non redundant | 1 | ILDVLTPLSL | Group2 | — |
| PEP: 0099 | Multi/Uniquely | LINE | L1PA\|B\|x | 34.1 | Redundant | 49 | ILPKVINRF | Group1 | — |
| PEP: 0100 | Multi/Uniquely | LINE | L1PA\|B\|x | 2.27 | Redundant | 13172 | ILPKVIYRF | Group1 | — |
| PEP: 0101 | Multi | LINE | L1PA\|B\|x | 42.3 | Redundant | 56 | ILSSNLISL | Group1 | — |
| PEP: 0102 | Uniquely | Other | Other Repeats | 66.8 | Redundant | 4 | ILYEGQTLK | Group1 | — |
| PEP: 0103 | Uniquely | Other | Other Repeats | 160 | Redundant | 3 | INLKKKEL | Group2 | — |
| PEP: 0104 | Multi | Other | Other Repeats | 59.1 | Non redundant | 1 | IQICVLSTHI | Group1 | — |
| PEP: 0105 | Multi | LTR | ERV1 | 62.7 | Non redundant | 1 | IQNEIHAQR | Group2 | — |
| PEP: 0106 | Uniquely | LINE | Other L1 | 73.6 | Non redundant | 1 | IRQKPQLK | Group2 | — |
| PEP: 0107 | Uniquely | LTR | ERVK | 51.4 | Non redundant | 1 | IRQSSLLAK | Group2 | — |
| PEP: 0108 | Uniquely | LINE | Other L1 | 81.4 | Redundant | 72 | ISGLSTLFH | Group1 | — |
| PEP: 0109 | Uniquely | Other | Other Repeats | 49.1 | Redundant | 2 | ISKSTPNIY | Group1 | — |
| PEP: 0110 | Uniquely | LINE | L2 | 130 | Non redundant | 1 | ISLSRYFPISL | Group1 | — |
| PEP: 0111 | Uniquely | LINE | L1PA\|B\|x | 58.2 | Non redundant | 1 | ISPLSFLIIY | Group1 | — |
| PEP: 0112 | Multi/Uniquely | LINE | L1PA\|B\|x | 2.27 | Redundant | 37 | IVSAQNILK | Group1 | — |
| PEP: 0113 | Uniquely | LINE | L1PA\|B\|x | 24.1 | Redundant | 8057 | IVSAQNLLK | Group1 | — |
| PEP: 0114 | Multi/Uniquely | LINE | L2 | 122 | Non redundant | 1 | IYFSHLQYF | Group1 | — |
| PEP: 0115 | Multi | LINE | RTE | 168 | Non redundant | 1 | IYYPFINTK | Group2 | — |
| PEP: 0116 | Uniquely | LINE | L1PA\|B\|x | 30.5 | Redundant | 18 | KDLELEIR | Group1 | — |
| PEP: 0117 | Uniquely | LINE | L1PA\|B\|x | 42.3 | Non redundant | 1 | KDNDLHSIH | Group1 | — |
| PEP: 0118 | Uniquely | LINE | Other L1 | 86.8 | Non redundant | 1 | KDSFLYFLL | Group1 | — |
| PEP: 0119 | Uniquely | LINE | Other L1 | 61.4 | Non redundant | 1 | KDSIHHKL | Group2 | — |
| PEP: 0120 | Uniquely | LTR | ERVL-MaLR | 71.8 | Non redundant | 1 | KEEVIHALK | Group2 | — |
| PEP: 0121 | Uniquely | LINE | L2 | 130 | Non redundant | 1 | KGCPLKEK | Group1 | — |
| PEP: 0122 | Uniquely | LTR | ERV1 | 36.8 | Non redundant | 1 | KGLGPSPK | Group2 | — |
| PEP: 0123 | Uniquely | LTR | ERVL-MaLR | 111 | Non redundant | 1 | KGQWVTTI | Group1 | — |
| PEP: 0124 | Uniquely | LINE | Other L1 | 64.5 | Non redundant | 1 | KGSVAVNK | Group2 | — |
| PEP: 0125 | Multi | LINE | Other L1 | 141 | Redundant | 4 | KIFHFIQVK | Group2 | — |
| PEP: 0126 | Uniquely | LINE | L2 | 160 | Non redundant | 1 | KIFHNFQLP | Group2 | — |
| PEP: 0127 | Multi | LTR | ERV1 | 17.3 | Non redundant | 1 | KIHLHLAP | Group1 | — |
| PEP: 0128 | Uniquely | LINE | L1PA\|B\|x | 40 | Redundant | 9 | KIIKMAILPK | Group1 | — |
| PEP: 0129 | Multi/Uniquely | LINE | L1PA\|B\|x | 44.1 | Redundant | 96 | KIILNGQK | Group1 | — |
| PEP: 0130 | Uniquely | LINE | Other L1 | 69.1 | Redundant | 13 | KIINKILAK | Group1 | — |
| PEP: 0131 | Multi | LINE | Other L1 | 107 | Non redundant | 1 | KIKSFEKSNSWSWK | Group1 | — |
| PEP: 0132 | Multi | SINE | Alu | 51.8 | Redundant | 2282 | KIQKLARY | Group1 | — |
| PEP: 0133 | Multi/Uniquely | SINE | MIR | 158 | Non redundant | 1 | KITELGRI | Group2 | — |
| PEP: 0134 | Uniquely | LINE | Other L1 | 117 | Redundant | 25 | KLEKQEQIK | Group1 | — |
| PEP: 0135 | Multi/Uniquely | LTR | ERV1 | 42.3 | Redundant | 49 | KLIAGLIFLK | Group1 | — |
| PEP: 0136 | Multi | LINE | L1PA\|B\|x | 12.7 | Redundant | 9 | KLKTLQKI | Group1 | — |
| PEP: 0137 | Multi | Other | Other Repeats | 72.3 | Redundant | 3 | KLLCDDSI | Group1 | — |
| PEP: 0138 | Multi | LINE | Other L1 | 134 | Non redundant | 1 | KLNQKEYLQL | Group2 | — |
| PEP: 0139 | Uniquely | LINE | Other L1 | 79.1 | Non redundant | 1 | KMFLNICLMK | Group1 | — |
| PEP: 0140 | Uniquely | LINE | L1PA\|B\|x | 39.5 | Redundant | 35 | KMPKAVATK | Group2 | — |
| PEP: 0141 | Uniquely | LINE | Other L1 | 101 | Non redundant | 1 | KNKTLPAK | Group1 | — |
| PEP: 0142 | Uniquely | LINE | Other L1 | 109 | Redundant | 2 | KNVISLGK | Group1 | — |
| PEP: 0143 | Uniquely | LTR | ERVL | 76.8 | Non redundant | 1 | KPALLGFMK | Group1 | — |
| PEP: 0144 | Multi | LINE | Other L1 | 135 | Non redundant | 1 | KQFGEDRSLK | Group1 | — |
| PEP: 0145 | Multi/Uniquely | LINE | L1PA\|B\|x | 2.27 | Redundant | 9732 | KQWGKDSLFNK | Group1 | — |
| PEP: 0146 | Multi | LINE | L1PA\|B\|x | 62.3 | Redundant | 15 | KRLQELLIR | Group1 | — |
| PEP: 0147 | Multi | LTR | ERVK | 31.8 | Redundant | 9 | KRQGSLLGK | Group2 | — |
| PEP: 0148 | Multi | Other | Other Repeats | 72.3 | Redundant | 2 | KRVLPTAQSK | Group1 | — |
| PEP: 0149 | Uniquely | LINE | Other L1 | 122 | Redundant | 2 | KSAVISIT | Group2 | — |
| PEP: 0150 | Multi | LINE | Other L1 | 107 | Non redundant | 1 | KSFEKSNSW | Group1 | — |
| PEP: 0151 | Multi | LINE | Other L1 | 107 | Non redundant | 1 | KSFEKSNSWSWK | Group1 | — |
| PEP: 0152 | Uniquely | LINE | L1PA\|B\|x | 75.5 | Non redundant | 1 | KSRILVHPPP | Group1 | — |
| PEP: 0153 | Uniquely | LINE | L1PA\|B\|x | 47.7 | Non redundant | 1 | KSVQGFLK | Group1 | — |
| PEP: 0154 | Multi/Uniquely | DNA | DNA | 68.2 | Redundant | 330 | KSYYLRNTF | Group1 | — |
| PEP: 0155 | Uniquely | LINE | Other L1 | 80.9 | Redundant | 14 | KTAILNSLK | Group1 | — |
| PEP: 0156 | Multi | LINE | L1PA\|B\|x | 43.6 | Redundant | 11 | KTDRLLAKL | Group1 | — |
| PEP: 0157 | Multi/Uniquely | LTR | ERVL-MaLR | 89.1 | Non redundant | 1 | KTQEDGHLQAK | Group2 | — |
| PEP: 0158 | Multi | SINE | Alu | 78.6 | Redundant | 9 | KTSLDSIVK | Group2 | — |
| PEP: 0159 | Uniquely | LINE | L1PA\|B\|x | 88.6 | Non redundant | 1 | KVQLHCMFITALFSK | Group2 | — |
| PEP: 0160 | Multi | LINE | Other L1 | 97.7 | Redundant | 6 | LDSLILSHL | Group1 | — |
| PEP: 0161 | Uniquely | LINE | L2 | 126 | Non redundant | 1 | LEYLGPEL | Group1 | — |
| PEP: 0162 | Multi | LINE | L1PA\|B\|x | 50.5 | Non redundant | 1 | LFKLGGLCI | Group2 | — |
| PEP: 0163 | Multi/Uniquely | LINE | L1PA\|B\|x | 35.5 | Redundant | 107 | LFTLMMVSF | Group1 | — |
| PEP: 0164 | Multi/Uniquely | SINE | Alu | 45.5 | Non redundant | 1 | LGDRKTLISKK | Group2 | — |
| PEP: 0165 | Uniquely | LINE | L2 | 122 | Non redundant | 1 | LGVPCSQPGK | Group2 | — |
| PEP: 0166 | Multi/Uniquely | LINE | L1PA\|B\|x | 6.36 | Redundant | 14 | LHLIRKSI | Group1 | — |
| PEP: 0167 | Multi | DNA | DNA | 75.5 | Non redundant | 1 | LIAPHLQSK | Group2 | — |
| PEP: 0168 | Multi/Uniquely | LINE | L1PA\|B\|x | 36.4 | Redundant | 3884 | LIYTPTNSVK | Group1 | — |
| PEP: 0169 | Multi | LINE | L1PA\|B\|x | 8.18 | Redundant | 12253 | LLDIWVGSK | Group1 | — |
| PEP: 0170 | Uniquely | LINE | L2 | 132 | Redundant | 4 | LLFSFLFLI | Group1 | — |
| PEP: 0171 | Uniquely | LINE | Other L1 | 74.1 | Redundant | 21 | LLLSFNSSL | Group1 | — |
| PEP: 0172 | Uniquely | LINE | Other L1 | 104 | Non redundant | 1 | LLLVPICCWALS | Group1 | — |
| PEP: 0173 | Uniquely | LINE | L2 | 123 | Non redundant | 1 | LLQRTSGK | Group1 | — |
| PEP: 0174 | Multi | LINE | Other L1 | 113 | Redundant | 2 | LLSKFHLI | Group1 | — |
| PEP: 0175 | Multi | LTR | ERVK | 2.27 | Redundant | 7 | LMIGKRIL | Group1 | — |
| PEP: 0176 | Uniquely | LINE | Other L1 | 51.4 | Redundant | 99 | LMISDVEHLFM | Group1 | — |
| PEP: 0177 | Multi | LINE | Other L1 | 122 | Non redundant | 1 | LNKLKIHTF | Group1 | — |
| PEP: 0178 | Multi | LINE | L1PA\|B\|x | 26.4 | Redundant | 116 | LPDPLHFL | Group1 | — |
| PEP: 0179 | Uniquely | DNA | DNA | 48.2 | Non redundant | 1 | LPENLLQLL | Group1 | — |
| PEP: 0180 | Uniquely | LTR | ERV1 | 91.8 | Non redundant | 1 | LPHPIIEV | Group1 | — |
| PEP: 0181 | Uniquely | LTR | ERVL | 159 | Non redundant | 1 | LQNIMLIQY | Group2 | — |
| PEP: 0182 | Uniquely | DNA | DNA | 55.5 | Non redundant | 1 | LSDIMLLQ | Group2 | — |
| PEP: 0183 | Uniquely | LINE | L1PA\|B\|x | 43.2 | Redundant | 2 | LSEKELISL | Group1 | — |
| PEP: 0184 | Multi | LINE | L1PA\|B\|x | 50.5 | Redundant | 11 | LSFQSRCLL | Group1 | — |
| PEP: 0185 | Uniquely | LINE | L1PA\|B\|x | 40.9 | Redundant | 11 | LSLMDIGLVP | Group1 | — |
| PEP: 0186 | Uniquely | LINE | L1PA\|B\|x | 42.7 | Redundant | 50 | LSLPGYEIL | Group1 | — |
| PEP: 0187 | Uniquely | LINE | L1PA\|B\|x | 65 | Non redundant | 1 | LSSSPQCLLS | Group1 | — |
| PEP: 0188 | Multi/Uniquely | SINE | Alu | 78.2 | Non redundant | 1 | LSYFFLPK | Group2 | — |
| PEP: 0189 | Uniquely | LTR | ERV1 | 75 | Redundant | 8 | LTVSVQGIFK | Group1 | — |
| PEP: 0190 | Multi | LINE | Other L1 | 135 | Non redundant | 1 | LVYSKTVLK | Group2 | — |
| PEP: 0191 | Multi | Other | SVA | 15.5 | Redundant | 691 | LWNRKGGKVGK | Group1 | — |
| PEP: 0192 | Uniquely | LINE | Other L1 | 72.7 | Redundant | 3 | LYFPIYWHL | Group2 | — |
| PEP: 0193 | Multi | LTR | ERVL | 92.7 | Non redundant | 1 | MAYHGISQSPK | Group2 | — |
| PEP: 0194 | Multi | Other | SVA | 11.4 | Redundant | 76 | MESRSLSAQW | Group1 | — |
| PEP: 0195 | Uniquely | LTR | ERVK | 27.3 | Redundant | 4 | MIWLIVGAK | Group1 | — |
| PEP: 0196 | Multi | SINE | Alu | 32.3 | Redundant | 3 | MQFSCLSLPK | Group1 | — |
| PEP: 0197 | Multi | SINE | Alu | 40 | Redundant | 134 | MRFHHLGQA | Group1 | — |
| PEP: 0198 | Uniquely | LINE | Other L1 | 109 | Non redundant | 1 | MSQKGKLRI | Group1 | — |
| PEP: 0199 | Multi | LINE | L2 | 141 | Non redundant | 1 | MTFEPSFRR | Group2 | — |
| PEP: 0200 | Multi/Uniquely | Other | SVA | 30 | Redundant | 127 | MTMAVLSKR | Group1 | — |
| PEP: 0201 | Multi/Uniquely | SINE | Alu | 42.5 | Redundant | 2578 | MVKPPSLLK | Group1 | — |
| PEP: 0202 | Multi/Uniquely | LINE | L1PA\|B\|x | 28.4 | Redundant | 536 | NEIKEDTKKW | Group1 | — |
| PEP: 0203 | Multi/Uniquely | LINE | L1PA\|B\|x | 25.9 | Redundant | 5018 | NEIKEDTNKW | Group1 | — |
| PEP: 0204 | Uniquely | LINE | L1PA\|B\|x | 56.8 | Redundant | 75 | NLHSHQQRI | Group1 | — |
| PEP: 0205 | Uniquely | LINE | Other L1 | 69.1 | Redundant | 45 | NLISRVTTL | Group1 | — |
| PEP: 0206 | Uniquely | LINE | Other L1 | 104 | Non redundant | 1 | NQKIREIK | Group1 | — |
| PEP: 0207 | Multi | LINE | L1PA\|B\|x | 12.7 | Redundant | 261 | NQLEERVSA | Group1 | — |
| PEP: 0208 | Uniquely | LINE | L2 | 163 | Non redundant | 1 | NTVLNRLTF | Group1 | — |
| PEP: 0209 | Uniquely | LINE | L1PA\|B\|x | 44.1 | Redundant | 4 | PCIGLEHVSL | Group1 | — |
| PEP: 0210 | Multi/Uniquely | LINE | L1PA\|B\|x | 1.82 | Redundant | 2423 | PITGSEIVAI | Group1 | — |
| PEP: 0211 | Uniquely | LINE | Other L1 | 65.7 | Redundant | 108 | PLFPPLSK | Group1 | — |
| PEP: 0212 | Uniquely | LTR | ERV1 | 28.6 | Non redundant | 1 | PLRGVLQLLRQCVWS | Group1 | — |
| PEP: 0213 | Uniquely | Other | Other Repeats | 61.8 | Redundant | 4 | PMVEKEVSL | Group1 | — |
| PEP: 0214 | Multi | LINE | Other L1 | 133 | Non redundant | 1 | PNSTIILPI | Group2 | — |
| PEP: 0215 | Multi | LINE | L1PA\|B\|x | 21.8 | Non redundant | 1 | QDIISLTQL | Group1 | — |
| PEP: 0216 | Multi | Other | Other Repeats | 66.8 | Redundant | 2 | QIFSERFSL | Group1 | — |
| PEP: 0217 | Uniquely | LINE | Other L1 | 98.2 | Non redundant | 1 | QILSGISSY | Group1 | — |
| PEP: 0218 | Uniquely | LINE | L1PA\|B\|x | 50 | Non redundant | 1 | QIYRSMEQI | Group2 | — |
| PEP: 0219 | Multi/Uniquely | LINE | L1PA\|B\|x | 28.2 | Redundant | 2696 | QPLQKHAKL | Group1 | — |
| PEP: 0220 | Multi | LINE | L2 | 114 | Redundant | 3 | QPTFTEHLL | Group2 | — |
| PEP: 0221 | Uniquely | LTR | ERV1 | 23.2 | Redundant | 96 | QQIIVQTY | Group1 | — |
| PEP: 0222 | Multi | SINE | MIR | 167 | Non redundant | 1 | QRWELGLPHCTVS | Group2 | — |
| PEP: 0223 | Multi/Uniquely | LINE | L2 | 144 | Non redundant | 1 | QTATEPLVY | Group2 | — |
| PEP: 0224 | Multi | SINE | Alu | 78.6 | Redundant | 230 | QVIPLPWPPK | Group1 | — |
| PEP: 0225 | Multi/Uniquely | LTR | ERV1 | 127 | Redundant | 59 | QVLSPTSLK | Group1 | — |
| PEP: 0226 | Uniquely | Other | SVA | 28.2 | Redundant | 682 | RDQIVTVSV | Group1 | — |
| PEP: 0227 | Multi/Uniquely | Other | Other Repeats | 59.1 | Redundant | 3 | RFYNKSFSK | Group1 | — |
| PEP: 0228 | Uniquely | LINE | L1PA\|B\|x | 41.8 | Non redundant | 1 | RGRGTPPPPQP | Group2 | — |
| PEP: 0229 | Multi/Uniquely | LINE | L1PA\|B\|x | 1.82 | Redundant | 3903 | RIAKSILSQK | Group1 | — |
| PEP: 0230 | Multi/Uniquely | LINE | L1PA\|B\|x | 35 | Redundant | 231 | RIYNELKQISK | Group1 | — |
| PEP: 0231 | Multi/Uniquely | LINE | L1PA\|B\|x | 1.82 | Redundant | 8470 | RIYNELKQIYK | Group1 | — |
| PEP: 0232 | Multi | Other | SVA | 17.7 | Redundant | 39 | RLAAAPSGK | Group1 | — |
| PEP: 0233 | Multi/Uniquely | Other | SVA | 15.7 | Redundant | 1007 | RLCPAAPSEK | Group1 | — |
| PEP: 0234 | Multi/Uniquely | Other | SVA | 19.3 | Redundant | 2833 | RLCPAAPTGK | Group1 | — |
| PEP: 0235 | Multi | Other | SVA | 13.6 | Redundant | 84 | RLCPATPSEK | Group1 | — |
| PEP: 0236 | Multi/Uniquely | Other | SVA | 16.6 | Redundant | 506 | RLFPAAIPSRK | Group1 | — |
| PEP: 0237 | Multi | Other | SVA | 11.4 | Redundant | 287 | RLFPAAITSRK | Group1 | — |
| PEP: 0238 | Multi | DNA | DNA | 95 | Non redundant | 1 | RLIDMLTTK | Group2 | — |
| PEP: 0239 | Multi | LTR | ERV1 | 113 | Non redundant | 1 | RLPHYLLQK | Group2 | — |
| PEP: 0240 | Multi | LINE | L1PA\|B\|x | 5.45 | Redundant | 38 | RLSPLSLTQK | Group1 | — |
| PEP: 0241 | Multi/Uniquely | SINE | Alu | 50 | Redundant | 252 | RLTATSASGFK | Group1 | — |
| PEP: 0242 | Multi | LINE | L1PA\|B\|x | 21.8 | Redundant | 52 | RLWYQDDAGLTK | Group1 | — |
| PEP: 0243 | Multi | DNA | DNA | 130 | Non redundant | 1 | RMFDEQYSK | Group1 | — |
| PEP: 0244 | Uniquely | LINE | L1PA\|B\|x | 35.9 | Non redundant | 1 | RNTHAMVF | Group1 | — |
| PEP: 0245 | Multi | LTR | ERVL | 124 | Non redundant | 1 | RPGTTVGLRP | Group1 | — |
| PEP: 0246 | Uniquely | LINE | L2 | 140 | Non redundant | 1 | RQESRAGLRI | Group2 | — |
| PEP: 0247 | Multi/Uniquely | LINE | L1PA\|B\|x | 12.3 | Redundant | 5673 | RQPTKWEKI | Group1 | — |
| PEP: 0248 | Uniquely | LINE | L2 | 128 | Non redundant | 1 | RQQSVQWMW | Group2 | — |
| PEP: 0249 | Uniquely | LTR | ERVL | 49.1 | Redundant | 13 | RSIYLLHR | Group1 | — |
| PEP: 0250 | Multi/Uniquely | LTR | ERV1 | 28.6 | Redundant | 307 | RTLAVSVTALK | Group1 | — |
| PEP: 0251 | Multi | LTR | ERVL-MaLR | 50.9 | Non redundant | 1 | RTVSPINLFCK | Group1 | — |
| PEP: 0252 | Uniquely | LINE | L1PA\|B\|x | 31.8 | Redundant | 34 | RVFSNLVPFSR | Group1 | — |
| PEP: 0253 | Uniquely | LINE | L1PA\|B\|x | 45 | Non redundant | 1 | RWQGSHSVR | Group1 | — |
| PEP: 0254 | Uniquely | LINE | L2 | 138 | Redundant | 2 | SALLHHSL | Group2 | — |
| PEP: 0255 | Multi | Other | SVA | 14.1 | Redundant | 3 | SASARPRPSL | Group1 | — |
| PEP: 0256 | Multi/Uniquely | DNA | DNA | 130 | Non redundant | 1 | SASLHLLHK | Group1 | — |
| PEP: 0257 | Uniquely | LINE | L1PA\|B\|x | 88.2 | Non redundant | 1 | SFLSKAEMI | Group2 | — |
| PEP: 0258 | Uniquely | LINE | Other L1 | 114 | Redundant | 3 | SFVYLLEIF | Group2 | — |
| PEP: 0259 | Multi | DNA | DNA | 126 | Non redundant | 1 | SGAAVELVKE | Group2 | — |
| PEP: 0260 | Uniquely | LTR | ERVL | 111 | Non redundant | 1 | SGASTPMKL | Group2 | — |
| PEP: 0261 | Multi | LTR | ERVK | 4.55 | Redundant | 263 | SGFIPRHSI | Group1 | — |
| PEP: 0262 | Uniquely | LINE | L2 | 160 | Non redundant | 1 | SHQHLLIAR | Group2 | — |
| PEP: 0263 | Multi/Uniquely | Other | Other Repeats | 66.8 | Redundant | 2 | SHRIPEHSVW | Group1 | — |
| PEP: 0264 | Uniquely | LINE | L1PA\|B\|x | 43.2 | Redundant | 2 | SINITKMAI | Group2 | — |
| PEP: 0265 | Multi | DNA | DNA | 80 | Non redundant | 1 | SIYALLHQI | Group2 | — |
| PEP: 0266 | Multi | Other | Other Repeats | 66.8 | Redundant | 2 | SKSLSITK | Group1 | — |
| PEP: 0267 | Multi | LINE | L2 | 165 | Non redundant | 1 | SLDLEKQMSL | Group2 | — |
| PEP: 0268 | Multi | LTR | ERV1 | 22.3 | Redundant | 10 | SLFGGFFTR | Group1 | — |
| PEP: 0269 | Multi | Other | Other Repeats | 76.8 | Redundant | 9 | SLFHTEPF | Group2 | — |
| PEP: 0270 | Multi/Uniquely | SINE | Alu | 77.3 | Redundant | 67 | SLGNIERPY | Group2 | — |
| PEP: 0271 | Uniquely | LINE | L1PA\|B\|x | 35.5 | Redundant | 2 | SLHFIIYLV | Group1 | PMS22 |
| PEP: 0272 | Multi | SINE | Alu | 77.7 | Redundant | 8 | SLLQPETPGLK | Group2 | — |
| PEP: 0273 | Multi | SINE | Alu | 40.5 | Redundant | 368 | SLQPLPPMFK | Group1 | — |
| PEP: 0274 | Multi/Uniquely | Other | SVA | 13.2 | Redundant | 74 | SLSAWLPSLESEER | Group1 | — |
| PEP: 0275 | Uniquely | LINE | L1PA\|B\|x | 53.2 | Non redundant | 1 | SLSFFHWMSRS | Group2 | — |
| PEP: 0276 | Uniquely | LINE | L1PA\|B\|x | 41.4 | Redundant | 7 | SLSSKAPSAD | Group1 | — |
| PEP: 0277 | Multi | LTR | ERV1 | 120 | Non redundant | 1 | SLSSLWPVK | Group2 | — |
| PEP: 0278 | Uniquely | LINE | L1PA\|B\|x | 40 | Redundant | 2 | SLVNLNSK | Group1 | — |
| PEP: 0279 | Uniquely | LINE | L1PA\|B\|x | 79.5 | Non redundant | 1 | SLVQAWEL | Group1 | — |
| PEP: 0280 | Multi | Other | SVA | 16.4 | Redundant | 5 | SLYPAATPSGK | Group1 | — |
| PEP: 0281 | Multi | LTR | ERVL-MaLR | 80 | Non redundant | 1 | SMMPASASGDNLK | Group2 | — |
| PEP: 0282 | Multi | LTR | ERVL-MaLR | 80 | Non redundant | 1 | SMMPASASGDNLKK | Group2 | — |
| PEP: 0283 | Uniquely | LINE | Other L1 | 121 | Non redundant | 1 | SPLQKVNV | Group1 | — |
| PEP: 0284 | Multi | Other | SVA | 16.1 | Redundant | 456 | SPRSPSPSL | Group1 | — |
| PEP: 0285 | Multi | LINE | L2 | 167 | Non redundant | 1 | SQSLSLYLY | Group2 | — |
| PEP: 0286 | Multi | LINE | Other L1 | 153 | Non redundant | 1 | SRHIYVLIY | Group2 | — |
| PEP: 0287 | Uniquely | LTR | ERV1 | 46.4 | Non redundant | 1 | SSERAAHIK | Group2 | — |
| PEP: 0288 | Multi/Uniquely | Other | Other Repeats | 66.8 | Non redundant | 1 | SSFLESHVR | Group1 | — |
| PEP: 0289 | Multi | LINE | L2 | 140 | Redundant | 2 | SSLLSTQR | Group2 | — |
| PEP: 0290 | Uniquely | LINE | L1PA\|B\|x | 39.1 | Non redundant | 1 | SSLSSATLK | Group1 | — |
| PEP: 0291 | Multi | LTR | ERV1 | 120 | Non redundant | 1 | SSLSSLWPVK | Group2 | — |
| PEP: 0292 | Uniquely | SINE | Alu | 71.8 | Non redundant | 1 | STLGGKGART | Group1 | — |
| PEP: 0293 | Uniquely | DNA | DNA | 50 | Redundant | 266 | STLTGVWKK | Group1 | — |
| PEP: 0294 | Uniquely | DNA | DNA | 48.2 | Non redundant | 1 | SVKSTVITK | Group1 | — |
| PEP: 0295 | Uniquely | DNA | DNA | 48.2 | Non redundant | 1 | SVKSTVITKK | Group1 | — |
| PEP: 0296 | Uniquely | LINE | Other L1 | 80.5 | Non redundant | 1 | SVNIQWNI | Group2 | — |
| PEP: 0297 | Multi | LTR | ERVL | 102 | Non redundant | 1 | SVQDLLLGH | Group2 | — |
| PEP: 0298 | Uniquely | DNA | DNA | 48.2 | Non redundant | 1 | SVSPVSGEMKK | Group1 | — |
| PEP: 0299 | Uniquely | LINE | L1PA\|B\|x | 70 | Non redundant | 1 | SVWFFHISISL | Group2 | — |
| PEP: 0300 | Uniquely | Other | Other Repeats | 98.6 | Non redundant | 1 | SYLLKCFRI | Group2 | — |
| PEP: 0301 | Multi | SINE | MIR | 115 | Non redundant | 1 | SYLPSWTKL | Group2 | — |
| PEP: 0302 | Multi | SINE | MIR | 116 | Non redundant | 1 | SYLSGSQLSHL | Group1 | — |
| PEP: 0303 | Uniquely | LINE | L1PA\|B\|x | 31.8 | Redundant | 7319 | SYPAKLSFI | Group1 | — |
| PEP: 0304 | Uniquely | LINE | L1PA\|B\|x | 42.3 | Non redundant | 1 | TAKETIELTGN | Group1 | — |
| PEP: 0305 | Multi | LTR | ERV1 | 127 | Non redundant | 1 | TAKPPDLSR | Group1 | — |
| PEP: 0306 | Uniquely | LTR | ERV1 | 67.3 | Redundant | 4 | TALLWSLRK | Group1 | — |
| PEP: 0307 | Uniquely | LINE | Other L1 | 71.8 | Non redundant | 1 | TALTTILLSASM | Group1 | — |
| PEP: 0308 | Uniquely | LINE | L1PA\|B\|x | 30 | Redundant | 5 | TCKIVKTID | Group1 | — |
| PEP: 0309 | Uniquely | LINE | Other L1 | 101 | Redundant | 2 | TDLLLSLE | Group1 | — |
| PEP: 0310 | Uniquely | LTR | ERVL | 30.5 | Redundant | 169 | TEEEKTRAW | Group1 | — |
| PEP: 0311 | Multi | LTR | ERVK | 83.2 | Non redundant | 1 | TEQGPTGVTM | Group2 | — |
| PEP: 0312 | Multi | LINE | L2 | 173 | Non redundant | 1 | TFGNTELKI | Group2 | — |
| PEP: 0313 | Multi | LINE | L1PA\|B\|x | 107 | Non redundant | 1 | TGIPDREEEKI | Group2 | — |
| PEP: 0314 | Multi | SINE | Alu | 77.7 | Non redundant | 1 | TGPYPVAQAGLK | Group2 | — |
| PEP: 0315 | Multi | DNA | DNA | 88.6 | Non redundant | 1 | TGSEILIKH | Group2 | — |
| PEP: 0316 | Multi | SINE | Alu | 60 | Redundant | 20 | TGTTGARYH | Group1 | — |
| PEP: 0317 | Uniquely | LINE | L1PA\|B\|x | 90.9 | Non redundant | 1 | TIFGPSLAL | Group1 | — |
| PEP: 0318 | Multi | LTR | ERVL-MaLR | 129 | Non redundant | 1 | TILFEVCLA | Group2 | — |
| PEP: 0319 | Multi/Uniquely | SINE | Alu | 56.6 | Redundant | 558 | TLHSSLGNK | Group1 | — |
| PEP: 0320 | Multi | DNA | DNA | 130 | Non redundant | 1 | TLSDELTEI | Group1 | — |
| PEP: 0321 | Uniquely | SINE | Alu | 28.2 | Redundant | 4 | TMLARLAGT | Group2 | — |
| PEP: 0322 | Multi | LINE | Other L1 | 133 | Redundant | 3 | TNVLLVNI | Group2 | — |
| PEP: 0323 | Uniquely | LTR | ERVL | 66.8 | Non redundant | 1 | TPITINECSF | Group2 | — |
| PEP: 0324 | Multi/Uniquely | LINE | L1PA\|B\|x | 2.27 | Redundant | 5850 | TPRHIIVRF | Group1 | pMS5 |
| PEP: 0325 | Multi | LTR | ERVL-MaLR | 99.1 | Non redundant | 1 | TSQVFLSH | Group2 | — |
| PEP: 0326 | Uniquely | LINE | L2 | 123 | Non redundant | 1 | TSYSTQVK | Group1 | — |
| PEP: 0327 | Uniquely | LTR | ERV1 | 67.3 | Redundant | 3 | TTALLWSLRK | Group1 | — |
| PEP: 0328 | Multi | LINE | Other L1 | 133 | Non redundant | 1 | TTFYILLIF | Group1 | — |
| PEP: 0329 | Multi | LTR | ERV1 | 85.9 | Non redundant | 1 | TTNPSIKKR | Group2 | — |
| PEP: 0330 | Multi | LTR | ERVK | 83.2 | Redundant | 2 | TTQEAEKLLER | Group2 | — |
| PEP: 0331 | Multi/Uniquely | LTR | ERV1 | 67.3 | Non redundant | 1 | TTWSGNIMTK | Group1 | — |
| PEP: 0332 | Uniquely | LINE | Other L1 | 53.2 | Redundant | 7 | TVEKTVSSI | Group1 | — |
| PEP: 0333 | Uniquely | Other | Other Repeats | 49.1 | Non redundant | 1 | TVHQLSKY | Group1 | — |
| PEP: 0334 | Uniquely | LINE | Other L1 | 98.6 | Non redundant | 1 | TVLGLNQV | Group2 | — |
| PEP: 0335 | Uniquely | LTR | ERV1 | 36.8 | Non redundant | 1 | TVLKLLGKY | Group2 | — |
| PEP: 0336 | Multi/Uniquely | Other | Other Repeats | 68.9 | Redundant | 17 | TYILIEQF | Group1 | — |
| PEP: 0337 | Uniquely | LINE | L2 | 151 | Non redundant | 1 | VHYLGFHDI | Group1 | — |
| PEP: 0338 | Multi/Uniquely | SINE | Alu | 48.6 | Redundant | 8984 | VICLPWPPK | Group1 | — |
| PEP: 0339 | Multi/Uniquely | SINE | Alu | 49.5 | Redundant | 930 | VICPLRPPK | Group1 | — |
| PEP: 0340 | Multi | SINE | Alu | 53.2 | Redundant | 713 | VICSPRPPK | Group1 | — |
| PEP: 0341 | Multi | SINE | Alu | 55.5 | Redundant | 1418 | VIFLPQPPK | Group1 | — |
| PEP: 0342 | Uniquely | LINE | Other L1 | 51.4 | Redundant | 3 | VILVSYNGFGSI | Group1 | — |
| PEP: 0343 | Multi | SINE | MIR | 138 | Non redundant | 1 | VIRGWDSPI | Group1 | — |
| PEP: 0344 | Uniquely | LINE | L1PA\|B\|x | 18.6 | Non redundant | 1 | VISEGSVLSI | Group1 | — |
| PEP: 0345 | Multi | SINE | Alu | 24.5 | Redundant | 752 | VISPPRPPK | Group1 | — |
| PEP: 0346 | Multi | LINE | Other L1 | 112 | Non redundant | 1 | VLSSQVKII | Group2 | — |
| PEP: 0347 | Multi | Other | Other Repeats | 110 | Redundant | 23 | VLVGVSLPK | Group2 | — |
| PEP: 0348 | Multi | Other | SVA | 11.4 | Redundant | 8 | VLWNRNGGKVGK | Group1 | — |
| PEP: 0349 | Uniquely | LINE | L1PA\|B\|x | 22.3 | Redundant | 30 | VSFPSNSQNP | Group1 | — |
| PEP: 0350 | Multi | LINE | Other L1 | 118 | Non redundant | 1 | VSLSVRTTL | Group2 | — |
| PEP: 0351 | Multi | DNA | DNA | 95 | Redundant | 2 | VSSSLLSTK | Group2 | — |
| PEP: 0352 | Uniquely | LINE | L1PA\|B\|x | 58.6 | Non redundant | 1 | VSTGKLKTR | Group2 | — |
| PEP: 0353 | Multi | LTR | ERVL-MaLR | 103 | Non redundant | 1 | VTADLSSMRDPR | Group2 | — |
| PEP: 0354 | Multi | LINE | L2 | 129 | Non redundant | 1 | VTHRDIYVL | Group1 | — |
| PEP: 0355 | Uniquely | SINE | MIR | 124 | Non redundant | 1 | VTSIHRLYL | Group2 | — |
| PEP: 0356 | Multi | Other | Other Repeats | 58.6 | Non redundant | 1 | VTVVFWNLI | Group1 | — |
| PEP: 0357 | Multi | LINE | L1PA\|B\|x | 2.73 | Redundant | 28 | VVPVVPFH | Group1 | — |
| PEP: 0358 | Uniquely | LINE | L1PA\|B\|x | 49.1 | Redundant | 7 | VYIYIYML | Group1 | — |
| PEP: 0359 | Uniquely | Other | Other Repeats | 49.1 | Non redundant | 1 | VYNMYLVNF | Group1 | — |
| PEP: 0360 | Multi | Other | Other Repeats | 63.2 | Non redundant | 1 | VYSAHRVEPF | Group1 | — |
| PEP: 0361 | Multi | LINE | Other L1 | 99.5 | Non redundant | 1 | WGRVADKRELK | Group2 | — |
| PEP: 0362 | Multi | LINE | Other L1 | 125 | Non redundant | 1 | WKFSRKVT | Group1 | — |
| PEP: 0363 | Multi | LINE | L1PA\|B\|x | 38.6 | Redundant | 3 | WLASFPGIIY | Group1 | — |
| PEP: 0364 | Uniquely | LINE | Other L1 | 82.3 | Redundant | 2 | YIHNTIYI | Group2 | — |
| PEP: 0365 | Multi/Uniquely | LINE | Other L1 | 88.6 | Non redundant | 1 | YISLIKLSF | Group1 | — |
| PEP: 0366 | Uniquely | LINE | L1PA\|B\|x | 43.6 | Redundant | 8 | YLFKEPAFGF | Group2 | — |
| PEP: 0367 | Uniquely | LINE | Other L1 | 53.2 | Non redundant | 1 | YLIELCLQ | Group2 | — |
| PEP: 0368 | Uniquely | LTR | ERVL-MaLR | 117 | Redundant | 2 | YLRSHIMSL | Group1 | — |
| PEP: 0369 | Multi/Uniquely | DNA | DNA | 89.1 | Non redundant | 1 | YLTQYVPNI | Group2 | — |
| PEP: 0370 | Uniquely | LINE | L1PA\|B\|x | 165 | Non redundant | 1 | YPFSTSVLK | Group1 | - |

[0443] Table 4 refers to the detailed identification of the immunogenic peptides derived from neoplastic-TE signature by HLA-I binding predictions, corresponding to the neoantigenic peptides of SEQ ID NO: 371 to 380. The peptides are identified by their SEQ ID NO:; for example PEP:0371 corresponds to the peptide of SEQ ID NO: 371 in the attached sequence listing.

TABLE 4

| | | | | | Peptide_ | Immuno- |
|---|---|---|---|---|---|---|
| Peptide_ID | Analysis | Class | TE_Group | Age_million | sequence | genicity_ID |
| PEP: 0371 | Multi/Uniquely | DNA | DNA | 118.64 | ALSFWATRV | P3 |
| PEP: 0372 | Multi/Uniquely | DNA | DNA | 140.45 | LVIATFIKV | P4 |
| PEP: 0373 | Multi/Uniquely | DNA | DNA | 88.18 | FVVFKAPEV | P6 |
| PEP: 0374 | Multi/Uniquely | SINE | Alu | 55.91 | RLSHCLAWV | P8 |
| PEP: 0375 | Multi/Uniquely | LINE | CR1 | 151.36 | FVMPFCPSL | P11 |
| PEP: 0376 | Uniquely | DNA | DNA | 133.64 | LLLPGTPAV | P12 |
| PEP: 0377 | Multi/Uniquely | LTR | ERV1 | 74.55 | ALDQNSPGV | P14 |
| PEP: 0378 | Multi/Uniquely | LTR | ERV1 | 74.55 | SLMAVSMTI | P15 |
| PEP: 0379 | Multi/Uniquely | LTR | ERV1 | 74.55 | LMAKVSMTI | P16 |
| PEP: 0380 | Multi/Uniquely | LINE | CR1 | 151.36 | FLSIPFFFV | P17 |

[0444] Description of the sequences:

| Corresponding table and origin of the sequences | SEQ ID NOs |
|---|---|
| Table 3: Peptides derived from neoplastic-TE | 1-370 |
| signature by immunopeptidomics | |
| Table 4: Immunogenic peptides derived from | 371-380 |
| neoplastic-TE signature by HLA-I binding | |
| predictions | |
| Table 2: TE transcripts from neoplastic signature | 381-5020 |

1. A method for identifying a tumor cell TE signature comprising the steps of:
i) obtaining the single cell transcriptomic TE pattern of at least one tumor cell and the single cell TE transcriptomic pattern of at least one normal cell, and
ii) performing differential expression analysis of the TE transcriptomic pattern from said at least one tumor cell with respect to said at least one normal cell, and
iii) selecting the TE transcript sequences which are differentially expressed in said at least one tumor cell as compared to said at least one normal cell thereby obtaining a tumor cell TE signature.

2. The method of claim 1, wherein at step i) the single cell transcriptomic TE pattern is obtained by mapping the single-cell transcriptome to individual genomic TE occurrence.

3. A method for identifying TE-derived tumor neoantigenic peptides, the method comprising the steps of:
a) obtaining a tumor cell TE signature according to claim 1, and
b) in silico translating the TE transcript sequences from the tumor cell TE signature obtained at step a) to obtain TE-derived tumor peptides.

4. The method of claim 3 further comprising a step c) of identifying the TE derived peptides that bind at least one MHC molecule;
optionally wherein a library comprising the TE-derived peptide sequences identified at step b) is searched in the MHC ligandome from tumor cells and wherein matched peptides from the said MHC ligandome are selected, thus identifying MHC bound TE-derived peptides;
optionally wherein the TE-derived MHC bound peptides are further filtered against canonical proteins; and/or
optionally wherein the TE-encoded peptides which binds at least one MHC class I or II molecule of a subject with a KD binding affinity of less than 10′5 M are selected.

5. The method of claim 4, further comprising a step d) of selecting non-redundant TE-derived peptides;
optionally wherein this step is achieved by mapping the TE-derived peptides of step c) to the individual TE genomic location and selecting uniquely mapped TE.

6. An isolated tumor neoantigenic peptide sequence having at least 8 amino acids, wherein said neoantigenic peptide comprises a TE encoded sequence and binds at least one MHC class I or II molecule of a subject with a KD binding affinity of less than 10′5 M wherein said neoantigenic peptide further has one or both of the following properties:
the TE expression of said peptide is derepressed in a tumor cell as compared to non-tumor cells;
the peptide is encoded by a TE transcript sequence or a fragment thereof obtained according to claim 1;
and/or
the peptide is encoded by a TE transcript or a fragment thereof of any one of SEQ ID NO:381 to 5020;
optionally wherein the peptide comprises at least 8 amino acids, in particular 8-15, notably 8-12 amino acids and binds at least one MHC class I molecule of a subject or comprises from 13 to 25 amino acids and binds at least one MHC class II of a subject.

7. The neoantigenic peptide according to claim 6, comprising or consisting of any one of SEQ ID NO: 1 to 26 and 28 to 380 or a fragment thereof, optionally wherein the peptide is encoded by a single genomic TE.

8. The method of claim 1 wherein the tumor is glioblastoma tumor.

9. The neoantigenic peptide according to claim 6, wherein the TE is characterized by one or more of the following properties:
the TE is selected from TE over 50.106 years; optionally wherein the TE is selected from the LINE-1, SVA and ERVK TE subfamilies; optionally wherein the TE is selected from L1PA/B/x TEs;
the TE is selected from TEs over 50.106 years;
the TE is selected from TEs bearing an intact or nearly intact ORF;
the TE is selected from intronic or intergenic TEs; and/or
the TE is encoded by chromosome 7.

10. A population of autologous dendritic cells or antigen presenting cells that have been pulsed with one or more of the peptides as defined in claim 6 or transfected with a polynucleotide encoding one or more of the peptides as defined in claim 6.

11. A vaccine or immunogenic composition capable of rising a specific T-cell response comprising:
one or more neoantigenic peptides as defined in claim 6;
one or more polynucleotides encoding a neoantigenic peptide as defined in claim 6, optionally linked to a heterologous regulatory control nucleotide sequence; and/or
a population of antigen presenting cells that have been pulsed with one or more of the peptides of claim 6 or transfected with a polynucleotide encoding one or more of the peptides of claim 6.

12. An antibody, or an antigen-binding fragment thereof, a T cell receptor (TCR), or a chimeric antigen receptor (CAR) that specifically binds a neoantigenic peptide as defined in claim 6, optionally in association with an MHC molecule, with a Kd affinity of about 10′6 M or less;
optionally wherein the antibody is a multispecific antibody that further targets at least an immune cell antigen;
optionally wherein the immune cell is a T cell, a NK cell or a dendritic cell;
optionally wherein the targeted antigen is CD3, CD 16, CD30 or a TCR;
optionally wherein the antibody is a multispecific antibody that further targets at least an immune cell antigen;
and/or
optionally wherein the T cell receptor is made soluble and fused to an antibody fragment directed to a T cell antigen, optionally wherein the targeted antigen is CD3 or CD 16.

13. A polynucleotide encoding the neoantigenic peptide of claim 6, or an antibody, a CAR or a TCR that specifically binds a neoantigenic peptide of claim 6 or a vector comprising the polynucleotide.

14. An immune cell that specifically binds to one or more neoantigenic peptides of claim 6;
optionally wherein the immune cell is an allogenic or autologous cell selected from T cell, NK cell, CD4+/CD8+, TILs/tumor derived CD8 T cells, central memory CD8+ T cells, Treg, MAIT, and Y8 T cell;
and/or
optionally wherein the T cell comprises a T cell receptor that specifically binds one or more neoantigenic peptides of claim 6, or a TCR or a CAR that specifically binds a neoantigenic peptide of claim 6.

15. A method of treating cancer or inhibiting cancer cell proliferation comprising administering to a subject in need thereof, a neoantigenic peptide of claim 6,
a population of dendritic cells that have been pulsed with one or more of the neoantigenic peptides of claim 6 or transfected with a polynucleotide encoding one or more of the peptides as defined in claim 6,
a vaccine or immunogenic composition comprising a neoantigenic peptide of claim 6, a polynucleotide encoding a neoantigenic peptide of claim 6 or a vector comprising said polynucleotide,
an antibody, an antigen-binding fragment thereof, a CAR or a TCR that specifically binds a neoantigenic peptide as defined in claim 6,
or
an immune cell that specifically binds to one or more neoantigenic peptides of claim 6 optionally wherein the cancer is glioblastoma.

16. The neoantigenic peptide of claim 6, wherein the tumor is glioblastoma tumor.

The application's sequence listing, which the Patent Office published only in electronic form, follows.

SEQUENCE LISTING (5024 sequences)

SEQ ID NO: 1 - protein, 8 aa, synthetic construct
  REGION 1..8: note = synthetic peptide
ADILTLRL

SEQ ID NO: 2 - protein, 10 aa, synthetic construct
  REGION 1..10: note = synthetic peptide
AEAVPTSPPF

SEQ ID NO: 3 - protein, 8 aa, synthetic construct
  REGION 1..8: note = synthetic peptide
AGHAGLLR

SEQ ID NO: 4 - protein, 9 aa, synthetic construct
  REGION 1..9: note = synthetic peptide
AHYNLHLPA

SEQ ID NO: 5 - protein, 10 aa, synthetic construct
  REGION 1..10: note = synthetic peptide
AHYNLHLPAA

SEQ ID NO: 6 - protein, 9 aa, synthetic construct
  REGION 1..9: note = synthetic peptide
AILLHQPPK

SEQ ID NO: 7 - protein, 9 aa, synthetic construct
  REGION 1..9: note = synthetic peptide
AILPKVINR

SEQ ID NO: 8 - protein, 9 aa, synthetic construct
  REGION 1..9: note = synthetic peptide
AILVPQPPK

SEQ ID NO: 9 - protein, 9 aa, synthetic construct
  REGION 1..9: note = synthetic peptide
ALPVYLLSK

SEQ ID NO: 10 - protein, 10 aa, synthetic construct
  REGION 1..10: note = synthetic peptide
ALRAVTLTVK

SEQ ID NO: 11 - protein, 9 aa, synthetic construct
  REGION 1..9: note = synthetic peptide
ALSPTGNAK

SEQ ID NO: 12 - protein, 12 aa, synthetic construct
  REGION 1..12: note = synthetic peptide
ALWNRKAGKVGK

SEQ ID NO: 13 - protein, 8 aa, synthetic construct
  REGION 1..8: note = synthetic peptide
ANLILSSY

SEQ ID NO: 14 - protein, 9 aa, synthetic construct
  REGION 1..9: note = synthetic peptide
APLLGRNPV

SEQ ID NO: 15 - protein, 9 aa, synthetic construct
  REGION 1..9: note = synthetic peptide
AQFELPGSF

SEQ ID NO: 16 - protein, 9 aa, synthetic construct
  REGION 1..9: note = synthetic peptide
ARYNLHLPA

SEQ ID NO: 17 - protein, 10 aa, synthetic construct
  REGION 1..10: note = synthetic peptide
ARYNLHLPAA

SEQ ID NO: 18 - protein, 10 aa, synthetic construct
  REGION 1..10: note = synthetic peptide
ASASGDNLKK

SEQ ID NO: 19 - protein, 9 aa, synthetic construct
  REGION 1..9: note = synthetic peptide
ASEITSHIY

SEQ ID NO: 20 - protein, 9 aa, synthetic construct
  REGION 1..9: note = synthetic peptide
ASITNKSLR

SEQ ID NO: 21 - protein, 9 aa, synthetic construct
  REGION 1..9: note = synthetic peptide
ATAHSLGPR

SEQ ID NO: 22 - protein, 9 aa, synthetic construct
  REGION 1..9: note = synthetic peptide
ATAIGQEKK

SEQ ID NO: 23 - protein, 11 aa, synthetic construct
  REGION 1..11: note = synthetic peptide
ATLQATTVYKK

SEQ ID NO: 24 - protein, 10 aa, synthetic construct
  REGION 1..10: note = synthetic peptide
ATPRHIIVRF

SEQ ID NO: 25 - protein, 10 aa, synthetic construct
  REGION 1..10: note = synthetic peptide
ATPRHLIVRF

SEQ ID NO: 26 - protein, 13 aa, synthetic construct
  REGION 1..13: note = synthetic peptide
AVLSNRKGGNVGK

SEQ ID NO: 27 - protein, 10 aa, synthetic construct
  REGION 1..10: note = synthetic peptide
AYKDKDISFF

SEQ ID NO: 28 - protein, 8 aa, synthetic construct
  REGION 1..8: note = synthetic peptide
DAGLIEQV

SEQ ID NO: 29 - protein, 9 aa, synthetic construct
  REGION 1..9: note = synthetic peptide
DQLEERVSA

SEQ ID NO: 30 - protein, 10 aa, synthetic construct
  REGION 1..10: note = synthetic peptide
DQTVVGVWVY

SEQ ID NO: 31 - protein, 14 aa, synthetic construct
  REGION 1..14: note = synthetic peptide
EEFFKSAVSKQRFN

SEQ ID NO: 32 - protein, 12 aa, synthetic construct
  REGION 1..12: note = synthetic peptide
EEKKREKNQIDA

SEQ ID NO: 33 - protein, 12 aa, synthetic construct
  REGION 1..12: note = synthetic peptide
EGAAVGAASTDL

SEQ ID NO: 34 - protein, 9 aa, synthetic construct
  REGION 1..9: note = synthetic peptide
EHLTHLHLR

SEQ ID NO: 35 - protein, 8 aa, synthetic construct
  REGION 1..8: note = synthetic peptide
EIIGGQSI

SEQ ID NO: 36 - protein, 9 aa, synthetic construct
  REGION 1..9: note = synthetic peptide
EIRDLQSHI

SEQ ID NO: 37 - protein, 8 aa, synthetic construct
  REGION 1..8: note = synthetic peptide
EKELSSNR

SEQ ID NO: 38 - protein, 8 aa, synthetic construct
  REGION 1..8: note = synthetic peptide
EKKKDIVK

SEQ ID NO: 39 - protein, 10 aa, synthetic construct
  REGION 1..10: note = synthetic peptide
ELNHLHIFHI

SEQ ID NO: 40 - protein, 9 aa, synthetic construct
  REGION 1..9: note = synthetic peptide
ELVEQIENI

SEQ ID NO: 41 - protein, 10 aa, synthetic construct
  REGION 1..10: note = synthetic peptide
ERMISLPILQ

SEQ ID NO: 42 - protein, 10 aa, synthetic construct
  REGION 1..10: note = synthetic peptide
ESFGQYWGVR

SEQ ID NO: 43 - protein, 11 aa, synthetic construct
  REGION 1..11: note = synthetic peptide
ESHSVTQAGVR

SEQ ID NO: 44 - protein, 9 aa, synthetic construct
  REGION 1..9: note = synthetic peptide
ESQHFGSPR

SEQ ID NO: 45 - protein, 9 aa, synthetic construct
  REGION 1..9: note = synthetic peptide
ESRQTGLSR

SEQ ID NO: 46 - protein, 9 aa, synthetic construct
  REGION 1..9: note = synthetic peptide
ETLGKTLWR

SEQ ID NO: 47 - protein, 8 aa, synthetic construct
  REGION 1..8: note = synthetic peptide
ETPSLKNK

SEQ ID NO: 48 - protein, 9 aa, synthetic construct
  REGION 1..9: note = synthetic peptide
ETTNPSIKK

SEQ ID NO: 49 - protein, 9 aa, synthetic construct
  REGION 1..9: note = synthetic peptide
EVASIKSKY

SEQ ID NO: 50 - protein, 9 aa, synthetic construct
  REGION 1..9: note = synthetic peptide
FFFFFWGCV

SEQ ID NO: 51 - protein, 9 aa, synthetic construct
  REGION 1..9: note = synthetic peptide
FFLLPSTIS

SEQ ID NO: 52 - protein, 9 aa, synthetic construct
  REGION 1..9: note = synthetic peptide
FIDSMLFLS

SEQ ID NO: 53 - protein, 9 aa, synthetic construct
  REGION 1..9: note = synthetic peptide
FIIFYCVYL

SEQ ID NO: 54 - protein, 8 aa, synthetic construct
  REGION 1..8: note = synthetic peptide
FIIKGYQI

SEQ ID NO: 55 - protein, 9 aa, synthetic construct
  REGION 1..9: note = synthetic peptide
FIYLFKESA

SEQ ID NO: 56 - protein, 8 aa, synthetic construct
  REGION 1..8: note = synthetic peptide
FKYKWTKF

SEQ ID NO: 57 - protein, 9 aa, synthetic construct
  REGION 1..9: note = synthetic peptide
FLMQYHIFL

SEQ ID NO: 58 - protein, 9 aa, synthetic construct
  REGION 1..9: note = synthetic peptide
FLTEINSTV

SEQ ID NO: 59 - protein, 9 aa, synthetic construct
  REGION 1..9: note = synthetic peptide
FPAFLMIAI

SEQ ID NO: 60 - protein, 9 aa, synthetic construct
  REGION 1..9: note = synthetic peptide
FPLEKIVPR

SEQ ID NO: 61 - protein, 9 aa, synthetic construct
  REGION 1..9: note = synthetic peptide
FPSFLPSPR

SEQ ID NO: 62 - protein, 9 aa, synthetic construct
  REGION 1..9: note = synthetic peptide
FSISSPAPV

SEQ ID NO: 63 - protein, 9 aa, synthetic construct
  REGION 1..9: note = synthetic peptide
FSTKIISVL

SEQ ID NO: 64 - protein, 10 aa, synthetic construct
  REGION 1..10: note = synthetic peptide
FTDSCKPTKY

SEQ ID NO: 65 - protein, 8 aa, synthetic construct
  REGION 1..8: note = synthetic peptide
FYDTVKVL

SEQ ID NO: 66 - protein, 11 aa, synthetic construct
  REGION 1..11: note = synthetic peptide
FYSDILTIFKL

SEQ ID NO: 67 - protein, 9 aa, synthetic construct
  REGION 1..9: note = synthetic peptide
GEKWIWETF

SEQ ID NO: 68 - protein, 9 aa, synthetic construct
  REGION 1..9: note = synthetic peptide
GESQILQTR

SEQ ID NO: 69 - protein, 11 aa, synthetic construct
  REGION 1..11: note = synthetic peptide
GFSMFVPHIGF

SEQ ID NO: 70 - protein, 10 aa, synthetic construct
  REGION 1..10: note = synthetic peptide
GGRHPIIKGL

SEQ ID NO: 71 - protein, 9 aa, synthetic construct
  REGION 1..9: note = synthetic peptide
GKIILSQEL

SEQ ID NO: 72 - protein, 11 aa, synthetic construct
  REGION 1..11: note = synthetic peptide
GLIISIFQMRK

SEQ ID NO: 73 - protein, 12 aa, synthetic construct
  REGION 1..12: note = synthetic peptide
GNASWVDLGKIR

SEQ ID NO: 74 - protein, 9 aa, synthetic construct
  REGION 1..9: note = synthetic peptide
GQAGLKLLI

SEQ ID NO: 75 - protein, 11 aa, synthetic construct
  REGION 1..11: note = synthetic peptide
GRLCPAAPTGK

SEQ ID NO: 76 - protein, 8 aa, synthetic construct
  REGION 1..8: note = synthetic peptide
GSIKRQGI

SEQ ID NO: 77 - protein, 9 aa, synthetic construct
  REGION 1..9: note = synthetic peptide
GSLQPLSPR

SEQ ID NO: 78 - protein, 9 aa, synthetic construct
  REGION 1..9: note = synthetic peptide
GTHLSPHYI

SEQ ID NO: 79 - protein, 10 aa, synthetic construct
  REGION 1..10: note = synthetic peptide
GVRELTSILK

SEQ ID NO: 80 - protein, 8 aa, synthetic construct
  REGION 1..8: note = synthetic peptide
HETISHTW

SEQ ID NO: 81 - protein, 8 aa, synthetic construct
  REGION 1..8: note = synthetic peptide
HHSLSVNR

SEQ ID NO: 82 - protein, 9 aa, synthetic construct
  REGION 1..9: note = synthetic peptide
HILHALLNK

SEQ ID NO: 83 - protein, 10 aa, synthetic construct
  REGION 1..10: note = synthetic peptide
HIYEAGLTFK

SEQ ID NO: 84 - protein, 9 aa, synthetic construct
  REGION 1..9: note = synthetic peptide
HLAEVVFAR

SEQ ID NO: 85 - protein, 10 aa, synthetic construct
  REGION 1..10: note = synthetic peptide
HLAEVVFARF

SEQ ID NO: 86 - protein, 9 aa, synthetic construct
  REGION 1..9: note = synthetic peptide
HLQEAYRIY

SEQ ID NO: 87 - protein, 8 aa, synthetic construct
  REGION 1..8: note = synthetic peptide
HLTELNRS

SEQ ID NO: 88 - protein, 9 aa, synthetic construct
  REGION 1..9: note = synthetic peptide
HPTESPKSI

SEQ ID NO: 89 - protein, 9 aa, synthetic construct
  REGION 1..9: note = synthetic peptide
HSLHAVATA

SEQ ID NO: 90 - protein, 9 aa, synthetic construct
  REGION 1..9: note = synthetic peptide
HTVQWWLKK

SEQ ID NO: 91 - protein, 9 aa, synthetic construct
  REGION 1..9: note = synthetic peptide
HTYGFFTSK

SEQ ID NO: 92 - protein, 11 aa, synthetic construct
  REGION 1..11: note = synthetic peptide
HTYNPSTLGGR

SEQ ID NO: 93 - protein, 10 aa, synthetic construct
  REGION 1..10: note = synthetic peptide
HVHVHILQKE

SEQ ID NO: 94 - protein, 10 aa, synthetic construct
  REGION 1..10: note = synthetic peptide
HVISRAHTNK

SEQ ID NO: 95 - protein, 10 aa, synthetic construct
  REGION 1..10: note = synthetic peptide
IAAEITFTNS

SEQ ID NO: 96 - protein, 8 aa, synthetic construct
  REGION 1..8: note = synthetic peptide
IDIDKIIQ

SEQ ID NO: 97 - protein, 9 aa, synthetic construct
  REGION 1..9: note = synthetic peptide
ILAQCNLHL

SEQ ID NO: 98 - protein, 10 aa, synthetic construct
  REGION 1..10: note = synthetic peptide
ILDVLTPLSL

SEQ ID NO: 99 - protein, 9 aa, synthetic construct
  REGION 1..9: note = synthetic peptide
ILPKVINRF

SEQ ID NO: 100 - protein, 9 aa, synthetic construct
  REGION 1..9: note = synthetic peptide
ILPKVIYRF

SEQ ID NO: 101 - protein, 9 aa, synthetic construct
  REGION 1..9: note = synthetic peptide
ILSSNLISL

SEQ ID NO: 102 - protein, 9 aa, synthetic construct
  REGION 1..9: note = synthetic peptide
ILYEGQTLK

SEQ ID NO: 103 - protein, 8 aa, synthetic construct
  REGION 1..8: note = synthetic peptide
INLKKKEL

SEQ ID NO: 104 - protein, 10 aa, synthetic construct
  REGION 1..10: note = synthetic peptide
IQICVLSTHI

SEQ ID NO: 105 - protein, 9 aa, synthetic construct
  REGION 1..9: note = synthetic peptide
IQNEIHAQR

SEQ ID NO: 106 - protein, 8 aa, synthetic construct
  REGION 1..8: note = synthetic peptide
IRQKPQLK

SEQ ID NO: 107 - protein, 9 aa, synthetic construct
  REGION 1..9: note = synthetic peptide
IRQSSLLAK

SEQ ID NO: 108 - protein, 9 aa, synthetic construct
  REGION 1..9: note = synthetic peptide
ISGLSTLFH

SEQ ID NO: 109 - protein, 9 aa, synthetic construct
  REGION 1..9: note = synthetic peptide
ISKSTPNIY

SEQ ID NO: 110 - protein, 11 aa, synthetic construct
  REGION 1..11: note = synthetic peptide
ISLSRYFPISL

SEQ ID NO: 111 - protein, 10 aa, synthetic construct
  REGION 1..10: note = synthetic peptide
ISPLSFLIIY

SEQ ID NO: 112 - protein, 9 aa, synthetic construct
  REGION 1..9: note = synthetic peptide
IVSAQNILK

SEQ ID NO: 113 - protein, 9 aa, synthetic construct
  REGION 1..9: note = synthetic peptide
IVSAQNLLK

SEQ ID NO: 114 - protein, 9 aa, synthetic construct
  REGION 1..9: note = synthetic peptide
IYFSHLQYF

SEQ ID NO: 115 - protein, 9 aa, synthetic construct
  REGION 1..9: note = synthetic peptide
IYYPFINTK

SEQ ID NO: 116 - protein, 8 aa, synthetic construct
  REGION 1..8: note = synthetic peptide
KDLELEIR

SEQ ID NO: 117 - protein, 9 aa, synthetic construct
  REGION 1..9: note = synthetic peptide
KDNDLHSIH

SEQ ID NO: 118 - protein, 9 aa, synthetic construct
  REGION 1..9: note = synthetic peptide
KDSFLYFLL

SEQ ID NO: 119 - protein, 8 aa, synthetic construct
  REGION 1..8: note = synthetic peptide
KDSIHHKL

SEQ ID NO: 120 - protein, 9 aa, synthetic construct
  REGION 1..9: note = synthetic peptide
KEEVIHALK

SEQ ID NO: 121 - protein, 8 aa, synthetic construct
  REGION 1..8: note = synthetic peptide
KGCPLKEK

SEQ ID NO: 122 - protein, 8 aa, synthetic construct
  REGION 1..8: note = synthetic peptide
KGLGPSPK

SEQ ID NO: 123 - protein, 8 aa, synthetic construct
  REGION 1..8: note = synthetic peptide
KGQWVTTI

SEQ ID NO: 124 - protein, 8 aa, synthetic construct
  REGION 1..8: note = synthetic peptide
KGSVAVNK

SEQ ID NO: 125 - protein, 9 aa, synthetic construct
  REGION 1..9: note = synthetic peptide
KIFHFIQVK

SEQ ID NO: 126 - protein, 9 aa, synthetic construct
  REGION 1..9: note = synthetic peptide
KIFHNFQLP

SEQ ID NO: 127 - protein, 8 aa, synthetic construct
  REGION 1..8: note = synthetic peptide
KIHLHLAP

SEQ ID NO: 128 - protein, 10 aa, synthetic construct
  REGION 1..10: note = synthetic peptide
KIIKMAILPK

SEQ ID NO: 129 - protein, 8 aa, synthetic construct
  REGION 1..8: note = synthetic peptide
KIILNGQK

SEQ ID NO: 130 - protein, 9 aa, synthetic construct
  REGION 1..9: note = synthetic peptide
KIINKILAK

SEQ ID NO: 131 - protein, 14 aa, synthetic construct
  REGION 1..14: note = synthetic peptide
KIKSFEKSNSWSWK

SEQ ID NO: 132 - protein, 8 aa, synthetic construct
  REGION 1..8: note = synthetic peptide
KIQKLARY

SEQ ID NO: 133 - protein, 8 aa, synthetic construct
  REGION 1..8: note = synthetic peptide
KITELGRI

SEQ ID NO: 134 - protein, 9 aa, synthetic construct
  REGION 1..9: note = synthetic peptide
KLEKQEQIK

SEQ ID NO: 135 - protein, 10 aa, synthetic construct
  REGION 1..10: note = synthetic peptide
KLIAGLIFLK

SEQ ID NO: 136 - protein, 8 aa, synthetic construct
  REGION 1..8: note = synthetic peptide
KLKTLQKI

SEQ ID NO: 137 - protein, 8 aa, synthetic construct
  REGION 1..8: note = synthetic peptide
KLLCDDSI

SEQ ID NO: 138 - protein, 10 aa, synthetic construct
  REGION 1..10: note = synthetic peptide
KLNQKEYLQL

SEQ ID NO: 139 - protein, 10 aa, synthetic construct
  REGION 1..10: note = synthetic peptide
KMFLNICLMK

SEQ ID NO: 140 - protein, 9 aa, synthetic construct
  REGION 1..9: note = synthetic peptide
KMPKAVATK

SEQ ID NO: 141 - protein, 8 aa, synthetic construct
  REGION 1..8: note = synthetic peptide
KNKTLPAK

SEQ ID NO: 142 - protein, 8 aa, synthetic construct
  REGION 1..8: note = synthetic peptide
KNVISLGK

SEQ ID NO: 143 - protein, 9 aa, synthetic construct
  REGION 1..9: note = synthetic peptide
KPALLGFMK

SEQ ID NO: 144 - protein, 10 aa, synthetic construct
  REGION 1..10: note = synthetic peptide
KQFGEDRSLK

SEQ ID NO: 145 - protein, 11 aa, synthetic construct
  REGION 1..11: note = synthetic peptide
KQWGKDSLFNK

SEQ ID NO: 146 - protein, 9 aa, synthetic construct
  REGION 1..9: note = synthetic peptide
KRLQELLIR

SEQ ID NO: 147 - protein, 9 aa, synthetic construct
  REGION 1..9: note = synthetic peptide
KRQGSLLGK

SEQ ID NO: 148 - protein, 10 aa, synthetic construct
  REGION 1..10: note = synthetic peptide
KRVLPTAQSK

SEQ ID NO: 149 - protein, 8 aa, synthetic construct
  REGION 1..8: note = synthetic peptide
KSAVISIT

SEQ ID NO: 150 - protein, 9 aa, synthetic construct
  REGION 1..9: note = synthetic peptide
KSFEKSNSW

SEQ ID NO: 151 - protein, 12 aa, synthetic construct
  REGION 1..12: note = synthetic peptide
KSFEKSNSWSWK

SEQ ID NO: 152 - protein, 10 aa, synthetic construct
  REGION 1..10: note = synthetic peptide
KSRILVHPPP

SEQ ID NO: 153 - protein, 8 aa, synthetic construct
  REGION 1..8: note = synthetic peptide
KSVQGFLK

SEQ ID NO: 154 - protein, 9 aa, synthetic construct
  REGION 1..9: note = synthetic peptide
KSYYLRNTF

SEQ ID NO: 155 - protein, 9 aa, synthetic construct
  REGION 1..9: note = synthetic peptide
KTAILNSLK

SEQ ID NO: 156 - protein, 9 aa, synthetic construct
  REGION 1..9: note = synthetic peptide
KTDRLLAKL

SEQ ID NO: 157 - protein, 11 aa, synthetic construct
  REGION 1..11: note = synthetic peptide
KTQEDGHLQAK

SEQ ID NO: 158 - protein, 9 aa, synthetic construct
  REGION 1..9: note = synthetic peptide
KTSLDSIVK

SEQ ID NO: 159 - protein, 15 aa, synthetic construct
  REGION 1..15: note = synthetic peptide
KVQLHCMFITALFSK

SEQ ID NO: 160 - protein, 9 aa, synthetic construct
  REGION 1..9: note = synthetic peptide
LDSLILSHL

SEQ ID NO: 161 - protein, 8 aa, synthetic construct
  REGION 1..8: note = synthetic peptide
LEYLGPEL

SEQ ID NO: 162 - protein, 9 aa, synthetic construct
  REGION 1..9: note = synthetic peptide
LFKLGGLCI

SEQ ID NO: 163 - protein, 9 aa, synthetic construct
  REGION 1..9: note = synthetic peptide
LFTLMMVSF

SEQ ID NO: 164 - protein, 11 aa, synthetic construct
  REGION 1..11: note = synthetic peptide
LGDRKTLISKK

SEQ ID NO: 165 - protein, 10 aa, synthetic construct
  REGION 1..10: note = synthetic peptide
LGVPCSQPGK

SEQ ID NO: 166 - protein, 8 aa, synthetic construct
  REGION 1..8: note = synthetic peptide
LHLIRKSI

SEQ ID NO: 167 - protein, 9 aa, synthetic construct
  REGION 1..9: note = synthetic peptide
LIAPHLQSK

SEQ ID NO: 168 - protein, 10 aa, synthetic construct
  REGION 1..10: note = synthetic peptide
LIYTPTNSVK

SEQ ID NO: 169 - protein, 9 aa, synthetic construct
  REGION 1..9: note = synthetic peptide
LLDIWVGSK

SEQ ID NO: 170 - protein, 9 aa, synthetic construct
  REGION 1..9: note = synthetic peptide
LLFSFLFLI

SEQ ID NO: 171 - protein, 9 aa, synthetic construct
  REGION 1..9: note = synthetic peptide
LLLSFNSSL

SEQ ID NO: 172 - protein, 12 aa, synthetic construct
  REGION 1..12: note = synthetic peptide
LLLVPICCWALS

SEQ ID NO: 173 - protein, 8 aa, synthetic construct
  REGION 1..8: note = synthetic peptide
LLQRTSGK

SEQ ID NO: 174 - protein, 8 aa, synthetic construct
  REGION 1..8: note = synthetic peptide
LLSKFHLI

SEQ ID NO: 175 - protein, 8 aa, synthetic construct
  REGION 1..8: note = synthetic peptide
LMIGKRIL

SEQ ID NO: 176 - protein, 11 aa, synthetic construct
  REGION 1..11: note = synthetic peptide
LMISDVEHLFM

SEQ ID NO: 177 - protein, 9 aa, synthetic construct
  REGION 1..9: note = synthetic peptide
LNKLKIHTF

SEQ ID NO: 178 - protein, 8 aa, synthetic construct
  REGION 1..8: note = synthetic peptide
LPDPLHFL

SEQ ID NO: 179 - protein, 9 aa, synthetic construct
  REGION 1..9: note = synthetic peptide
LPENLLQLL

SEQ ID NO: 180 - protein, 8 aa, synthetic construct
  REGION 1..8: note = synthetic peptide
LPHPIIEV

SEQ ID NO: 181 - protein, 9 aa, synthetic construct
  REGION 1..9: note = synthetic peptide
LQNIMLIQY

SEQ ID NO: 182 - protein, 8 aa, synthetic construct
  REGION 1..8: note = synthetic peptide
LSDIMLLQ

SEQ ID NO: 183 - protein, 9 aa, synthetic construct
  REGION 1..9: note = synthetic peptide
LSEKELISL

SEQ ID NO: 184 - protein, 9 aa, synthetic construct
  REGION 1..9: note = synthetic peptide
LSFQSRCLL

SEQ ID NO: 185 - protein, 10 aa, synthetic construct
  REGION 1..10: note = synthetic peptide
LSLMDIGLVP

SEQ ID NO: 186 - protein, 9 aa, synthetic construct
  REGION 1..9: note = synthetic peptide
LSLPGYEIL

SEQ ID NO: 187 - protein, 10 aa, synthetic construct
  REGION 1..10: note = synthetic peptide
LSSSPQCLLS

SEQ ID NO: 188 - protein, 8 aa, synthetic construct
  REGION 1..8: note = synthetic peptide
LSYFFLPK

SEQ ID NO: 189 - protein, 10 aa, synthetic construct
  REGION 1..10: note = synthetic peptide
LTVSVQGIFK

SEQ ID NO: 190 - protein, 9 aa, synthetic construct
  REGION 1..9: note = synthetic peptide
LVYSKTVLK

SEQ ID NO: 191 - protein, 11 aa, synthetic construct
  REGION 1..11: note = synthetic peptide
LWNRKGGKVGK

SEQ ID NO: 192 - protein, 9 aa, synthetic construct
  REGION 1..9: note = synthetic peptide
LYFPIYWHL

SEQ ID NO: 193 - protein, 11 aa, synthetic construct
  REGION 1..11: note = synthetic peptide
MAYHGISQSPK

SEQ ID NO: 194 - protein, 10 aa, synthetic construct
  REGION 1..10: note = synthetic peptide
MESRSLSAQW

SEQ ID NO: 195 - protein, 9 aa, synthetic construct
  REGION 1..9: note = synthetic peptide
MIWLIVGAK

SEQ ID NO: 196 - protein, 10 aa, synthetic construct
  REGION 1..10: note = synthetic peptide
MQFSCLSLPK

SEQ ID NO: 197 - protein, 9 aa, synthetic construct
  REGION 1..9: note = synthetic peptide
MRFHHLGQA

SEQ ID NO: 198 - protein, 9 aa, synthetic construct
  REGION 1..9: note = synthetic peptide
MSQKGKLRI

SEQ ID NO: 199 - protein, 9 aa, synthetic construct
  REGION 1..9: note = synthetic peptide
MTFEPSFRR

SEQ ID NO: 200 - protein, 9 aa, synthetic construct
  REGION 1..9: note = synthetic peptide
MTMAVLSKR

SEQ ID NO: 201 - protein, 9 aa, synthetic construct
  REGION 1..9: note = synthetic peptide
MVKPPSLLK

SEQ ID NO: 202 - protein, 10 aa, synthetic construct
  REGION 1..10: note = synthetic peptide
NEIKEDTKKW

SEQ ID NO: 203 - protein, 10 aa, synthetic construct
  REGION 1..10: note = synthetic peptide
NEIKEDTNKW

SEQ ID NO: 204 - protein, 9 aa, synthetic construct
  REGION 1..9: note = synthetic peptide
NLHSHQQRI

SEQ ID NO: 205 - protein, 9 aa, synthetic construct
  REGION 1..9: note = synthetic peptide
NLISRVTTL

SEQ ID NO: 206 - protein, 8 aa, synthetic construct
  REGION 1..8: note = synthetic peptide
NQKIREIK

SEQ ID NO: 207 - protein, 9 aa, synthetic construct
  REGION 1..9: note = synthetic peptide
NQLEERVSA

SEQ ID NO: 208 - protein, 9 aa, synthetic construct
  REGION 1..9: note = synthetic peptide
NTVLNRLTF

SEQ ID NO: 209 - protein, 10 aa, synthetic construct
  REGION 1..10: note = synthetic peptide
PCIGLEHVSL

SEQ ID NO: 210 - protein, 10 aa, synthetic construct
  REGION 1..10: note = synthetic peptide
PITGSEIVAI

SEQ ID NO: 211 - protein, 8 aa, synthetic construct
  REGION 1..8: note = synthetic peptide
PLFPPLSK

SEQ ID NO: 212 - protein, 15 aa, synthetic construct
  REGION 1..15: note = synthetic peptide
PLRGVLQLLRQCVWS

SEQ ID NO: 213 - protein, 9 aa, synthetic construct
  REGION 1..9: note = synthetic peptide
PMVEKEVSL

SEQ ID NO: 214 - protein, 9 aa, synthetic construct
  REGION 1..9: note = synthetic peptide
PNSTIILPI

SEQ ID NO: 215 - protein, 9 aa, synthetic construct
  REGION 1..9: note = synthetic peptide
QDIISLTQL

SEQ ID NO: 216 - protein, 9 aa, synthetic construct
  REGION 1..9: note = synthetic peptide
QIFSERFSL

SEQ ID NO: 217 - protein, 9 aa, synthetic construct
  REGION 1..9: note = synthetic peptide
QILSGISSY

SEQ ID NO: 218 - protein, 9 aa, synthetic construct
  REGION 1..9: note = synthetic peptide
QIYRSMEQI

SEQ ID NO: 219 - protein, 9 aa, synthetic construct
  REGION 1..9: note = synthetic peptide
QPLQKHAKL

SEQ ID NO: 220 - protein, 9 aa, synthetic construct
  REGION 1..9: note = synthetic peptide
QPTFTEHLL

SEQ ID NO: 221 - protein, 8 aa, synthetic construct
  REGION 1..8: note = synthetic peptide
QQIIVQTY

SEQ ID NO: 222 - protein, 13 aa, synthetic construct
  REGION 1..13: note = synthetic peptide
QRWELGLPHCTVS

SEQ ID NO: 223 - protein, 9 aa, synthetic construct
  REGION 1..9: note = synthetic peptide
QTATEPLVY

SEQ ID NO: 224 - protein, 10 aa, synthetic construct
  REGION 1..10: note = synthetic peptide
QVIPLPWPPK

SEQ ID NO: 225 - protein, 9 aa, synthetic construct
  REGION 1..9: note = synthetic peptide
QVLSPTSLK

SEQ ID NO: 226 - protein, 9 aa, synthetic construct
  REGION 1..9: note = synthetic peptide
RDQIVTVSV

SEQ ID NO: 227 - protein, 9 aa, synthetic construct
  REGION 1..9: note = synthetic peptide
RFYNKSFSK

SEQ ID NO: 228 - protein, 11 aa, synthetic construct
  REGION 1..11: note = synthetic peptide
RGRGTPPPPQP

SEQ ID NO: 229 - protein, 10 aa, synthetic construct
  REGION 1..10: note = synthetic peptide
RIAKSILSQK

SEQ ID NO: 230 - protein, 11 aa, synthetic construct
  REGION 1..11: note = synthetic peptide
RIYNELKQISK

SEQ ID NO: 231 - protein, 11 aa, synthetic construct
  REGION 1..11: note = synthetic peptide
RIYNELKQIYK

SEQ ID NO: 232 - protein, 9 aa, synthetic construct
  REGION 1..9: note = synthetic peptide
RLAAAPSGK

SEQ ID NO: 233 - protein, 10 aa, synthetic construct
  REGION 1..10: note = synthetic peptide
RLCPAAPSEK

SEQ ID NO: 234 - protein, 10 aa, synthetic construct
  REGION 1..10: note = synthetic peptide
RLCPAAPTGK

SEQ ID NO: 235 - protein, 10 aa, synthetic construct
  REGION 1..10: note = synthetic peptide
RLCPATPSEK

SEQ ID NO: 236 - protein, 11 aa, synthetic construct
  REGION 1..11: note = synthetic peptide
RLFPAAIPSRK

SEQ ID NO: 237 - protein, 11 aa, synthetic construct
  REGION 1..11: note = synthetic peptide
RLFPAAITSRK

SEQ ID NO: 238 - protein, 9 aa, synthetic construct
  REGION 1..9: note = synthetic peptide
RLIDMLTTK

SEQ ID NO: 239 - protein, 9 aa, synthetic construct
  REGION 1..9: note = synthetic peptide
RLPHYLLQK

SEQ ID NO: 240 - protein, 10 aa, synthetic construct
  REGION 1..10: note = synthetic peptide
RLSPLSLTQK

SEQ ID NO: 241 - protein, 11 aa, synthetic construct
  REGION 1..11: note = synthetic peptide
RLTATSASGFK

SEQ ID NO: 242 - protein, 12 aa, synthetic construct
  REGION 1..12: note = synthetic peptide
RLWYQDDAGLTK

SEQ ID NO: 243 - protein, 9 aa, synthetic construct
  REGION 1..9: note = synthetic peptide
RMFDEQYSK

SEQ ID NO: 244 - protein, 8 aa, synthetic construct
  REGION 1..8: note = synthetic peptide
RNTHAMVF

SEQ ID NO: 245 - protein, 10 aa, synthetic construct
  REGION 1..10: note = synthetic peptide
RPGTTVGLRP

SEQ ID NO: 246 - protein, 10 aa, synthetic construct
  REGION 1..10: note = synthetic peptide
RQESRAGLRI

SEQ ID NO: 247 - protein, 9 aa, synthetic construct
  REGION 1..9: note = synthetic peptide
RQPTKWEKI

SEQ ID NO: 248 - protein, 9 aa, synthetic construct
  REGION 1..9: note = synthetic peptide
RQQSVQWMW

SEQ ID NO: 249 - protein, 8 aa, synthetic construct
  REGION 1..8: note = synthetic peptide
RSIYLLHR

SEQ ID NO: 250 - protein, 11 aa, synthetic construct
  REGION 1..11: note = synthetic peptide
RTLAVSVTALK

SEQ ID NO: 251 - protein, 11 aa, synthetic construct
  REGION 1..11: note = synthetic peptide
RTVSPINLFCK

SEQ ID NO: 252 - protein, 11 aa, synthetic construct
  REGION 1..11: note = synthetic peptide
RVFSNLVPFSR

SEQ ID NO: 253 - protein, 9 aa, synthetic construct
  REGION 1..9: note = synthetic peptide
RWQGSHSVR

SEQ ID NO: 254 - protein, 8 aa, synthetic construct
  REGION 1..8: note = synthetic peptide
SALLHHSL

SEQ ID NO: 255 - protein, 10 aa, synthetic construct
  REGION 1..10: note = synthetic peptide
SASARPRPSL

SEQ ID NO: 256 - protein, 9 aa, synthetic construct
  REGION 1..9: note = synthetic peptide
SASLHLLHK

SEQ ID NO: 257 - protein, 9 aa, synthetic construct
  REGION 1..9: note = synthetic peptide
SFLSKAEMI

SEQ ID NO: 258 - protein, 9 aa, synthetic construct
  REGION 1..9: note = synthetic peptide
SFVYLLEIF

SEQ ID NO: 259 - protein, 10 aa, synthetic construct
  REGION 1..10: note = synthetic peptide
SGAAVELVKE

SEQ ID NO: 260 - protein, 9 aa, synthetic construct
  REGION 1..9: note = synthetic peptide
SGASTPMKL

SEQ ID NO: 261 - protein, 9 aa, synthetic construct
  REGION 1..9: note = synthetic peptide
SGFIPRHSI

SEQ ID NO: 262 - protein, 9 aa, synthetic construct
  REGION 1..9: note = synthetic peptide
SHQHLLIAR

SEQ ID NO: 263 - protein, 10 aa, synthetic construct
  REGION 1..10: note = synthetic peptide
SHRIPEHSVW

SEQ ID NO: 264 - protein, 9 aa, synthetic construct
  REGION 1..9: note = synthetic peptide
SINITKMAI

SEQ ID NO: 265 - protein, 9 aa, synthetic construct
  REGION 1..9: note = synthetic peptide
SIYALLHQI

SEQ ID NO: 266 - protein, 8 aa, synthetic construct
  REGION 1..8: note = synthetic peptide
SKSLSITK

SEQ ID NO: 267 - protein, 10 aa, synthetic construct
  REGION 1..10: note = synthetic peptide
SLDLEKQMSL

SEQ ID NO: 268 - protein, 9 aa, synthetic construct
  REGION 1..9: note = synthetic peptide
SLFGGFFTR

SEQ ID NO: 269 - protein, 8 aa, synthetic construct
  REGION 1..8: note = synthetic peptide
SLFHTEPF

SEQ ID NO: 270 - protein, 9 aa, synthetic construct
  REGION 1..9: note = synthetic peptide
SLGNIERPY

SEQ ID NO: 271 - protein, 9 aa, synthetic construct
  REGION 1..9: note = synthetic peptide
SLHFIIYLV

SEQ ID NO: 272 - protein, 11 aa, synthetic construct
  REGION 1..11: note = synthetic peptide
SLLQPETPGLK

SEQ ID NO: 273 - protein, 10 aa, synthetic construct
  REGION 1..10: note = synthetic peptide
SLQPLPPMFK

SEQ ID NO: 274 - protein, 14 aa, synthetic construct
  REGION 1..14: note = synthetic peptide
SLSAWLPSLESEER

SEQ ID NO: 275 - protein, 11 aa, synthetic construct
  REGION 1..11: note = synthetic peptide
SLSFFHWMSRS

SEQ ID NO: 276 - protein, 10 aa, synthetic construct
  REGION 1..10: note = synthetic peptide
SLSSKAPSAD

SEQ ID NO: 277 - protein, 9 aa, synthetic construct
  REGION 1..9: note = synthetic peptide
SLSSLWPVK

SEQ ID NO: 278 - protein, 8 aa, synthetic construct
  REGION 1..8: note = synthetic peptide
SLVNLNSK

SEQ ID NO: 279 - protein, 8 aa, synthetic construct
  REGION 1..8: note = synthetic peptide
SLVQAWEL

SEQ ID NO: 280 - protein, 11 aa, synthetic construct
  REGION 1..11: note = synthetic peptide
SLYPAATPSGK

SEQ ID NO: 281 - protein, 13 aa, synthetic construct
  REGION 1..13: note = synthetic peptide
SMMPASASGDNLK

SEQ ID NO: 282 - protein, 14 aa, synthetic construct
  REGION 1..14: note = synthetic peptide
SMMPASASGDNLKK

SEQ ID NO: 283 - protein, 8 aa, synthetic construct
  REGION 1..8: note = synthetic peptide
SPLQKVNV

SEQ ID NO: 284 - protein, 9 aa, synthetic construct
  REGION 1..9: note = synthetic peptide
SPRSPSPSL

SEQ ID NO: 285 - protein, 9 aa, synthetic construct
  REGION 1..9: note = synthetic peptide
SQSLSLYLY

SEQ ID NO: 286 - protein, 9 aa, synthetic construct
  REGION 1..9: note = synthetic peptide
SRHIYVLIY

SEQ ID NO: 287 - protein, 9 aa, synthetic construct
  REGION 1..9: note = synthetic peptide
SSERAAHIK

SEQ ID NO: 288 - protein, 9 aa, synthetic construct
  REGION 1..9: note = synthetic peptide
SSFLESHVR

SEQ ID NO: 289 - protein, 8 aa, synthetic construct
  REGION 1..8: note = synthetic peptide
SSLLSTQR

SEQ ID NO: 290 - protein, 9 aa, synthetic construct
  REGION 1..9: note = synthetic peptide
SSLSSATLK

SEQ ID NO: 291 - protein, 10 aa, synthetic construct
  REGION 1..10: note = synthetic peptide
SSLSSLWPVK

SEQ ID NO: 292 - protein, 10 aa, synthetic construct
  REGION 1..10: note = synthetic peptide
STLGGKGART

SEQ ID NO: 293 - protein, 9 aa, synthetic construct
  REGION 1..9: note = synthetic peptide
STLTGVWKK

SEQ ID NO: 294 - protein, 9 aa, synthetic construct
  REGION 1..9: note = synthetic peptide
SVKSTVITK

SEQ ID NO: 295 - protein, 10 aa, synthetic construct
  REGION 1..10: note = synthetic peptide
SVKSTVITKK

SEQ ID NO: 296 - protein, 8 aa, synthetic construct
  REGION 1..8: note = synthetic peptide
SVNIQWNI

SEQ ID NO: 297 - protein, 9 aa, synthetic construct
  REGION 1..9: note = synthetic peptide
SVQDLLLGH

SEQ ID NO: 298 - protein, 11 aa, synthetic construct
  REGION 1..11: note = synthetic peptide
SVSPVSGEMKK

SEQ ID NO: 299 - protein, 11 aa, synthetic construct
  REGION 1..11: note = synthetic peptide
SVWFFHISISL

SEQ ID NO: 300 - protein, 9 aa, synthetic construct
  REGION 1..9: note = synthetic peptide
SYLLKCFRI

SEQ ID NO: 301 - protein, 9 aa, synthetic construct
  REGION 1..9: note = synthetic peptide
SYLPSWTKL

SEQ ID NO: 302 - protein, 11 aa, synthetic construct
  REGION 1..11: note = synthetic peptide
SYLSGSQLSHL

SEQ ID NO: 303 - protein, 9 aa, synthetic construct
  REGION 1..9: note = synthetic peptide
SYPAKLSFI

SEQ ID NO: 304 - protein, 11 aa, synthetic construct
  REGION 1..11: note = synthetic peptide
TAKETIELTGN

SEQ ID NO: 305 - protein, 9 aa, synthetic construct
  REGION 1..9: note = synthetic peptide
TAKPPDLSR

SEQ ID NO: 306 - protein, 9 aa, synthetic construct
  REGION 1..9: note = synthetic peptide
TALLWSLRK

SEQ ID NO: 307 - protein, 12 aa, synthetic construct
  REGION 1..12: note = synthetic peptide
TALTTILLSASM

SEQ ID NO: 308 - protein, 9 aa, synthetic construct
  REGION 1..9: note = synthetic peptide
TCKIVKTID

SEQ ID NO: 309 - protein, 8 aa, synthetic construct
  REGION 1..8: note = synthetic peptide
TDLLLSLE

SEQ ID NO: 310 - protein, 9 aa, synthetic construct
  REGION 1..9: note = synthetic peptide
TEEEKTRAW

SEQ ID NO: 311 - protein, 10 aa, synthetic construct
  REGION 1..10: note = synthetic peptide
TEQGPTGVTM

SEQ ID NO: 312 - protein, 9 aa, synthetic construct
  REGION 1..9: note = synthetic peptide
TFGNTELKI

SEQ ID NO: 313 - protein, 11 aa, synthetic construct
  REGION 1..11: note = synthetic peptide
TGIPDREEEKI

SEQ ID NO: 314 - protein, 12 aa, synthetic construct
  REGION 1..12: note = synthetic peptide
TGPYPVAQAGLK

SEQ ID NO: 315 - protein, 9 aa, synthetic construct
  REGION 1..9: note = synthetic peptide
TGSEILIKH

SEQ ID NO: 316 - protein, 9 aa, synthetic construct
  REGION 1..9: note = synthetic peptide
TGTTGARYH

SEQ ID NO: 317 - protein, 9 aa, synthetic construct
  REGION 1..9: note = synthetic peptide
TIFGPSLAL

SEQ ID NO: 318 - protein, 9 aa, synthetic construct
  REGION 1..9: note = synthetic peptide
TILFEVCLA

SEQ ID NO: 319 - protein, 9 aa, synthetic construct
  REGION 1..9: note = synthetic peptide
TLHSSLGNK

SEQ ID NO: 320 - protein, 9 aa, synthetic construct
  REGION 1..9: note = synthetic peptide
TLSDFLTEI

SEQ ID NO: 321 - protein, 9 aa, synthetic construct
  REGION 1..9: note = synthetic peptide
TMLARLAGT

SEQ ID NO: 322 - protein, 8 aa, synthetic construct
  REGION 1..8: note = synthetic peptide
TNVLLVNI

SEQ ID NO: 323 - protein, 10 aa, synthetic construct
  REGION 1..10: note = synthetic peptide
TPITINECSF

SEQ ID NO: 324 - protein, 9 aa, synthetic construct
  REGION 1..9: note = synthetic peptide
TPRHIIVRF

SEQ ID NO: 325 - protein, 8 aa, synthetic construct
  REGION 1..8: note = synthetic peptide
TSQVFLSH

SEQ ID NO: 326 - protein, 8 aa, synthetic construct
  REGION 1..8: note = synthetic peptide
TSYSTQVK

SEQ ID NO: 327 - protein, 10 aa, synthetic construct
  REGION 1..10: note = synthetic peptide
TTALLWSLRK

SEQ ID NO: 328 - protein, 9 aa, synthetic construct
  REGION 1..9: note = synthetic peptide
TTFYILLIF

SEQ ID NO: 329 - protein, 9 aa, synthetic construct
  REGION 1..9: note = synthetic peptide
TTNPSIKKR

SEQ ID NO: 330 - protein, 11 aa, synthetic construct
  REGION 1..11: note = synthetic peptide
TTQEAEKLLER

SEQ ID NO: 331 - protein, 10 aa, synthetic construct
  REGION 1..10: note = synthetic peptide
TTWSGNIMTK

SEQ ID NO: 332 - protein, 9 aa, synthetic construct
  REGION 1..9: note = synthetic peptide
TVEKTVSSI

SEQ ID NO: 333 - protein, 8 aa, synthetic construct
  REGION 1..8: note = synthetic peptide
TVHQLSKY

SEQ ID NO: 334 - protein, 8 aa, synthetic construct
  REGION 1..8: note = synthetic peptide
TVLGLNQV

SEQ ID NO: 335 - protein, 9 aa, synthetic construct
  REGION 1..9: note = synthetic peptide
TVLKLLGKY

SEQ ID NO: 336 - protein, 8 aa, synthetic construct
  REGION 1..8: note = synthetic peptide
TYILIEQF

SEQ ID NO: 337 - protein, 9 aa, synthetic construct
  REGION 1..9: note = synthetic peptide
VHYLGFHDI

SEQ ID NO: 338 - protein, 9 aa, synthetic construct
  REGION 1..9: note = synthetic peptide
VICLPWPPK

SEQ ID NO: 339 - protein, 9 aa, synthetic construct
  REGION 1..9: note = synthetic peptide
VICPLRPPK

SEQ ID NO: 340 - protein, 9 aa, synthetic construct
  REGION 1..9: note = synthetic peptide
VICSPRPPK

SEQ ID NO: 341 - protein, 9 aa, synthetic construct
  REGION 1..9: note = synthetic peptide
VIFLPQPPK

SEQ ID NO: 342 - protein, 12 aa, synthetic construct
  REGION 1..12: note = synthetic peptide
VILVSYNGFGSI

SEQ ID NO: 343 - protein, 9 aa, synthetic construct
  REGION 1..9: note = synthetic peptide
VIRGWDSPI

SEQ ID NO: 344 - protein, 10 aa, synthetic construct
  REGION 1..10: note = synthetic peptide
VISEGSVLSI

SEQ ID NO: 345 - protein, 9 aa, synthetic construct
  REGION 1..9: note = synthetic peptide
VISPPRPPK

SEQ ID NO: 346 - protein, 9 aa, synthetic construct
  REGION 1..9: note = synthetic peptide
VLSSQVKII

SEQ ID NO: 347 - protein, 9 aa, synthetic construct
  REGION 1..9: note = synthetic peptide
VLVGVSLPK

SEQ ID NO: 348 - protein, 12 aa, synthetic construct
  REGION 1..12: note = synthetic peptide
VLWNRNGGKVGK

SEQ ID NO: 349 - protein, 10 aa, synthetic construct
  REGION 1..10: note = synthetic peptide
VSFPSNSQNP

SEQ ID NO: 350 - protein, 9 aa, synthetic construct
  REGION 1..9: note = synthetic peptide
VSLSVRTTL

SEQ ID NO: 351 - protein, 9 aa, synthetic construct
  REGION 1..9: note = synthetic peptide
VSSSLLSTK

SEQ ID NO: 352 - protein, 9 aa, synthetic construct
  REGION 1..9: note = synthetic peptide
VSTGKLKTR

SEQ ID NO: 353 - protein, 12 aa, synthetic construct
  REGION 1..12: note = synthetic peptide
VTADLSSMRDPR

SEQ ID NO: 354 - protein, 9 aa, synthetic construct
  REGION 1..9: note = synthetic peptide
VTHRDIYVL

SEQ ID NO: 355 - protein, 9 aa, synthetic construct
  REGION 1..9: note = synthetic peptide
VTSIHRLYL

SEQ ID NO: 356 - protein, 9 aa, synthetic construct
  REGION 1..9: note = synthetic peptide
VTVVFWNLI

SEQ ID NO: 357 - protein, 8 aa, synthetic construct
  REGION 1..8: note = synthetic peptide
VVPVVPFH

SEQ ID NO: 358 - protein, 8 aa, synthetic construct
  REGION 1..8: note = synthetic peptide
VYIYIYML

SEQ ID NO: 359 - protein, 9 aa, synthetic construct
  REGION 1..9: note = synthetic peptide
VYNMYLVNF

SEQ ID NO: 360 - protein, 10 aa, synthetic construct
  REGION 1..10: note = synthetic peptide
VYSAHRVEPF

SEQ ID NO: 361 - protein, 11 aa, synthetic construct
  REGION 1..11: note = synthetic peptide
WGRVADKRELK

SEQ ID NO: 362 - protein, 8 aa, synthetic construct
  REGION 1..8: note = synthetic peptide
WKFSRKVT

SEQ ID NO: 363 - protein, 10 aa, synthetic construct
  REGION 1..10: note = synthetic peptide
WLASFPGIIY

SEQ ID NO: 364 - protein, 8 aa, synthetic construct
  REGION 1..8: note = synthetic peptide
YIHNTIYI

SEQ ID NO: 365 - protein, 9 aa, synthetic construct
  REGION 1..9: note = synthetic peptide
YISLIKLSF

SEQ ID NO: 366 - protein, 10 aa, synthetic construct
  REGION 1..10: note = synthetic peptide
YLFKEPAFGF

SEQ ID NO: 367 - protein, 8 aa, synthetic construct
  REGION 1..8: note = synthetic peptide
YLIELCLQ

SEQ ID NO: 368 - protein, 9 aa, synthetic construct
  REGION 1..9: note = synthetic peptide
YLRSHIMSL

SEQ ID NO: 369 - protein, 9 aa, synthetic construct
  REGION 1..9: note = synthetic peptide
YLTQYVPNI

SEQ ID NO: 370 - protein, 9 aa, synthetic construct
  REGION 1..9: note = synthetic peptide
YPFSTSVLK

SEQ ID NO: 371 - protein, 9 aa, synthetic construct
  REGION 1..9: note = synthetic peptide
ALSFWATRV

SEQ ID NO: 372 - protein, 9 aa, synthetic construct
  REGION 1..9: note = synthetic peptide
LVIATFIKV

SEQ ID NO: 373 - protein, 9 aa, synthetic construct
  REGION 1..9: note = synthetic peptide
FVVFKAPEV

SEQ ID NO: 374 - protein, 9 aa, synthetic construct
  REGION 1..9: note = synthetic peptide
RLSHCLAWV

SEQ ID NO: 375 - protein, 9 aa, synthetic construct
  REGION 1..9: note = synthetic peptide
FVMPFCPSL

SEQ ID NO: 376 - protein, 9 aa, synthetic construct
  REGION 1..9: note = synthetic peptide
LLLPGTPAV

SEQ ID NO: 377 - protein, 9 aa, synthetic construct
  REGION 1..9: note = synthetic peptide
ALDQNSPGV

SEQ ID NO: 378 - protein, 9 aa, synthetic construct
  REGION 1..9: note = synthetic peptide
SLMAVSMTI

SEQ ID NO: 379 - protein, 9 aa, synthetic construct
  REGION 1..9: note = synthetic peptide
LMAKVSMTI

SEQ ID NO: 380 - protein, 9 aa, synthetic construct
  REGION 1..9: note = synthetic peptide
FLSIPFFFV

SEQ ID NO: 381 - DNA, 212 bp, Homo sapiens
  source 1..212: mol_type = other DNA
aatgccttgtttttgggagatgtgtactaaagaattaaaatgtaaaggcgaagtgtcaaaatatctgcaattaattctccaatcgcggggctgggagggaagcatgggagcaaacagagcaaaatgctaactagtggtgaatcaaggtgacgggcatctgggcattctgtaccgtgttcttgcaacttttctgaaggtttgaacttctcaaa

SEQ ID NO: 382 - DNA, 6030 bp, Homo sapiens
  source 1..6030: mol_type = other DNA
ggggaggagccaagatggccgaataggaacagctccggtctacagctcccagcgtgagcgatgcagaagacgggtgatttctgcatttccatctgaggtaccgggttcatctcactagggagtgccagacagtgggcgcaggtcagtgtgtgcgcgcaccgtgcgcgagccgaagcagggcgaggcattgcctcacctgggaagcgcaaggggtcagggagttccctttccgagtcaaagaaaggggtgacggacgcacctggaaaatcgggtcactcccacccgaatattgcgcttttcagaccggcttaagaaaaggcgcaccacgagactatatcccgcacctggctcagagggtcctacgcccacggagtctcgctgattgctagcacagcagtctgagatcaaactgcaaggcagcaacgaggctgggggaggggcgcccgccattgcccaggcttgcttaggtaaacaaagcagccgggaagctcgagctgggtggagcccaccacagctcaaggaggcctgcctgcctctgtaggctccacctctgggggcagggcacagacaaacaaaaaggcagcagtaacctctgcagacttaagtgtccctgtctgacagctttgaagagagcagtggttctcccagcacgcagctggagatctgagaatgggcagactgcctcctcaagtgggtccctgacccctgacccccgagcagcctaactgggaggcaccccccagcaggggcacactgacacctcacacggcagggtattccaacagactcgcagctgagggtcctgtctgttagaaggaaaactaacaaccagaaaggacatctacaccgaaaacccatctgtacatcaccatcatcaaagaccaaaagtagataaaaccacaaagatggggaaaaaacagaacagaaaaactggaaactctaaaacgcagagcgcctctcctcctccaaaggaacgcagttcctcaccagcaacagaacaaagctggatggagaatgattttgacgagctgagagaagaaggcttcagacgatcaaattactctgagctacgggaggacattcaaaccaaaggcaaagaagttgaaaactttgaaaaaaatttagaagaatgtataactagaataaccaatacagagaagtgcttaaaggagctgatggagctgaaaaccaaggctcaagaactacgtgaagaatgcagaagcctcaggagctgatgcgatcaactggaagaaagggtatcagcaatggaagatgaaatgaatgaaatgaagcgagaagggaagtttagagaaaaaagaataaaaagaaatgagcaaagcctccaagaaatatgggactatgtgaaaagaccaaatctacgtctgattggtgtacctgaaagtgatgtggagaatggaaccaagttggaaaacactctgcaggatattatccaggagaacttccccaatctagcaaggcaggccaacgttcagattcaggaaatacagagaacgccacaaagatactcctcgagaagagcaactccaagacacataattgtcagattcaccaaagttgaaatgaaggaaaaaatgttaagggcagccagagagaaaggtcgggttaccctcaaagggaagcccatcagactaacagcggacctctcggcagaaaccctacaagccagaagagagtgggggccaatattcaacattcttaaagaaaagaattttcaacccagaatttcatttccagccaaactaagcttcataagtgaaggagaaagaaaatactttatagacaagcaaatgctgagagattttgtcaccaccaggcctaccctaaaagagctcctgaaggaagcgctaaacatggaaaggaacaactggtaccagccactgcaaaatcatgccaaaatgtaaagaccatcgagactaggaagaaactgcatcaactaacgagcaaaatcaccagctaacatcataatgacaggatcaaattcacacataacaatattaactttaaatataaatggactaaattctgcaattaaaagacacagactggcaagttggataaagagtcaagacccatcagtgtgctgtattcaggaaacccatctcacgtgcagagacacacataggctcaaaataaaaggatggaggaagatctaccaagccaatggaaaacaaaaaaaggcaggggttgcaatcctagtctctgataaaacagactttaaaccaacaaagatcaaaagagacaaagagggccattacataatggtaaagggatcaattcaacaagaggagctaactatcctaaatatttatgcacccaatacaggagcacccagattcataaagcaagtcctgagtgacctacaaagagacttagactcccacacattaataatgggagactttaacaccccactgtcaacattagacagatcaacgagacagaaagtcaacaaggatacccaggaattgaactcagctctgcaccaagcagacctaatagacatctacagaactctccaccccaaatcaacagaatatacatttttttcagcaccacaccacacctattccaaaattgaccacatagttggaagtaaagctctcctcagcaaatgtaaaagaacagaaattataacaaactatctctcagaccacagtgcaatcaaactagaactcaggattaagaatctcactcaaagccgctcaactacatggaaactgaacaacctgctcctgaatgactactgggtacataacgaaatgaaggcagaaataaagatgttctttgaaaccaacgagaacaaagacaccacataccagaatctctgggacgcattcaaagcagtgtgtagagggaaatttatagcactaaatgcctaaaagagaaagcaggaaagatccaaaattgacaccctaacatcacaattagaagaaatagaaaagcaagagcaaacacattcaaaagctagcagaaggcaagaaataactaaaatcagagcagaactgaaggaaatagagacacaaaaaacccttcaaaaaatcaatgaatccaggagctggttttttgaaaggatcaacaaaattgatagaccgctagcaagactaataaagaaaaaaagagagaagaatcaaatagacacaataaaaaatgataaaggggatatcagcaccgatcccacagaaatacaaactaccatcagagaatactacaaacacctctacgcaaataaactagaaaatctagaagaaatggatacattcctcgacacatacactctcccaagactaaaccaggaagaagttgaatctctgaatagaccaataacaggctctgaaattgtggcaataatcaatagtttaccaaccaaaaagagtccaggaccagatggattcacagccgaattctaccagaggtacaaggaggaactggtaccattccttctgaaactattccaatcaatagaaaaagagggaatcctccctaactcattttatgaggccagcatcattctgataccaaagccgggcagagacacaaccaaaaaagagaattttagaccaatatccttgatgaacattgatgcaaaaatcctcaataaaatactggcaaaccgaatccagcagcacatcaaaaagcttatccaccatgatcaagtgggcttcatccctgggatgcaaggctggttcaatatatgcaaatcaataaatgtaatccagcatataaacagagccaaagacaaaaaccacatgattatctcaatagatgcagaaaaagcctttgacaaaattcaacaacccttcatgctaaaaactctcaataaattaggtattgatgggacgtatttcaaaataataagagctatctatgacaaacccacagccaatatcatactgaatgggcaaaaactggaagcattccctttgaaaactggcacaagacagggatgccctctctcaccgctcctattcaacatagtgttggaagttctggccagggcaatcaggcaggagaaggaaataaagggtattcaattaggaaaagaggaagtcaaattgtccctgtttgcagacgacatgattgtttatctagaaaaccccatcgtctcagcccaaaatctccttaagctgataagcaacttcagcaaagtctcaggatacaaaatcaatgtacaaaaatcacaagcattcttatacagcaacaacagacaaacagagagccaaatcatgggtgaactcccattcacaattgcttcaaagagaataaaatacctaggaatccaacttacaagggatgtgcaggacctcttcaaggagaactacaaaccactgctcaaggaaataaaagaggacacaaacaaatggaagaacattccatgctcatgggtaggaagaatcaatatcgtgaaaatggccatactgcccaaggtaatttacagattcaatgccatccccatcaagctaccaatgactttcttcacagaattggaaaaaactactttaaagttcatatggaaccaaaaaagagcccgcattgccaagtcaatcctaagccaaaagaacaaagctggaggcatcacactacctgacttcaaactatactacaaggctacagtaaccaaaacagcatggtactggtaccaaaacagagatatagatcaatggaacagaacagagccctcagaaataatgccacatatctacaactatctgatctttgacaaacctgagaaaaacaagcaatggggaaaggattccctatttaataaatggtgctgggaaaactggctagccatatgtagaaagctgaaactggatcccttccttacaccttatacaaaaatcaattcaagatggattaaagatttaaacgttaaacctaaaaccataaaaaccctagaagaaaacctaggcattaccattcaggacataggcgtgggcaaggacttcatgtccaaaacaccaaaagcaatggcaacaaaagacaaaattgacaaatgggatctaattaaactaaagagcttctgcacagcaaaagaaactaccatcagagtgaacaggcaacctacaacatgggagaaaattttcgcaacctactcatctgacaaagggctaatatccagaatctacaatgaactcaaacaaatttacaagaaaaaaacaaacaaccccatcaaaaagtgggcgaaggacatgaacagacacttctcaaaagaagacatttatgcagccaaaaaacacatgaagaaatgctcatcatcactggccatcagagaaatgcaaatcaaaaccactatgagatatcatctcacaccagttagaatggcaatcattaaaaagtcaggaaacaacaggtgctggagaggatgcggagaaataggaacacttttacactgttggtgggactgtaaactagttcaaccattgtggaagtcagtgtggcgattcctcagggatctagaactagaaataccatttgacccagccatcccattactgggtatatacccaaatgagtataaatcatgctgctataaagacacatgcacacgtatgtttattgcggcactattcacaatagcagagacttggaaccaacccaaatgtccaacaatgatagactggattaagaaaatgtggcacatatacaccatggaatactatgcagccataaaaaatgatgagttcatatcctttgtagggacatggatgaaattggaaaccatcattctcagtaaactatcgcaagaacaaaaaaccaaacaccgcatattctcactcataggtgggaattgaacaatgagatcacatggacacaggaaggggaatatcacactctggggactgtggtggggtcgggggaggggggagggatagcattgggagatatacctaatgctagatgacacattagtgggtgcagcgcaccagcatggcacatgtatacatatgtaactaacctgcacaatgtgcacatgtaccctaaaacttagagtataataaaaaaaaaaaa

SEQ ID NO: 383 - DNA, 1382 bp, Homo sapiens
  source 1..1382: mol_type = other DNA
ctctccctcctctccctcctctccctcctctccctcctctccctctctttccacggtctccctctgatgcagagctgaagctggactgtactgctgccatctccgctcactgcaacccccctgcctggttctcctgcctcagcctgccgagtgcctgcgactgcaggcgcgcgccaccacgcctgactggttttcgtatttttttggtggagacggggtttcgctgtgttggccgggctggtctccagctcctaaccacaagtgatccgccagcctcggcttcccgaggtgccaggattgcagacagagtgtcgttcactcagtgctcaatggtgcccaggctggagtgcagtggcgtgatcttggctcactacaacctccacctcccagccgcctgccttggcctcccaaagtgccgagattgcagcctctgcccggccgccaccctatctgggaagtgaggagcgtctctgcctggccaccatcccatctaggaagtgaggagcgtctctgcctggccgcccatcgtctgagatgtggggagcgcctctgccctgctgccccgtctgggatgtgaggagcgtctctgccaggccgccccgtctgagaagtgaggagcccctccgcccggcagccaccccgtctgggaagtgaggagcgtctccgcctggcagccaccctgtccgggagggaggtgggggtcagcccccgcccggccagccgccccgtcagggagagaggtgggggggtcagccacccgcccggccagccgccccgtccgggaggtgaggggtgcttctgcccggccgcccctactgggaagtgaggagcccctctgcccggctgccaccccggctgggaggtgtacccaacagctcattgagaacgggccaggatgacaatggcggttttgtagaatagaaaggggggaaaagtggggaaaagattgagaaattggatggttgtcgtgtctgtgtagaaagaggtagacatgggagacttttccttttgtgctgtactaagaaaaattcttcttccttgggatcctgttgatctgtgaccttgcccccaaccctgtgctctctgaaacatgtgctgtgtccactcagggttaaatggattaagggcggtgcaagatgtgctttgttaaacagatgcttgaaggcagcatgctcgttaaaagtcatcaccactccctaatctcaagtacccagggacacaaacactgcggaaggccgcagggtcctctgcctaggaaaaccagagacctctgttcacatgtttatctgctgaccttccctccactattgtcctgtgaccctgccaaatccccctctgcgagaaacacccaagaatgatcaattaaaaaaaaaaaaagaaaa

SEQ ID NO: 384 - DNA, 6310 bp, Homo sapiens
  source 1..6310: mol_type = other DNA
gctcagagaagtggtagaagcatcaagccagctgatgtggatcccaaagggtttggtgcaggaacatctgtagtggtgcatggccagggacagccatccccataggctcaacttgctcctataggagtctttagtgctaggggaactgtcagtcctcaactctgcaggatggtcttgcccatcagatgaggcaggtccaacctgagcgccccttggtctgctgacccctcccaggccccattcctgcttgcagggcagcctcaggtgccctggggggcctgcattatagcttctgtactggtagaccatgggtgatcagtggagagtttcagcagggtggtttctgtgggcatgaaccagcctgcatactccctccctatgttgcagtttcccctaacccatggcaacttactcagctggcatgtatctgtgtgggtgagttttgctttcctttgccacaccagtgtgagggagtgcagtccgaccccctccacccaccaactgccattgcaggcagagccttggcagacacagccagccttctccaaccagcagcctgcccttgcactaacactgctgtgggagtcaaactaggcacagagaacagcagatcctccccagccctgagtgacaactcctgcttgcagggcacagagaaggcacccagacctgcacctgccagtaccccacccctgagccaacaccatttctagcatgactgtgcgcacagtcaccagcaggggccccctgcgccctgctccagctgcattcccttcactactctggtgaacacccacatggagacaggcatcctggcacctactagcactctgccacagctgctgctaccactgctgctggcacatgcaaatgaggatggatcctgctgtcattgcactatgaaatgctttcattcacaccacctatcagagtgtagtgaccagcggtctgggaacaccttaggccccccccgaccccagcacagtggatttctaacctcgaggagccagagaacaaagagccaatgcaagtccgccagagttagagcacacagtcctggagttgagagctgagcagtggccctctaacaccttccagaaatgaagccagtctgctgaattcacctataccacagtcaaactcttatggtcatcaaatagaataaaaggaaaaaacaaacacccaaaggtcagcaacctcaaagattgaaggaggataagcccacaaagatgagaaagaatcagcacaagaaccctgacaactcaaaaagccagagtaccttctttcctccaaatggtcacatctccgttccagcaaggattctgaaccaggctaagatggttgaaatcacagaaataagattcagaatgtggataggaacaaagctcattgagatacacgagtatgttgaaacccaatccaaggaagctaaaaatcaggataaaacaatgcagaagctgatagacaaaatagctagtatagaaaagaaggttacaacccaacagagctgaaaaacacactacaagaatttcataatgcaattgcaaccattaatagcagaatagaccaagcagaggaaggaatctcagagctagaagactggctttctgaaataagacagataagaatagaggcaaaagaatgaaaaggaaggaacaaaacctccaagaaatatggaattatgtaaagagaccaaatttatgactcattggtgttcctgaaagagatggggagaatggaaccaacttggaaaacatatttcaggatatcatccatgagaacttccccaacctacctagagaggacaacattcaaattcaaggattgcagagaacccaagtaaaatacttcacaaagaagatcatccccaagatacatactcatcagattctccaaggtcaaaatgaatgaaaaaaatgttaaaagaagctagagagaaaggtcaggtcacctacaaagggaagcccatcagactaacagacccctcagcagaaaccttataagccagaagagattggatgccaatgttcaacattcttaaaagaaatcccaacccagaatttcatatacagccaaactaagcttcataagtgaaagagaaataagatccttttcagacaagcaaatgctgagagaattcattactaccagacctgccttacaagagcccctgaaagaatcactaaatatggaaaggaaagactgttaccagccactacaaaacacactgaagtacacagaccagtgacattgtaaggcaactacataacaagtctgaaaaataaccagggtctgtgacagtgtcagatccaaacatactaatactaaccttgaatgtaatgagctaaatgccccaattaaaaggcagagagtggctagctggataaagaatcagacccattggtatgctgtcttcaagagaccagtctcacacggagtgacatacataggctcaaaataaagggatggagaaaaatctatcaagcaaatggaaaacagaaaaaagcaggggttgcaatcctagtttcacacacaacagactttaaaccaacaaagatcagaaagatcagaaaagacaaagaagggcattacataatgataaagggttcaattcaacaagaagtgctatatcctaaatatacgtatatacacccaacacaggatcactcagattcataaagcaagttcttagagaccttcaaagacagattcccacacaataatagtgggaaagtttaataccccactgacaatgttagataattgagccagaaaattaacaaagatattcaggacctgaactcagcacaggatcaaatggacctgatcaacatccacagaactctccaccccaaaaaaacagaatatacattcttatcattgtcacatggaacatactctaaaattgatcacataagtggaagtaaaacactcctcagtaaatgcaaaagaactgaaatcataacgaacaatatcttggaccacagcacaaattagaaatcaagactaagaaattcactcagaaccatacaattacatggcaattggataacctgctcctgaataaactcttggataaataatgaaattaaggcagaaataaaagaagttctttgaaactaatgagaacaaagagacaacataccagaatctgtgggatacagccaaggcagtgttaagagggagatttatagcactaaatgcccacatgaaaaagttggaaaggtctcagcttgacaacctaaatcacaactaagagaactagtgaaataagagcaaagaaatcccaaagctagcaggaaacaagaaataaccaaaattagagcgaactgaaggatatggagacatgaaaaaccattcaaaagatcagtgaatccaggagctggttttttgaagaaattaataaaatagaccattagctaggctaataaagaaggaaagaggaaattgaaataaatgatcagaaatgacaagggtgatattaccagtgaccccatgaaaatataaataaccatcagagaatattatgaacacctctgtgaacataaactagaaaatctggaagaaaatggataatttcctggacccatataccctctcaaaactgaaccagcaagaaattgaatccctgaacagacaaataacaagctctgaaattgattcagtaataaatagcctaccaaccaaaaagagcccaggactagacagattcacagctgaattctaccagatgtacaaagaagagttgataccattcctactgaaactattccaatgaagttaaggaggaggaactcctctctaactcattctatgaggccagcatcatcctgaccaaaacctagcagagacacaacaaaaaaagaaaactttaggccaatatccttgatgaacactgaagcagaaatcctcaaggaaatactggcaaatcaaatccagcataacatcaaaaagcttatccaccatgatcaagtaggttttatccctgagatgcaaggttggtgtaacatatgcaaatcaataaatgtgatttatcacataaacacaactaaagacaaaatccacatgattatctgaacaggtgcacaaaaggctctcaataaaattcaatactacttcatgttaaaaactctcaataaactaggtatcaaaggaacatacctcaaaatagtgagagccatctatgacaaacccatagtgaacatcatactgaatgggcaaaagctggaagcattccccttgaaaacttgcacaagaaaaagatgccctctcttggcatcctttttccattctcttggaaaagaataccactcgttttcaacatagttttgaaagtcctggtcagggcaatgaggcaagagaaagacagagcatccatataggaggagaggaagttaaattatctctttttgcagatgacataatcgtatacctagaaaacaccccagtcccagcccaaaagctcctccagctgatacacaaattcagcaaggtctcaggatacaaaatcaatgtgtaaatatcaatctttcttatataccaacaacagtccagctgagaaccaaatcaggaatgtaatcccattcacaattgccacaaaaagaataaatacctagaaatacagctaaccagggagatgaaagatctctatgaggagaactacaaaatattggttaaagaaatcagagatgacacaaacaaatggaaaaacattttatgctcatggataggaagaatattgctaaaatggccatactgcccaaagcattgtatagattcaatgctattcctgttatactaccatttacatttttcacagaactagaaaaaactattttaaaattcatatggaaccaaaaaagagcccaaatagccaaggtgatcctaatcaaaaagaacaaagctggaggcattatgctacctgacttaaaaccgtactacagggctacagtaaccaaaacagcatgatactgctacaaaagcagacagatagaccaatggaatggattagagaacccagaaataaggccatacacctacaactatctgatcttcaacaaacctgacacaaacaagcaatggggaaaagattccctagttaataaatggtgctagataactgactagagatatgcggaaaattgaaactggatgccttccttacaccacataaaaaattaagctggattaaagactttaaaatcccaaactataaaaacgttggaagacaacgtaggcaataccattctgggcataggagtgggcaaattttcatgacaaagatgccaaaagcagctgcaataaaggtaaaaattgacaaatgggatctaattaaacgaaagagcttctgcatagtggaggaaactatcaacagagtgaacagacaacctacagagtggcagaaaatatttgcaaatgatacatctgtcaaaggtcaaatatctagcatctgtaatgaacttcgatttacaagaaaaagcaaccccattaaaaagtgggcaaagagcatgaacagacagttttcaaaagcagacatacatgcaatcaacaatcatgaaaaaagactcaacatcactaattactagagaagtgcaaatcaaaaccacagtgagatactgtcccacaccagtcagaatgctattattaaaaagtcaaaaaacaacagatgctggtgaggttggagagaaaaaggaacacttatacgctgttgatgggaatgagtgtaaattagttcaaccattgtgggagacgatgtggcaattcctcagagacctaaaaacagaaatgccatttgactcatcaatttcatgactgggtatatatccaaagatttataaatcgttctattataaagacacatgcacttatatgttcattgcagcactattcacaatagttcgcaaagacatggaatcaacccagattcccaatgatagaatggataaaggaaatatacaccatggcattctaagcggccatcaagaagaacgatcatgtcctttgcaggaacatggatggagctggaggccattatccttagcaaacaaacacaggaacagaaaaccaaataccacatgttctcacgtacaagtgggagctaaatgatgagaacacgtggacacgggaacaacacacgctggggactatcggaggatgaagggtgggaagagggagagaatcaggagaaataactgtgtactaggcttaatacttgggttactaaataatctgtacaacaaacccctatgctacaagtgtactatataacaaacctgcatgtgtacccttgaacttaaattttttaaaagtt

SEQ ID NO: 385 - DNA, 4225 bp, Homo sapiens
  source 1..4225: mol_type = other DNA
tctgaacaaactcaaaaatcaaaccttcttagatctgtcaaagaaatgaggtcacagcgaagacttctgccccccaaaattggagatacagatatttggatacagagaaccacaatgtactggtataaaaacccatgagcagaaacctccctaggaaccagtgaccgagcggggatatccaagctgtaattgaggaactcctggaggctcagcatggaaaactctgacagctgaaaatatgagggggactcagtcatgtggggaagcctacatttttgtgaattttccttccagaagttttaccaggttctcacaacaaatattagagaaaaatcctctagtgcttccagcagggagaaggggaaaggagtcattttgaaatatgccagagcactctttttaacaaggcctcagaggaaactattttaccagagactaatctactgaaatttggcatagttgaacctacctggaggaaggcagattcccaacttcagcctcttccagccatcctgtctcacctaagagggggagagagatgaaaaaataagccgaaaagcacttgcgaatttcacagttcagggtcacaggttcaccaaatcactgagacctaatcataagactgtagaatacttcatcaccccctacaacttgccactacactattaaaagcctgtttactgaagttccttttacctagtagattatgtccacctttgaacaaaaagttacaagacatactaaccagtaaaaaacacaatttgaagagactaaacaagcctcagaactagagtcagatatgtcaggaatatgagaattattagaccaggaattttttttgactatgattaatatgttaagggctttaatggaaaaagtagacaacatgaaagaacagataggtaatttaagcagagagatgggaattctaagaaagttttaaaatgctagagatcaaaaacattgtattagaagtgaagaatgcctttgataggttcattagtagggtggacatagttgttgaaaggacctctgagcttgagacaacagaaacttccaaaactgaaaagcaatgagaaaaaataaaagataaacaagaaaagaatatccaagaactataggacaactataaaagttacaaatacatgtaatgagaatatttgatggagaagaaaaagagacaggaacagaatcaatatttgaataaaaatgactgagaattttctccacattaatgttagacagcaaacacagatccaggaaactcagagaccaccaagcaagataagtgcaaaagcaaacaaataaaacccccaaaactatacctaggcatatcatattcaaaattcagaaaatcaaatattaaaaaaaaagtcctgaaagaagccagagggaataaacacctatagaggaataaagataagaattacaattgacttctcttcagaatccacgcaagcaaaaagagagtggagtgaaatatttagtgttaagaggaaaaaaaatcaatctggaattctgttccctgtgaaattattatttaaaagtgaagaagaaataaatactttcttagacaaacaaagatttagagaatttgttacaggacacctgccttgcaagaaatgttaaaagaagttcttcagagaaaaggaaattgatataggtctgaaatttggagctacataaagaaagaaaatgcatcagagaaagaataagtgaaagtaaaatggaaactttaatctttcttattcctaatttagctaatagataacaattcattcaaaataattatagcaacaatgtatttgattacatatgcatatatatatgcttatttatgcttatatataagggaaatgaatgacaccaatgatacaaggatgggaggaaggaattaggcatattttgttattactaggtatttgtaccccctgtgaagcagtaggtgttatttcaaagtcacttggattagtggtaaatgtatggtgcaaagtctagggcaatcatgtagaaaaataaaaaaagtgtaatagatatgctaaaaaaggaaagaaaattgaatcatataaaatgcccaattaaaaactacagaaaagtatggaagacaaaaataagaacaaaaaaaaggcagaaaagtgtggaagacaaaaataagaacaaaaggccacaagtagaaaacagtagcaaaaatggtagatgttaatccacctatgtcaataatcattttaaatgtcattggtttaaatataccatttaaaagacagattgttgaagtggatcaaaaaaaccaacaagaatcaacttatgttgtctacaagaaacccactttaaatataaagacacatatggatttaaagtaaagagatggggatataccatgataaaactaaataaaagaaactagctaaaaggggatcaactgtattaatttcagacggaacagactgaatgtcaaggaaagttatcaaggataaagagaaacattacttaatgataaagaggtcaattctctaaaaagacatgataatccttaatgtgtatgtgcctaacatcaaagtgtaaaaatacacgaggcaaaaactgatagaactccaaagagaaacagatgaatgcactcttatagttggagaaatggagagatctagcaggcagaaaattagtaaggccatagaactcaacactccataaatcaactgaatagaactgacatctatagatgatttgtatctcacaatagtagattacacatcttcttaagcttacatggaatattcaccaagatagaccacattctgaaccataaaacagatgttaacaagtttcagagaatagaaatgttacaacatctgaccttagaccatatggaattaaactagtagtcagtaacagaaagatgctggaaaatcctcaaatacttgatgattaaacaacaaacttataataacacggtgctcaaatataaaatctcaggagaaattctaaaatattttgaattccatgaaactgaaggtacaacttattgaaatttgtgggatgcagtgaaagcagtgcttagagggaaaattatagcattaaatgaatatatttgaaaagaaaaagatctaaaatcagttatcagaactttcaccttagatagtaaactagcaaaataaaagcacattaagttgaaaataagcaagtgaaaataaataataaattggagcagaaatcaatgaaattgaaaatgggaaatcaatagggaaaacctacaaaaccaaaaactagttctttgaaaagttcaataaaatcaataacatgcctcccaaaaaaatagtaataaaatcactaacccttagccaggctaagaaataaagagatgacacaaattacttatatcataaatgaaagaaggaatattactatggatcccacagacattaaaaggataataaggggatgttatgaacaaccctatgcccacaactttaataacctaaataaaatgggccaattccttgaaaagcacaatttgctaaaactcacagaagaagaaatagacaatctgaatgggtctaaatctgttaaatcaattgaatcaataatttaaaaccttccaaaatataaagtaccaggccttgatgggttcgctgatgaactctagtagatgttttaggaagaaattgtaccgattctctgtaatccctttcagaagatagaagcagagggaatacttccaaactcattctgtgaacccaggcattaccctataccaataaaagacaaaatacaaagacattacaagaagagaaaattatagatcagtatgtcttatgaatatggatgcaaaaatcatcaacaaaatactagcaaagtgaatccaacaatgcataaaaagaattatacaccataatcaagtgggatttatatcaggtatgtgaggctggtttaatatttgaaaaccaatgaatgcaatccatcacatcaacaaactaaaaaagaaaaatcacaagatcatatcagtagatgaaaaaaagcatttaacaaaacgcaacactcattcatgataaaaactctcagtaaaccaggaatggaagggaacttcctcaacttgataaagaatgcctgtgaaagacctgcagctaacatcatacttaatgcagagaaacttgaagctttctgctaaggttagaaacaagacaaggatgtcaccaccccttttcaacattgtgctggaaatcctaactaa

SEQ ID NO: 386 - DNA, 2554 bp, Homo sapiens
  source 1..2554: mol_type = other DNA
tccaatcaatagaagagagagattcctccctaactcattttatgaggcccagcatcatcctgataccaaagcctggcagagacacaacaaaaaaagagaattttagatcaatatccctgatgaacatcgatgcaaaaatcttcaataaaatactggcaaatcgaatccagcaacacatcaaaaagcttatccaccaagatcaagttggcttcatccctgagatgcaaggctagttcaacatacacaaatcaataaatgtaatccatcacatacatagaaccaaagacaaaaaccacatgattagctcaatggatgcagaaaaggccttcgacaaaattcaacagtccttcatactaaaaactcgcaataaactagatattggtgggaagtatctgttaaaataaaaagagctacttatgacaaaccccagccaatatcatactgagtgggcaaaaacaggaagcattccctttgaaaactggcacaaggcagggatgccctatctcaccactcctattcaacatagtgttgggagttccggccggggcaatcaggcaagagaaagaaataaagggcattaaattaggaaaagaggaagtcaaattgtccctgtttgcaaatgacatgattgtatatttagaaaaccccatcgtctcagcccaaaatctccttaagctgataagcaacttcagcaaagtctcaggatacaaaatcgatgtacaaaaatcaccagcattcttgtacaccaataacagacaaacagagagccaaatcatgagtgaactcccgttcacaattgctacaaagagaataaaatacataggaatccaacttacaagggatatgaaggtcttcttcaaggagaactacaaaccactgtttaatgaaataaaagagaacacaaacaaattgacgaacattccatgctcatgggtaggaagaatgaatatcgtgaaaatggccatacttcccaaggtaatttatagattcaatgccatccccatcaagctaccaatgactttcttcacagaattgaaaaaaactttaaagttcatatgaaaacaaaaaagagccacatttcgaagtcaatcctaagccaaaagaacaaagctagaggcatcacactacctgacttcaaactatactacaaggctacagtaaacaaaacagcatggtactgtaccaaaatagaggtatagaccaatggaacagaacagaggtctcagaaataacaccacacgtctacaaccgtctgatctttgacaaacctgacaaaaacaagaaatggggaaaggatgccctatttaataaatggtgctggaaaaactgactagccatatgtagaaagctgaaactggattccttccttacaccttatacaaaaattaattcaagatggattaaagacttatatgttagacctaaaaccataaaagccctaaaagaaaacctaggcaataccattcaggacataggcatgggcacggacttcatgactaaaccaccaaaagcaatggcaacaaaagccaaaattgacaaatgggatctaattaaactaaagagcttctgcacaacaaaagaaactaccatcagagtgaacaggcaacctacagaataggagaaaatttttgcaatctactcatctgacaaagggctaacatccagaatctacaaagaacttaaacaaaattacaagacaaaaatcaaacaagcccatcaagaagtgggcaaaggatatgaacagacacttttcaaaagaagacatttatgcagccaacagacacctgaaaaatgcttatcagaactggtcatagagaaatgcaaatcaaaatcacaatgagacaccatttcacactatttagaatggcaatctttaaaaagttaggaaacgacaggtgctggagaggatgcggtgaaataggaatgcttttacactgttggtgggagtgtaaactagttcaaccattgtggaagacagtgtggtgattcctcaaggatctacaactagaaataccatttgacccagccatcccattactgggtatgtacccaaaagattttaaatcatgtggctataaagacacatgcacatgaatgtttattgcagcactattcacaatagtaaagacttggaaccaacccaaatgtccatcaataatagactggattgagaaaatgtggcacatatacaccatggaatactatgcagccacaaaaaaggataagttcatgtcgtttttagggtcatggatgaagctggaaaccatcattctgagcaaaccattgtaaggacagaaaatcaaaaactgcatgttttcactcataggtgggaactgaacaatgagaacacttggacacagggcagggaatatcacacactggggcctgtcgtggggtggagggataggggagggatagcattaggagaaatacctaatgtaaatgacgagttaatgggtgcagcaaaccaacacggcacatgtatacatatgtaacaaacctgcacgttgtgtacatgtaccctagaacttaaagtataataaaaagaaacaaa

SEQ ID NO: 387 - DNA, 6140 bp, Homo sapiens
  source 1..6140: mol_type = other DNA
aggtggagccaaggtggccaaataggaacagctccagtctagagctcccagcgtgagcgatgcagaagacgggtgatttctgccttgccaactgaggtactggggagtgtcagaaagtgggtacaggacagtgggtgcactgcacccagcatgagccaaaggagggtgaagcatcacctcacccgggaggcacaaggggtcagggaattccctttcctagtcaaagaaaggggtgacagacggcacctggaaaatcgggtcactgccaccctaatactgcacttttccaacagtcttagcaaacggcacaccaggagattatatcccgtgcatggctcgggggggtcctacgcccatagagcctccctcattgctggcacagcagactgagatcgaactgcaaggcggcagcgaggctgggggaggggcacctgccattgccgaggctggagtaggtaaacaaagcagcccggaagctcgaactgggtggagcccactgcagctcaaggaggcctgcctgcctctgtagactgcacctctgggggcagggaatagtcaaacaaaaggcagcagaatcctctgcagacttaaatgtccctgtctgacagctttgaagagagtagtggttctcccagcacacagcttgagatctgagaatggacagactgcctccttaggttggtccctgacccccaagtagcctaactgggaggcccccccccagtaggggcagacagacacctcacatggccgggaactcctctgagacaaaacttccagaggaacgatcagacagcaacatctgctgctcaccagtatctgctgttctgcagcctccgctgctgataccctggcaaacagggtctggagtgacctcaagcaaactccaacagacctgcagctgagggtcctgactgttagaaggaagactaacaaatagaaaggacatccacaccaaaaccccatctgtacatcgccatcatcaaagaccaaaggtagataaaaccacaaagatggggaaaaatagagcagaaaaactggaaactctaaaaatcagagtgcctttcctcctccaaaggaacgcagctcctccccagcaatggaacaaagctggatggagaatgactttgacaagttgagggaagaaggcttcagacaatcaaactactccgagctaaaggaggaagttcgaacccatggcaaagaagttaaaaaccttgaaaaaaaattagaccaatggctaactagaataaccaatacagagaagtccttaaaggacctgatggagctgaaaaccaaggcacgagaactacgtgacaaatgcacaagcctcagtagccgattcgatcaactggaagaaagggtatcagtgatggaagatgaaatgaatgaaatgaagcaagaagagaagtttaaagaaaaaagaataaaacgaaatgaacaaagccttcaagaaatatggggctatgtgaaaagaccaaatctacgtctgattggtgtacctgaaagtgacagggagaatggaaccaagttggaaaacactcggcaggataataaccaggagaacctccccaatctagcaaggcaggccaacattcaaattcaggaaatacagagaatgccacaaagatactccttgagaagagcaactccaagacaaataattgtcagattcaccgaagttgaaatgaaggaaaaaatgttaagggcagccagagagaaaggtcgggttaccctcaaagggaagcccatcagactaacagcggatctcttggcagaaactctacaagccagaagagagtgggggctaatattcaacattcttaaagaaaagaattttcaaccagaatttcatatccagccaaatgaagcttcataagtgaaggagaaataaaatactttacagacaagcaaatgcggagagattttgtcaccaccaggcctgccctaaaagagctcctgaaggaagcactaaacatggaaaggaacaaccggtaccagccactgcaaaaacatgccaaattgtaaagaccatcaaggctaggaagaaactgcagcaactaacaagcaaaataaccagctaacatcataatgacaggatcaaattcaaacataacaatattaaccttaaatgtaagcgggctaaatgctccaagtaaaagacacagaatggcaaattggataaagagtcaagacccatcagtgtgctgtattcaggaaacccatctcacatgcagagacacacataggctcaaaataaagcgatggaggaagatctaccaagcaaatggaaaacaaaaaaaggcaggggttgcaatcctagtctctgataaaacagactttaaaccaacaaagatcaaaagagacaaagaaggccattacataatggtaaagggatcaattcaacaagacgagctaactatcctaaatatatatgcacccaatacaggagcacccagattgataaagcaagtccttagagacctagaaagagacttagactcccacacattaataatgggagactttaacaccccactgtcaacagtagacagatcaacgagacagaaagtcaacaaggatatccaggaattgaactcacctctgcaccaagtggacctaatagacatctacagaactctccaccacaaatcaacagaatatacattcttctcagcaccacaccgcacttattccaaaattgaccacatagttggaagtaaagcactcctcagcaaatgtaaaagaacagaaattataataaactgtctctcagaccacagtgcaatcaaactagaactcaggattaagaaactcactcaaaaccgctcaactacatggaaactgaataacctgctcctgaatgactactgggtacataatgaaatgaagacagaaatgaagatgttctttgaaaccaacgagaacaaagacacaatgtaccagaatctctgggacacattcaaagcagtgtgtagaggaaaatttatagcactaaatgcccacaagagaaagcaggaaagatctaaaactgacaccctaacatcacaattaaaagaactagagaagcaagagcaaacacattcaaaagctagcagaaggcaagaaataactaagatcagagcagaactgaaggaaatagagacacaaaaaacccttcaaaaaatcaatgaatccaggagctggttttttgaaaagatcaacaaaattgatagaccgctagcaagactaatacagaagaaaagagagaagaatcaaatagatgcaataaaaaatgataaaggggatatcaccaccgatcccacagaaatacaaactaacatcagagaatactataaacacctctacgcaaataaactagaaaatctagaagaaatggataaattcctcgacacatgaaccctcccaagactaaaccaggaagaagttgaatctctgaatataccaataacaggctctgaaattgaggcaataattaacagcttaccaaccaaaaaaagtccaggaacagatggattcacagccgaattctatcagaggtacaaggaagagctggtaccattccttctgaaactattccgatcaatagaaaaagagggaatcctctctaacttattttatgaggccagcatcatcctgataccaaagcctggcagagatacaagaaaaaaaagagaattttagaccaatatccctgatgaacatcgatgcaaaaatcctcaataaaatactggcaaaccgaatccagcagcacatcaaaaagcttatccaccatgatcaagtgggcttcatccctgggatgcaaaggctggttcaacatatgcaaatcaataaacgtaatcagcatataaacagaaccagtgacaaaaaccatatgattatctcaatagatgcagaaaggcctttgacaaaattcaacaacgcttcatgctaaaaactatcaataaattagttatggatgagacatatctcaaaataataagagctatctatgacaaacccacaggcaatatcatactgaatgggcaaaaactggaagcattctctttgaaaactggcacaagacagggatgccctctctcaccactcctattcaacatagtgttggaagctctggccagggcaatcaggcaggagaaggaaataaagggcatttaattaggaaaagaggaagtcaaattgtccctgtttgcagatgacatgattgtatagctagaaaaccccatcatctcagcccaaaatctccttaagctgattggcaacttcagcaaagtctcatgatacaaaatcaatgtgcaaaaatcacaagcattcttatacaccagtaaaagacaaacagccaaatcatgagtgaactcccattcacaattgcttcaaagagaataaaatacctaggaatccaacttacaagggatgtgaaggacctcttcaaggagaactgcaaaccactgctcaatgaaataaaagaggatacaaagaaatggaagaacattccatgctcatggacaggaagaatcaatatcgtgaaaatggccatgctgcccaaggtaatttatagattcaatgccatccccatcaagctaccaatgactttcttcacagaattggaaaaaactactttaaagttcatatggaaccaaaaaagaacccgcattgccaagtcaatcctaagccaaaagaacaaagctggaggcatcacgctacctgacttcaaactatactacaaggctacagtaaccaaaacagcatggtactggtaccaaaacagagatttttggtaaacaaaacagaccaatggaacagaacagagccctcagaaataatgccacatatctataaccatctgatctttgacaaacctgataaaaacaagcaatggggaaatgattccctatttaatacacggtgctgggaaaactggctagccatatgtagaaagctgaaactagatcccttccttacaccttatacaagaactaattcgagatgtattaaagacttaaatgttagacctgaaaccataaaaaccctagaagaaaacctaggcaataccattcaggacataggcatgggcaaggacttcatgtctaaaacaccaaaagcaatggcaaggaaagccaaaattgacaaatgggatctaattaaactaaagagcttctgcacagcaaagaaaactaccatcagagtgaacaggccctacagaatgggagaaaatttttgcaatctacttatctgacaaagggctaatatccagaatctacaatgaactcaaacaaatttacaagaaaaaaacaaacaaccccatcaacaagtgggcgaaggatatgagcagacacttctcaaaagaagacatttatgcagccaacagacacaggaaaaaaggctcatcatcaccggccatcagagaaatgcaaatcaaaaccacaatgagataccatctcacaccagttagaatggcgatcattaaaaagtcaggaaaaaacaggtgctggagaggatgtggagaaataggaacacttttacattgttgggactgtaaactagttcaaccattgtggaagtcagtgtggtgattcctcagggatctagaactagaaataccatttgacccagcaatcccattactgggtatatacccaaaggattataaatcatgctgctataaagacacatgcacacgtatgtttattgagggactattcacaatagcaaagacttggaaccaagccaaatgtccatcaataatagactggattaagaaaatgtggcacatatacaccatggaatactaggcagccataaaaaatgataagttcatgtcctttgtagggacatggatgaagctggaaaccatcattctcagcaaactatcacaaggacaaaaaaaccaaataccgcatgttctcactcataggtgggaattgaacaatgagaacacatagacacaggaaggggaacatcacacactggggcctgtttggggtgggggggcgggggagggatagcattaggagatatacctaatgtaaataacgagttaatgggtgcagctcaccagcatggcacatgtatacatatgtaactaacctgcatgttgtgcacatgtaccctagaacttaaagtataaaaaaaaaaaaaaa

SEQ ID NO: 388 - DNA, 6105 bp, Homo sapiens
  source 1..6105: mol_type = other DNA
aagatggccaaataggaacagctccagtctacagctcccagcatgagtgacgcagaagagggatgatttctgcatttccaactgaggtaccgggttcatctcagtagggcttgttggacagtgggtatagcccacggagcgtgagccgaagcagggcggggcattgcctcacctgggaagcacaaggagttggagaattccctttcctagccaagggaagccgtgacagacggtacctggaaaatcgggacattcccaccctaatactgcccttttccaacggtcttagcaaatggcacaccaggagattatatcccgtgcctggctcggagggtcccatgcctgcggaggcttgctcactgctagcacagcagtctgagatagaactgcaaggaggcagtgaggctgggagaggggcgtccgccattgctgaggcttgagtaggtaaacaaagcggccgggaagctcgaactgggtggagcccactgcagctcaaggaggcctgcctgcctctgtagactccacctctggcggcagggcatagctgaacaaaaggtagcaggaacttctgcagacttaaacgtccctgtctgacagctttgaagagagtagtggttctcccagcacgcggtttgagatctgagaacggacagactgcctcctcaagtgggtccctgacccccgagtagcctaattgggagacacctcccagtaggggctgactgacatcttatacagccgggtgcccctctgagatgaagcttccagagaaaggatcaggcagcaacatttgccgttctgcaatatttgctgttctgcagcctccactggtgatacccaggcaaacagggtctggagtggacctccagcaaactccaacagacctgcagctgagggtcctgactgttagaaggaaaactaacagaaaggacatccacaccaataccccatctgtatgtcaccatcatcaaagaccaaaggtagataaaaccacaaagatggggagaaaccagagcagaaaagctgaaaattctaaaaatcagagtgcctcttctcctccaaaggaacgcagctcctcaccagcaacagaacaaagctggacggagaatgactttgacgagttgagagaagaaggcttcagacgatcggtaataacaaactctgagctaaaggaggatgttcgaacccatcgcaaagaagctaaaaaccttgaaaaaagattagacgaatggctaactagaataaacagcatagagaagaccttaaacgacctgatggagctgaaaaccatggcataagaactatgtgacgcgtgcacaagcttcagtagctgattcaatcaagtggaagaaagggtatcagtgattgaagatcaaatgaatgaaatgaagtgagaagagaagttcagagaaaaaagagtaaaaagaaacaaacaaatcctcaaagaaatatgggactatgtgaaaagaccaaatctatgtctgattggtgtacctgaaagtgacggggagaatggaaccaagttggaaaacactcttcgggatattatacaggagaacttccccaacctagcaaggcaggccgacattcaaattcagggaatacagagaacgccacaaagatactccttgagaagagcaactctgaaatacataattgtcagattcccaaagttgaaatgaaggaaaaaatgctaagggcagccagagagaaaggtcgggttacccacaaagggaagcccatcagactaacagcagatctctcggcagaaactctgcaagccagaagagcgtgggggccaatattcaacagtcttaaagaaaagaattttcaacccagaatttcgtatccagccaaactaagcttcataagtgaaggagaaataaaatcctttacagacacgcaaatgctgagagattttgtcaccaccaggcctgccttacaagagctcctgaaagaagcactaaacatggaaaggaacaaccgataccagccactgcaaaaacatgccaaatttaaagaccatcgatgctaggaagaaactgcatcaactaacgagcaaaataaccagctaacatcataatgacaggatcaaattcacacataacagtattaaccttaaatgtaaatgggctaaatgctccaattaaaaagacacagactggcaaattggataaagagtcaagacccatcagtgtgcgatattcaggagacccatctcaggtgcagagacacacataggctcaaaataaagggatggaggaagatctaccaagcaaatggaaaacaaaaaaaagcaggggttgcaatcctagtctctgataaaacagactttaaaccaacaaagatcaaaagagacaaggccattacataatggtaaagggatcaattcaacaggaagagctatcttaaatatatatgcacccaatacaggagcaccgagattcataaagcaagtccttagagacctacagagagacttagactcccacacaataataatgggagactttaacaccccactgtcaacattagagagatcaacgagacagaaagttaaaaaggatatccaggacttgaactcagctctgcaccaagcagacctaatagacatctacagaactcttcaccccaaatcaacagaatatacattcttcttagcaccacatcacacttattccaaaattgaccacatagttggaagtaaagcactcctcagcaaatgtaaaagaacagaaattataacaaactgtctgtcagaccacagtgcaatcaaattagaactcaggattaagaaactcactcagaactgctcaactacatggaaactgaacaacctgctgctgaatgactactgggtacataatgaaatgaaggcagaaataaagatgttctttgaaaccaatgagaacaaagacacaacataccagaatctctgggacacattcaaagcagtgtggagagggaaatttatagcactaaatgcccacaagagaaagcaggaaagatccaaaattgacaccctaacatcacaattaaaagaactagagaagcaagagcaaacattcaaaagctagcagaaggcaagaaataactaagatcagagcagaactgaaggagatagagacacaaaaaacccttcaaaaaatcaatgaatccaggagctggttttttgaaaagatcaacaaaatttgatagaccgctggcaagactaataaagaagaaaagagagaagaatcaaatagacacaataaaaaatgataaagggcatatcaccaccgatcccacagaaatacaaacttccatcagagactactgtaaacacctcaatacaattaaactagaaaatgtagaagaaatggataaattcctggacacatacaccctcccaagaccaaaccaggaagaatttgaacccctgaatagaccaatagcacctctgaaattgaggcaataatagcataccaaccataaaaagtccaagaccagatggattcacagccgaattctaccagaggtacaaagaggagctggtaccattccttctgaaactattccaatcaatagaaaaagagggaatcctccctaactcattttatgaggccagcatcatcctgataccaaagcctggcagagacacaacaaaaaaagagaattttagaccactatccctgatgaacatcgatgcaagaatcctcaataaaatactggcaaaccgaatccagcagcacatcaaaaagcttatcccccaagatcaagttggcttcatccctgggaggcaaggctggttcaacatacgtaaatcaataaacataatccatcatataaacagaaccaaagataaaaaccacatgattacctcaacagatgcagaaaaggcctttgacaaaattcaacagcccttcatgctaaaaactctcaataaactagatattgatgggacgtatctcaaaataataagagctatttatgacaaacccacagccaatatcatactgaatgggcagaaactggaagcattcctttcgaaaactggtgcaagacagggatgccctttctcaccactcctattcaacatagtgttagaagttctggccagggcaatcaggcaggagaaagaaataaagggtattcaattaggaaacgagaaagtcaaattgtccctgtttgcaggtgacatgattgtatatttagaaaaccccactgtcttagcccaaaatctccttaagctgataagcaacttcagcagtctcaggatacaaaatcaatgtgcaaaaatcacaagcattcctatacaccaataatagacaatcagagagccaaatcatgagtgaactcccattcacaattgcttcaaagagaataaaatacctagaaatccaacttacaagggatgtgaaggacctcttcaaggagaactacaaaccactgctcaatgaaataaaagaggacacaaacaaatggaagaacatttcatgctcttggataggaagactcagtatcgtgaaaatggccatactgcccaaggtaatttatagactcagtgccatccccatcaaaccaccaatgactttcttcacagaattggaaaaaactactttaaagtccatatggaaccaaaaaagagcctgcattgccaagacaatcctaagccaaaagaacaaagctggaggcatcacgctacctgacttcaaactatactacaaggctgcagtaaccaaaacagcatggtattggtaccaaaacagagatatagaccaatggaacagaacagagccttcagaaataataccacacatctacaacaatctgatctttgacaaacctgacaaaaacaagaaatggggaaaggattccctattttataaatggtgctgggaaaactggctagccataggtagaaagctgaaactggatcccttccttacaccttataaaaaagttaactcaagatggattaaagacttaaatgttagacctaaaaccataaaaaccctagaagaaaacctaggcaatacccttcaggacataggcatgggcaaggacttcatgactaaaacaccaaaagcaatggcaacaaaagccaaaatagacaaatgggatctaattaaactaaagagcttctgcacagcaaaagaaaccaccatcagagtgaacaggcaacctacagaatgggagaaaatttttgcaatctacccatctgacaaagggctaatatccagaatctacaaagaacttaaacaaagttataagaaaaaatcaaccccatcaaaaagtgggcgaagcatataaacagacacttctcaaaagaagacatttatgcagccaacagacacatgaaaaaatgctcatcatcactggccatcagagaaatgcaaatcaaaatcacaatgagataccatctcacaccagttagaatggtgatcattaaaaaagtcaggaaacaacaggtactggagaagatgtggagaaataggaacacttttacactgttggtgggactgtaaactagttcaaccattgtggaagacagtgtggcgattcctcaaggttctagaactagaaatcccatttgacgtagccatcccattactgggtatatacccaaaggattataaatcatgctgctataaagacatatgcacatgtatgtgtattgtggcactattcacaatagcaaagacctggaaccaacccaaatgtccaacaatgatagactggattaagaaaatgtggcacatatacaccatggaatactatgcagccataaagaagcatgagttcatgtcctttatagggacatggatgaagctggaaaccatcattctgagcaaactatcgcaaggacaaaaaaccaaacaccacatgttctccctcataggtgggaattgaacaataagaacacttggacacagggtggggaacatcacacaccaaggcctgttgtggagttgggggaggggggagggatagcattaggagatatatctaatgtaaatgacgagttaatgggtgcagcacaccaacgtggcatatgtatacttatgtaacaaacctgcacattgtgcacatgtaccctagaacttaaagtataataaaaaaaaa

SEQ ID NO: 389 - DNA, 967 bp, Homo sapiens
  source 1..967: mol_type = other DNA
tgtggggaaaagcaagagagatcagattgttactgtgtctgtgtagaaagaagtagacatgggagactccattttgttatgtgttaagaaaaattcttctgccttgagattctgttaatctatgaccttacccccaaccccgtgctctctgaaacgtgtgctgtgtcaactcagggttgaatggattaagggcggtgcaggatgtgctttgttaaacagatgcttgaaggcagcatgctccttaagagtcatcaccactccctaatctcaagtacccagggacacaaaaactgcggaaggccgcagggacctctgcctaggaaagccaggtattgtccaaggtttctccccatgtgatagtctgaaatatggcctcgtgggaagggaaagacctgaccgtcccccagcccgacacccgtaaagggtctgtgctgaggaggattagtataagaggaaggaatgcctcttgcagttgagacaagaggaaggcatctgtctcctgcctgtccctgggcaatggaatgtctcggtataaaacccgattgtatgctccatctactgagatagggaaaaaccgccttagggctggaggtgggacctgcgggcagcaatactgctttgtaaagcactgagatgtttatgtgtatgcatatccaaaagcacagcacttaatcctttacattgtctatgatgccaagacctttgttcacgtgtttgtctgctgaccctctccccacaattgtcttgtgaccctgacacatccccctctttgagaaacacccacagatgatcaataaatactaagggaactcagaggctggcgggatcctccatatgctgaacgctggttccccgggtccccttatttctttctctatactttgtctctgtgtctttttcttttccaaatctctcgtcccaccttacgagaaacacccacaggtgtgtaggggcaacccacccctac

SEQ ID NO: 390 - DNA, 1710 bp, Homo sapiens
  source 1..1710: mol_type = other DNA
cagtcacatggatggataatcctatagaaatatatgttaatgatagtgtatgggtacctggccccatagatgatcgctgccctgccaaacctgaggaagaagggatgatgataaatatttccattgggtatcgttatcctcctatttgcctagggagagcaccaggatgtttaatgcctgcagtccaaaattggttggtagaagtacctactgtcagtcccatcagtagattcacttatcacatggtaagcgggatgtcactcaggccacgggtaaattatttacaagacttttcttatcaaagatcattaaaatttagacctaaagggaaaccttgccccaaggaaattcccaaagaatcaaaaaatacagaagttttagtttgggaagaatgtgtggccaatagtgcggtgatattacaaaacaatgaatttggaactattatagattgggcacctcgaggtcaattctaccacaattgctcaggacaaactcagtcgtgtccaagtgcacaagtgagtccagctgttgatagcgacttaacagaaagtttagacaaacataagcataaaaaattgcagtctttctacccttgggaatggggagaaaaaggaatctctaccccaagaccaaaaatagtaagtcctgtttctggtcctgaacatccagaattatggaggcttactgtggcctcacaccacattagaatttggtctggaaatcaaactttagaaacaagagattgtaagccattttatactatcgacctaaattccagtctaacagttcctttacaaagttgcgtaaagcccccttatatgctagttgtaggaaatatagttattaaaccagactcccagactataacctgtgaaaattgtagattgcttacttgcattgattcaacttttaattggcaacaccgtattctgctggtgagagcaagagagggcgtgtggatccctgtgtccatggaccgaccatgggaggcctcaccatccgtccatattttgactgaagtattaaaaggtgttttaaatagatccaaaagattcatttttactttaattgcagtgattatgggattaattgcagtcacagctacggctgctgtagcaggagttgcattgcactcttctgttcagtcagtaaactttgttaatgattggcaaaagaattctacaagattgtggaattcacaatctagtattgatcaaaaattggcaaatcaaattaatgatcttagacaaactgtcatttggatgggagacagactcatgagcttagaacatcgtttccagttacaatgtgactggaatacgtcagatttttgtattacaccccaaatttataatgagtctgagcatcactgggacatggttagacgccatctacagggaagagaagataatctcactttagacatttccaaattaaaagaacaaattttcgaagcatcaaaagcccatttaaatttggtgccaggaactgaggcaattgcaggagttgctgatggcctcgcaaatcttaaccctgtcacttgggttaagaccattggaagtactacgattataaatctcatattaatccttgtgtgcctgttttgtctgttgttagtctgcaggtgtacccaacagctccgaagagacagcgaccatcgagaacgggccatgatgacgatggcggttttgtcgaaaagaaaagggggaa

SEQ ID NO: 391 - DNA, 967 bp, Homo sapiens
  source 1..967: mol_type = other DNA
tgtggggaaaagcaagagagatcagattgttactgtgtctgtgtagaaagaagtagacatgggagactccattttgttatgtgctaagaaaaattcttctgccttgagattctgttaatctatgaccttacccccaaccccgtgctctctgaaacgtgtgctgtgtcaactcagggttgaatggattaagggcggtgcaggatgtgctttgttaaacagatgcttgaaggcagcatgctccttaagagtcatcaccactccctaatctcaagtacccagggacacaaaaactgcggaaggccgcagggacctctgcctaggaaagccaggtattgtccaaggtttctccccatgtgatagtctgaaatatggcctcgtgggaagggaaagacctgactgtcccccagcccgacacccgtaaagggtctgtgctgaggaggattagtataagaggaaggaatgcctcttgcagttgagacaagaggaaggcatctgtctcctgcctgtccctgggcaatggaatgtctcggtataaaacccgattgtatgctccatctactgagatagggaaaaaccgccttagggctggaggtgggacctgcgggcagcaatactgctttgtaaagcactgagatgtttatgtgtatgcatatccaaaagcacagcacttaatcctttacattgtctatgatgccaagacctttgttcacgtgtttgtctgctgaccctctccccacaattgtcttgtgaccctgacacatccccctctttgagaaacacccacagatgatcaataaatactaagggaactcagaggctggcgggatcctccatatgctgaacgctggttccccgggtccccttatttctttctctatactttgtctctgtgtctttttcttttccaaatctctcgtcccaccttacgagaaacacccacaggtgtgtaggggcaacccacccctac

SEQ ID NO: 392 - DNA, 209 bp, Homo sapiens
  source 1..209: mol_type = other DNA
ggcaacccttctgggttcccttccaccatatggaagctttactttcgctttcactttactttcacttttgctttaataaatcttgccaccgcacactctttgggtctgcatgtttctctaatggagctgtaacactcaccactgaggtccatggcttctttccttgaagcctgtgaaaccacgaacccttcaatcaagaaaagaccttt

SEQ ID NO: 393 - DNA, 6151 bp, Homo sapiens
  source 1..6151: mol_type = other DNA
ttgttagatggctgaataggaacagctccagtctacagctcccagtgtgagcaacgcagaagatgggtgatttctgcatttccagctgaggtactgggttcatctcactgggacttgtcggaaagtgggtgcagcccacagagtgtgagctgaagcagggtggggcatcgcctcacccaggaagtgcaagtggttggggaattccctttcctagccaagggaagctgtgacagatggtacctggaaaatcgggacactcccagcctaatactgcgcttttccaatggtcttagcaaacggcacaccaggagattatatcctgcgcctggcttggagggtcccacgcccacggagccttgctcactgctagcacaccagtccgagatcgaactacaaggtggcagcgaggctgggggaggggcctctgccattgctgaggcttgagtaggtaaacaaagaagccgggaaggtcgaactgggtggtacccatcacagctcaaccaggcctgcctgcctctgtagacgccacctctgtgggcagggcgtagctgaacaaaaggcagcagaaacttctgcagacttaaacgtccctgtctgacagctttgaagagagtggtggttctcccagcatggagtttgagatctgagaatggacagcctgcctcatcaagtgggtccctgacccccgagtagcctaactgggagacacctcccagtaggggcctacagacacctcatacagctgggtgcccctctgagatgaagcttccagaggaaggatcaggcagcaacatttgctgttttgcaatatttgctgttttgcaatatttgctgttctgcagcctgcactggtgatacccaggcaaacagggtctggagtggacctccagcaaactccaacagacctgcagatgagggtcctgactgttagaaggaaaactaacaaagagaaaggaatagcatcaacatcaacaaaaaggacatccacaccaaagccccatctgtaggtcaccatcatcaaagactaaaggtagataaaaccacaaagatggggagaaaccagagcagaaaagctgaaaattctaaaaatcagagcacctcttctcctccaaaggaacacagctcctcaagagcaatggaacaaggatggacggagaatgactttgacaagatgacagaagtaggcttaaaaatatcagtaataacaaacttctccaaggaagtttggaggatgttcaaacccatcgcaaagaagctaaaaaccttgaaaaaagattagacgaatggctaactagaataaacagtgtagagaagaccttaagtgacctggtggagctgaaaaccatggcacgagaactacgtgatgcatgcacaagcttcagtagccaatttgatcaagtggaagttcaagtgaatgaaatgaagcgagaagagaagtttagagaaaaaagagtaaaaaaaaatgaacaaagcctccaagaaatatgagactgtgtgaaaagatcaaatctacatctgactggtgtacctgaaagtgacggggagaatggaaccaagttggaaaacactcttcagggtattatccaggagaacttccccaacctagcaaggcaggccaacattcaaattcaagaaatacagagaacgccacaaagatactcctcgagaagagcaaccccaagacacataattgtcagattcaccaaggttgaaataaaggaaaaaacgttaagggtagccagagagaaaggtcaggttacccacaaagggaagcccatcagcctaatagcggatctctcagcagaaactttacaagccagaagagagtaaaggccaatattcaacgttcttaaagaaaagaatttttaacccagaatttcatatccagccaaactaagcttcataagtgaaggagaaataaaatcctttacagacaagcaaatgctgagagattttgtcaccaccaggcctgccctacaagagctcctgaaggaagtgctaaacatggaaaggaaaaaccagtatcagccactgcaaaaacatgccaaattgtaaacaccatcgatgctaggaagaaactgcatcaactaatgagcaaaataaccagctaacatcataatgacaggatcaaattcacatgtaacaatattaaccttaaatgtaaatgggctaaatgctccaattaaaagacacagactggcaagttggataaagagtcaagacccatcagtgtgctgtattcaggagacccatctcatgtgcagagacacacataggctcaaaataaagggatggaggaagatccaccaagcaaatggaaaacaaaaaaaggcaggggttgcaatcctagtctctgataaaacagactttaaaccagcaaggatcaaaagagacaaagaaggccattacataatggtaaagggatcaattcaacaagaagagctaactatcctaaatatatatgcacccaatacaggagcacccaaattcataaagcaagtccttaaagacctagaaacaaagagacttagactcccacagaatcataatgggagattttaacaccccactgtcaacattagacagatcaacaagacagaaagttaacaaggatatccaggacttgaactcagctctgcaccaagtggacctaatagacatctacagaactctccactacaaatcagcagcatatacattcttctcagcaccacatcatacttattccaaaattgaccacatagttggaagtaaagcactcctcagcaaatgtaaaagaacagaaactataacaaactctgtctcagaccacagtgcaatcaaattagaactcaggattaagaaactcactcaaaactgctcaactacatggaaactgaacaacctgctcctgaatgactactgggtacataatgaaatgaaggcagaaataaagatgttctttgaaaccaatgagaacaaagacacaacataccagaatctctgggacacattcaaagcagtgcatagagggaaatttatagcactaaatgcccacaagagaaagcagaaaagatctaaaattgacactctaacatcacaattaaaagaactagagaagcaagagcaaacacattcaaaagctagcagaaggcaagaaataactaagatcagagcagaactgaaggagatagagacacaaaaaacccttcaaaaaatcaatgaatccaggagctggttttttgaaaagatcaacaaaattgatagaccgctagcaagactaacaaagaagaaaggagagaagaatcaaatagatacaataaaaaatgataaaggagttatcaccactgatcccacagaattacaaactatcatcagagaatactataaacacctctatgcaaataaactagaaaatctagaagaaatggataaattcctggacatatacaccctcccaagactaaaccaggaagaagtcgaatccctgaatagaccaataacaggctctgaaattgcggcaataattaatagcctaccaaccaaaaaaagtccaggaccagatggatgcacagctgaattctaccagaggtacaaagaatagctggtaccattccttctgaaactattccagtcaatagaaatacagggaatcctccctaactcattttataaggccagcatcatcctgaaaccaaagactagcagagacacaacaacaacaaaaaagagaattttagaccaatatccctgatgaacattcatgcaaaaatcctaaataaaatactggcaaactgaatccagcagacaacaaaaagcttatccaccacaatcaagttggcttcatccctgggatgcaaggctgcttcaacatatgcaaatcaataaacctaatccgtcatataaacagaaccaaagacaaaaaccacatgattatctcaatagatgcagaaaaggccttcaacaaaattcaacagcccttcatgctaaaagctctcagtaaactaggtattgatggtaagagctatttatgacaaacgcacagccaatatcatactgaatgggcaaaaactggaagcattccctttgaaaactggcacaagacagggatgccctctctcaccactcctattcaacatagtttggatgttctggccagggcaatcaggcaggagaaagaaataaagggtatttaattaggaaaagaggaagtcaaattgtccctgtttgcagatgacatgattgtatatttagaaaaccccatcatctcagccccaaatctccttaagctgatcagcaacttcagcaaagtctcaggatacaaaatcaatgtgcaaaaaatcacaagcattcctatacaccaataagagacaaacagagagccaaatcatgagtgaactcccattcacaattgcttcaaagagaataaaatacctaggaatccaacttacaagggatgtgaaggacctcttcaaggagaactacaaaccactgctcaacaaagtaaaagaggacacaaacaaatggaagaacattccatgctcgtgggtaggaagaatcaatatcgtggaaatggccatactgcccaaggtaatttatagattcaatgccatcccccatcaagctaccaatgactttcttcacagaattggaaaaaactactttaaagttcatatggaaccaaaaaagagcccgcattgccaagacaatcctaagccaaaagaacaaagctggaggcatcacactacttgacttcaaactatactacaaggctacagtaaccaaaacagcatggtactggtaccaaaacagagatatagaccaatggaacagaacacagccctcagaaataataccacacatctacaaccatctgatctttgacaaacctgacaaaaacaagcaatggggaaaggattccctatttaataaatggtgctgggaaaactggctagccatacgtagaaagctgaaattcgatcccttccttacaccttatacaaaaattaattcaagatggatcaaagacttaaatgttagacccaaaaccataaaaaccctagaagaaaacctaggcaataccattaaggacataggcatgggcaaggacttcatgactaaaacaccaaaaacaatggcaacaaaagccaaaattgacaaatgggatctaattaaactaaagagcttctgcacagcaaaagaaactaccatcagagtgaacaggcaacctacagaataggagaaaatttttgcaatgtacccatctgacaaagggctaatatccagagtgtacaaagaacttaaacatttataagaaaaaaaatcaaacaaccccatcaaaaaatgggcaaagaatatgaatagaaatgtctcaaaagaagatatttatgcagccaacagatacatgaaaaaatgctcatcaccactggtcatcagagaaatgcaaatcaaaaccacaatgagataccatctcacaccagttagaatggcaatcattaaaaagtcaggaaacaacaggtgctggagaggatgtggagaaataggaatgcttttacgctgttggtgggagtgtaaactagttaaaccattgtggaagacagtgtggcgattcctcaaagatctagaagtagaaataccatttgacccagcaatcccattactgggtatacacccaaaggattataaatcatgctgctataaagacacatgcacatgtatgtttattgtggcgctattcacaatagcaaagacttggaatcaacccaaatgtccatcaatgatagactggattaagaaaatgtggcacatatacaccatggaatactatgcagccataaaaaaggatgagttcttgtcctttgtagggacatggataaagatagaaaccatcatttgagcaaactatcgcaaggactgaaggccaagcaccgcatgttctcactcatgagtgggaattgaacagtgagaacacctggacacagggcggagaacatcacacactggggcctgtcgtggggtgaggggacgggggaggaatggcattaagagaaatacctattgtaaatgacgagttaatgggtgcagcacaccaacatggcacatgtatatatgtgacaaacctgcacattgtgcacatgtaccctacaacttaaagtataataaaaaaaaaaga

SEQ ID NO: 394 - DNA, 291 bp, Homo sapiens
  source 1..291: mol_type = other DNA
acactgacatggtgatcatcccagggggtctgacctcacagcttcaggtgctggatgtcgtggtctacaagccactgaatgacagtgtgcgggcccagtactccaactggcttctggctgggaacctggcgctgagcccaaccgggaatgctaagaagccacccctgggcctctttctggagtgggtcatggtcgcgtggaatagcatctcaagtgagtccatcgtccaagggttcaagaagtgccatatctccagcaacttggaggaggaagacgatgtcctgtgggaaa

SEQ ID NO: 395 - DNA, 4524 bp, Homo sapiens
  source 1..4524: mol_type = other DNA
tgaaaaaaagctgaagtcaaattgctaactagaataaccaatgcagagaagaacatgaatgacctgatggagctgaaaagcatagcacaagaactttgtgaagaatacacaactatcaatagtcaaatcaatcaagtagaagaaaggatgtcagtgactgaagatcaacttaatgaaataaaaagagaagaccagattagagaaaaaagaataaaaagaaatgaacaaagcctccaagaaatatgggattatgtgaaaagacaaatctgcgtttgattggtgtacctgaaagtgacggggagaatgggaccaagtcggaaaacactcttcaggatattatccaggagaacttccccaaactagcaaaacagaccaacattcaaattcaggaaatacagagaacaccacaaagatgctcctcgagaagagcaaccccaagacacataatcattagattcaccaaggttgaaatgaacaaaaaaatgttaagggcagccagagagaaaggttgggttacccacaaagagaagcccattcagactaacagcagatatctttgcagaaaccctacaagccagaagagagtgggggccaatattcaacattcttaaagaaaagaattttcaacccagaatttcatatccagccaaactaagcttcataagtgaaggagaaataaaatcctttacagacaagcaaatgctgagggaatttgtcaccaccagacctgccttacgagagctcttgaaagaagcactaaatatgaaaaggaacaaccagtaccagccactgcaaaaacataccaaattgtaaagaacatcgacactatgaagaaactgcattaactaatgggcaaaacaaccagctaacatcataatgacaggatcaaattcacaactaacagtattaaccttaaatgtaaacaagctaaatgccccagttaaaagacatagactggcaaattgggtaaagagtcaagacccatcagtgtgctgtattcaggagacccatctcacttgcaaagacacatataggctcaaagtaaagggatggaggaatatttaccaagcaaatggaaagcaaaaaaagcaggagttgtaatccgaatctctgataaaacagactttaaaccaacaaagataaaaagagacaaagaagggcattacattaatggtaaagggaacaatgcacaagaagtactgactatcctaaatatgtatgcacccaatacaagcgcacccagattcataaagtacatgcttagaggcctacaaagtgacttagactcccacacaataaaagtgggagaatttaacaccccagtgtcaatattagacagatcaacgagatagaaaaataacaaggatattcaggacttgaactcagctctaaaccaagcagacctaatagacctccacagaactctccacctcaaatcaacagaatatacattcttctcagcacctcatcacacttattctaaaattgaccacataattggaagtaaaacactcctgaccaagtgcaaaagaatggaaattataacagtctctcagaccacagtgcaatcaaattagaactcaggattaataaactcactcaaaactgcacaaaatacatggaaactgaacaacctgctcctgaatgactactggataaataacaaaataaaggcagaaataaagatgttctttgaaaccaatgagaacgaagatacatcataccagaatctcagggacacatttaaagtagtctttagatggaaaattatagctctaaatgcccacaagagaaagcaggaaagatctaaaattgataccctaacatcaaaattgaaagaactagagaagcaacagcaaacaaattcaaaagctagcagaagacatgaaataactaacatcagagcagaactgaaggagatagagacacaaaaaacccttcaaaaaatcaatgaatccgtgaactggttttttgaaaaaatcatcaaaatagatagactgctagccagactaataaagaagaaaagagagaagaatcaaatagattcaataaaaaatgatatagaggatatcaccactgatcctgtagaaacacaaactaccgtcagagaatattttaaacacctctacgcaaataaactagaaaatctagaagaaatggataaattcctggacacatacatcctcccaagtctaagccaggaagaagtagaacccctgaacagaccaataacaggttctgaaattgaggcaataattaatagcttaccaaccaaaaaaagtccaggaccagacagattcacagccaaattctaccagaggtacaaagaggagctggtaccattccttctgaaactgttccaaacaatagaaaaagagggaatccttcctaactcataaaatgaggccagcatcatcctgataccaaaacctggaagagacacaacaaaaaaagaaaatttcaggccaatatccctgatgaacatctatgagaaaatccacaataaaatactggcaaaccgaatccagcagcacatcaaaaagcttatccatcacaatcaagtggcttcattgctggaatgcaaggctggttcaacatacacaaatcgataaacgtaattcatcacataaacaaaaccaatgacaaaaaacacatacctcaatagatgcagaaaaggccttcaataaaattcagcaccccttcatgctaaaaactctcaataaactaggtattgatggaacatatctcaaaataataagagcgatttatgacaaacccacagccaatatcatactgaatgggcaaaagcttgaagcattccctttgaaaaccggcacaagacaaggatgccctctctcaccactcctgttcaacatagtattggatgttctggccagggcaataaggcaagagaaagcaataaagggtattcagataggaagagaagaagtcaaattgtctctgtttacagatgacattattgtatatttagaaaaccccattgtcttagcccaaaacctccttatgctgataagcaacttcagcaaagtctcaggatacaaaatcagtatgcaaaaattacaagcattcttacacaccaataatggacagagagccaaattgtgcatcaactcccattcacagttgctactaagagaataaaatacctaggaatacaacttacaagggatatgaaggacctcttcagggagaactataaaccactgctcaaggaaataagagaggacacaaacaaatgggaaaacattccatgctcatggataggaagaatcagtatcacgaaaatggccatattgctgaaagtaatttatagattcaatgctatccccatcaagctaccattgactttcttcacagaattggaaaaaaactactttaaacttcatatggaaccaaaaaagagcctgcgtagccaagacaatcttgggcatgaagaacaaagctggaggcattatgctacctgacttctaactatactacaaggctacagtaaccaaaacagcatggtacttataccaaaacagatatgtagacaaaaggaacagaatgtaggcctcagaaataacaccacacagctacaaccatctgatctttgacaaacctgacacacacaagcaatggggaaaagattccctatttaataaatagtgttgggaaaactggctagccatatgcagaaaactgaaactggaccccttccttacaccttttacaaaaatcaactcaagatggatcaaagactttaataagacctaggaccataaaaatcttagaagaaatccttggcaataccattcaggacataggaatgggcaaagactttatgtctaaaacaccaaaagcaatggcaacaaaagccataattgacatatgggatctaattaaactaaagagtttctgcacagcaaaagaaactatcatcagagtgaacaggcaacctacagaataggagaaaatttttgcaatctatccatctgacaaagggctaatatctagaatctacaaagaatgtaaacaaacttacaagaaaaaaacaaacaaccccatcaaaaaatgggcaaaggatatgaacagacacttctcaaaagaagtgcagccaacagacatatgaaaaaatgctcctcatccctggtcattagagaaatgcaaatcaaaattacaatgagataccatcttacaccagttagattggtgattattaaaaagtcaggacatgacagatgctggagaggttgtggaaaaatgggaacgcttttacactgttggtgggagtataaattagttcaaccattgtggaaaacagtgtggtgattcctcaaggatctagaattggaaataccatttggcccagcaatcccattactaggcatatacccaaagggttataaatcattctgctgtaaagacagattcacatgtatgttaacgcagcactattcacaatagcacagacttggaaccaagccaaatgcccatcaatgatagacgaattaagaaaatgtg

SEQ ID NO: 396 - DNA, 307 bp, Homo sapiens
  source 1..307: mol_type = other DNA
ggctgggcgtggcagctcacacctgtaatcccagcactttgggaggccaaggcaggcagatcacttgaggtcaggagttcaacaccagcctggccaacatggtgaaaccccgcctcttctacaaatacaaaaattagccgggtgtgttggtgcacacctgtaatcccagctactcaggaggctgaggcaggagaatcgcttgaacccaggaggcggaggttgcagggagctgacatcaggcaaatgtactccagcctgggcaacagagcaagactccatctcaaaaaaaaaaaaaaaaaaaaagaag

SEQ ID NO: 397 - DNA, 1425 bp, Homo sapiens
  source 1..1425: mol_type = other DNA
aaaaacaacaaagggggagaaagagggattatgggacagcccatatacaattgaatctagcattattaactttaaattttttgagtctgcctaaaggccagatgttatcagcagctgaacagcatttacagaaaccggctgcaaagacagaagcagaacaactggtttggtggagagatccgataacaaaaagttgggaaataggtaaaataataacttggggtagaggttatgtttgtgtttctccaggccaaaatcaataaccaatttggataccatcaagacacctgaaaccttatcatgagccagatgctgaggaagagattccaggaggatcctgaggaccccctggttgcagccacgtcgaggctgacactgaggaggaccccaactgtcatgagcaacacccgtcgaacacagccatccacctggggacaaatcaagaagctgtcacagatgatggaagaaaacctgaggaaagcgggacaaccaatcacaatgagtaatttggtgatctatcacagtgatgatcaccattgccatgagtattccttcaacaagggctgacacagagaacaattatacttattgggcatatttatcaatcttgtctggcaataatgcctagatgatttcactctatggcacagttacacatgctttctgatctcagtatttaccataataaatctgctcctataattgaggcataccaccctcaaaaacctatttgtaaacaaaatagaacctggccagaaataatgaacaacttgtttagtaagattgcattgcagaacaggcagagatgctacgcaatgattcctatgggatcattgattggtcccctaaggggatgtttagcttaaattgcacctctcagtctgcatgccatggccacactagttcagatggtctgaacaaagtggtcagatggcagaaatgataagaagtatggcaaaagttcctattgtctggaaccatggcagtatagtgtcacctcaacctcaaatgatatggctcattgtaggagctaaacataaggatttgtggaaactattaatagctcttaataagatcaaaatttgggaaagaataaaaaaagcatctagaaagacactctacaaacttgtctttggatattacaaaattaaaagaacaaatatttaaagcatcccaggtacacctgaccttaatgacagaaactggagtgcttgaaggagctgcagacagattagcagctagtaacccattaaaatggataaaaacacttggaagctctgtgatttcaatgatgattgtgcttttaatcggtattgtttgtctttgtatagtgtgcagatgtggatcctgactcctgtgagaagtagctcacagtgtcaaagctgcctttgcttttatcgatttgcaaatcaaataagggggaca

SEQ ID NO: 398 - DNA, 6171 bp, Homo sapiens
  source 1..6171: mol_type = other DNA
ttccaagaaggccgaacaggaagacctctggtctgcagctcccagcatgatcatcccagaagacaggtgatttctatatttccaactgaggtacctggttcatctcactgggactggctggacagtgggtgcagcccacggagggcgagctgaagcagggcagggaggcacgaggggttggggtatttccctttcctagccaaaggaagccgtgacagactacctggaaaaacgggacactccccacccaaatactacgcttttcccaaggtcttagcaaccagcagacaaggtgattctctcccgtgcctggcttggcgggtcctacgcccacggagccttgctcaccgctagcacaacagtctgagattgatctgcgaggcagcagcctggctgggggaggggaatttgccaatgctgaggcttgagtaggtaaacaaagcagccaggaagcttgaactgggtggagcccaccgcagcccaactaggcctactgcctctagactccatctctgtgggcagggcatggttgaacaaaaggcagcaggcaacttctgcagacttaaatgtccctgtctgacagctccgaagagagcagtggttctcccagcatggtgtttgagctctgaaaatggacagactgcctcctcaagtgggtccgtgacccccatgtagcctaactgggagacacctcccagtaggggctgacagacacctcatataggtggctgcccctctgggacgaagcttccagaggaaagatcaggcagcaatattctctgttctgtaatatttgctgttctgcagcctccactggtgatacccaggcaaacagggtctggagtggaactccagcaaactccaacagacctgcagctgaggaacctgactgttagaaggaaaactaacaaacagaaaggaatagcatcaacatcaaccaaaaggtcatctacataaaaacccccatctgtaggtcaccaacatcaaagaccaaaggtagataaaaccacaaagatggggagaaaccagagcggaaaagctgaaaattctaaaaatcagaacacctcttctcctccaaaggatcgcagctccttgccagcaacagaacaaagctggacggagaacgactttgacaagttgacagaagtaggcttcagaaggtctgtaataacaaacttctccaaactaaaggaggatgtttgaacccatcacaaggaagctaaaaaccctgaaaaaagattagacgaatggctaagtagaataaacagtgtagagaagaccttaaatgacctgatggagctgaaaaccatggtgcgagaacttcgtgatgcaagcacaagcttcaatagccgattcgatcaagtggaagaaaggctatcagtgactgaagatcaaattagtgaaataaagcgagaagataaggttagagaaaaaagagtagaaagaaatgaacaaagcctccaagaaatacgggactgtgtgaaaacaccaaatctacatttcactggtgtacctgaaagtgacagggagaatggaaccaagttggaaaacactctttaggatattatccaggagaacttccccaacctagcaaggcaggccaacattcaaattcaggaaatacagagaacatccaaagatactccttgagaagaacaaccccaagacacataattgtcagattcaccaaggttgaaatgaaggaaaaagtgttaaggggagccagagagaaaggttgagttacctacaaagggaagcccatcagactaacagaggatctcttggcacaaaccttacaagctagaagaaagtgggggccaatattcaacattcttaaagaattttcaacccagaatttcatattcagccaaactaagcttcataagtgaaggagaaataaaatcctttacagacaagcaaatgctgagagattttgtcaccaccaggcctgccttacaatagctcctgaaggaagcagtaaacatggaaagaaacaactggtaccagccactacaaaaacatgccacattgtaaagaccatcgatgctatgaagaaactgcatcaattattgggcaaaataaccagcaaacgttgtaatgacaggagcaaattcacacctaacaatattaacctgaaatgtaaatgggctaaatgccccaattaaaagacacagagtggcaaattggataaagagtcaagacccatcagtgtgctgtattcaggagacccatctcatgtgcagagacacacataggctcaaaataaagggatggaggaagatctaccaagcaaatggaaaacaaaaaaaagcaggggttgcaatcctagtctctgataaaacaaactttaaactgacaaagatcaaaagagacaaagaaggccattacataatggtaaagggatcaattcaacaagaagagctaactatcctaaatatatattcatccaatacaggagcacccagattcataaagcaagtccttacagacctacaaagagacttaagactcccacacaataataatgggagactttaacaccccactgtcaatattagacagatcaatgagacaggttaacaaggatatccaggacttgaactcagctctgcatcaagcagacctaacagacatctacagaactctccaccccaaatcaacagaatatacattcttctcagcatcactttgcacttattccaaaaccgtccacatacttggaagtaaagcactcctcagcaaatgtaaaagaacagaaatcacaacaaactgtctctcagaccacagtgcaatcaaattagaactcaggattaagaaactcactcaaaaccgcacaactacatgggaactgaacaacctgctcctgaatgactattgggtgaataacaaaatgaaggcagaaataaagatgttctttgaaaccaatgagaacaaagacacaacataccagaatctctgggacacatttaaagcagtgtgtagagggaatgtgtagcactaaatgcccacaagagaaagcatgaaagatctaaaatcgacaccctaacctcacaattaaaagaactagagaagcaagaggaaacactttcaaaagctagcagaaggcaagaaataactaagatcagagcaggattgaaggagattgagacataaaaaaacccttcaaaaaaatcaatgaatccaggagctggttttttgaaaagatcaacaaaattgatagaccagtagcaagactaataaagaagaaaagagagaagaatcaaatagatgccataaaaaatgataaaggggatatcaccattgatcccacagaaatgcaaactaccatcagagaatactataaacacctctatgcaaataaaccagaaaatctagaagaaatggataaattcctggacacatacactcttccaagactaaacgaggagtacgttgaatctctgaatagaccaataacaggctctgaaattgaggcaataattaatagcctagcaaccaaaaaaagtccgggaccagatggattaacagccaaattctaccagaggtacaaagaggagctggtaccattccttctgaaactattccaatcaatagaaaaagagggaatcctccctaactcattttatgaggccaacatcatcctgataccaaagcctggcagagacacaacaaacaaagagaattttagaccaatatccctgaagaacatcaatgcaaaaatcctcaataaaatactggcaaaccaaatccagcagcacatcaaaaggcttatccaccacaatgcagtcagcttcatccctgggatgcaaggccagttcaatatacgcaaatcaataaacgtaatccatcacataaacaacaaacaatgaaaaccacgattatctcaatagatgcagaaaaggcctttgacaaaattcaacagcccttcatgctaaaaactctcgataaaccaggtattgatggaacgtatctcaaaataataagagctatttatgacaaacccacagccaatatcatcatactgaatgggcaaaaactggaagcattccccatactcaatgggcaaaaactggaagcattccctttgaaaaccggcacacgacagggatgtcctctcaccactcctattcaacatagtgttggaagttctggccagggcaatcaggcaagaaaaaaaaataaagggtgttcaattaggaaatgaggaagtcaagaggtccctgtttgcagatgacatgattgtaaatttagaaaatcccatcatctcagcccaaaatctccttaagctgataagcaacttcagcaaagtatcaggatacaaaatgaatgtgcaaaaaatcacaagcattcctatacaccaataacagacaaacagagagccaaatcatgaatgaactctcattcacaattgctacaaagagaataaaatacctaggaatccaacttacaagggacgtgaaggacctcttcaaggagaacaacaaaccactgctcaacgaaataaaagaggacacaaacaaatggaagaatattccatgctcacggataggaagaatcaatattgtgaaaatggctatgctacccaaggtaatttatagattcaatgccatccccatcaagctaccaataactttcttcacagaatttgaaaaaactactttaaaattcatatggaaccaaaaaagagcctgcattgtgaagacaatcctaagcaaaaagaacaaacctggaggcatcatgctacctgatttcagactatactacaaggctacagtaactgaaagagcatggtactggtaccaaaacagaaatacagaccaatggaacagaacagaggcctcagaaataatgccgcacatctacaaccatctgatctttgacaaacctgacaaaaacaagaaatggggaaaggattccctatttaataaatggtgctgggaaaactggctagccatatgtagaaagctgaaactggatcccttccttacaccttacacaaaaattgaagatggattaaagacttaaatgctagacctaaaaccataaaagccctagaagaaaatctaggcaataccattaaggacataggcatgggcaaggacttcatgactaaaacaccaaaagcaatggcaacaaaagccaaaatagacaaattaggatctaattaaactaaaaagcttctgcacggcaaaagaaactaccatcagagtgaacaggcaacctacagaatgggagaaaagttttgcaatctacccatctgacaaagggctaatatccagaacctacaaagaactcacagaaatttacaagaaaaaaacaaacaaccccatcaaaaagtgggcaaaggatatgaacagacacttctcaaaacaagacatctatgcagccaacagacacatgaaaaaatgctcaacatcactggtaatcagagaaatgcaaatcaaaaccacaatgagataccatctcacgccagttagaatggttaaaatggcaatcattaaaaaggcaggaaacaacagatgctggagaggatgtggagaaataggaacgcttttacactgtgggtgggagtgtaaattagttcaatcattgtggaaaacagtgtggcaattcctcaaggatctagaactagaactaccatttgacccagcaatcccattactgggtatatacccaaaggattataaatcatgctactataaagacacatgcacacatatgtttattgtggcactattcacaacagcaaagacttggaaccaacccaaatgtccatcaatgatagactggattaagaaaatgtggcacatatacaccatggaatactacgcagccataaaaaaggataagtttctgtcctttgcagggacgtggataaagctggaaaccgtcattctcagcaaactatcacaaggacagaaaaccaaacaccacatgttctcactcataggtgggaattgaacaatgagatcacttggacacagggcagggaacatcacacactggggcctgtcgtggggtggggggctgggggagggatagcattagagaaatacctaatgtaaatgatgagttgatgggtgcagcaaaccaatatggcacatgtatacctatgtatcaaacctgcatgttgtgcacatgtaccctgaaacttaaagtataatttaaaaa

SEQ ID NO: 399 - DNA, 1582 bp, Homo sapiens
  source 1..1582: mol_type = other DNA
gatgatggattgagcatacaaatataacttcatttccttctgcaattcactaacactataataaaataatttttttaaagagtcataaacctttaaggatgataagagtggtagaagagactatagaaacaaaattttggaagctgaaaagcaggtagatgagtggtaatgacttaggaggtctgagaaagtcagattccaaattagcagtggtgaaagctgaggacctgttcagtttacttggcagaatcttcagaagttttagaaattgctatctttaggaacctctggaagttgaggtatgggtagggctaaagtacagaggattgattgaggctggtttagaagcagtagaaactctagagcaattcccctgttgagtgccattgggttactttatccctctcctcaaacaaatgttggatgttcttagtacaacagaggttttctggattgggcaacataggcatagtttatggtggacatttcatattgaaaataaggagattaagtaaatttgtatttacttctgctcccagaatgctggcaactgggattaggacaggagattagaagattagaagagtcttgtctggagaatctgactctccccaagaagaaagaacttagagatgcagatatcagaggcttctcagtaaagggctcaggcagtcacactacagtgagatttgttatcagggggtttcacccaaggatttggagcttcacatcatgttttagttctcgtaattaaatatgaatggaaaatagaattgccagacatctgaggatcctcaaagcctctatagggtacagtcccaaacaaagaaagcaacccacatgaaacatacttttcagggaaagcataacttcgaaaaaaaaaaaaaacccaaaaaaaccaaatcacataaaactatcagtattttccagagatgagagaaaatcctgcaatcatgaagtcaggatgccataaaaaggagcaaaagagaatgaaaaaagttctttgaaattattatgatagctaaaatggaaacctcagtacaagattggaaagtagaaaagtggagcaaaaagccacagagagatagaaaagaggagatagaggagaaaattagaggaccaattgaggaggcctgaataataatctgatgaatgataggaattctaaaagagcactttgaaagaacagagggggaaaaaaatcatcaatacaagaaaatgttgtagaaccaaaggacacgagttcctagatagaaggggcctaccaagtacctaggtcagtggatgaaaatagattcgcatcaaggttcagaatcaatatattttgcaattcctaaaactctggggacaaacaagagaccccaaaaggttccaaagagtgtgaatacaaaggataagaatcagaaactctttggccttttcagcagcaactctagaagctagaagacagtgttcatattttgaaggaaaacagtttctaaactgaaattctatatccagacaaattcttaagtatgagggcgggataaggacatttttaggcatgaaggtgttaaaaattctgtaacctgtgggctacaaa

SEQ ID NO: 400 - DNA, 5912 bp, Homo sapiens
  source 1..5912: mol_type = other DNA
ggctggaaagatggtcaaataggaacagctctagtctgcagctcccagcaagatcaacaaagaaggcaggtgatttctgcatttccaactgaggtaccaggttcatctcactgggaatggttggacagtgagtgcagcccatggagggtgagccaaagtagggtggggtgtcacctcacctgggaagtgcaaggggtcggggaattttctcccctacccaagggaagccatgagggactgaatctgaggaaccatgcactccagccctgacactgcacttttcccatggtcttcaaaacccgtagaccaggagataccctccagtgcctaccccacaagggccctgggtttctgggtgaccattcatgcagacactgaactagctgcaagatttttttttccataccccagtggtgcctggaatgccagcgagacagaactattcacccccctgcaaaggaggctgaagccagggagccaagtggtctggttcagtgggtcctaaccccatggagcccagcaaactaacatccactggcttgaaattgttgctgccagcacagcagcagtctgagatcaacctgggatactccagcttcgttgtgggaggggagtccaccattgctgaggcttgagtaggtggtattaccctcacggtgtaaacaaagcagccaggaagttcgaactgggtggagcccaccgcagctcagctaggctgctatggccagactgcctttctagatatctcctctctgggaagggcatctctgaaaaaaaggcagcagccccagtcagggacttatagataaaaccctcatctctctgggacagagcaccagggggaaggggtggctgtgggcacagcttcaacagacttaaacgcccctgcccaatggctctgaagagagcaacagacctctcagcacaggtttgagctttgctaaaggtcaggctgcctcttcaagttagtccttgactctcatgtattctgactggaagacaactcccaggtggggccaacagacacctcatgcattagagctccaactggcatctggcatgtgcccctctgggatgaagattcaagaaaaaagaacaggcagcaatctttgctgttctgcagcctccgctagtgataacctaggcaaacagggtctggagtggaccgctaacaaactccagcagacccacagcagaggggcctgttagaaggaaaactaacaaaaaggaatagcatatccactcaaaaccccatcagaagatcaccaccaacaaaaaccaaaggtagataaatccatgaagatggggagaaaccagtgcaaaaatactaagtattccaaatcccagaacacctcttctccaaaggatcacaactcctcaacagcaagggaacaaaatgggatggagaatgagtttgatgaattgacataagtaggcttcagaaggtgggtaataacaaactcctctgagctaaaggagcatgttctaacccaatgcaaggaagctaagaatcttgaaaaaaggttagacaaattggtaactagaataaccagtttagagaagaatgtaaatgacccgatggagctgaaaaacacagcgtgagaacttcgtgaagcatacatgagtattagtagccaaatcgatcaaggggaataaaggatatgagagattaaagatcaacttaatgaaataaagcgagaaaaaagaatgaaaaggaatgaaaaaggcctgcaggaaatccaggactatgtgaaaagaccaaatctacacttgattggtgtacctgaaagtgacagggagaatggaaccaagctggaaaactctttaggatattatccaggagaacttcccaacctagcaagacaggccaacattcaaatttaggaaatacagagaacaccacaaagatactcctcgagcagagcaaccccaagacacataatcgtcagatacaacagggttgaaatgagggaaaaaatgttaagggcagccagagagaaaggtcatgttatccacaaagggaagctcatcagactaacagtagatctctctgcagaaagcctacaagccagaagagagtgggggccaatattcaacattcttaaaagaattttaaactcagaatttcatatccagccaaacagagcttcataactgaaggagaaataaaatcctttacagacaagcaaatgctgagagattttgtcaccaccaggcctgccttacaggagctcttgaaggaagcactaaacatggaaaggaacacctggtactagctgggtgttttgcaaaaacataccaaattgtaaagaccatcgacactaggaagaaactgcatctactaatgggcaaaataatcagctagcatcacaatgacaggatcaaattcatgcataacaatattaaccttaaatgtaaacaggctaaagaccccaattaaaagatacagactggaaaactggacaaagagtcaagacccatcagtgtgctgtattcaggagacccatctcacatggaaaaaaccacataggctcaaaataaagagagggaggaatatttaccaagcaaatggaaagaaaaaaaaaaagagcaggagttgcaatcctaatctctaataaaacagactttaaaccaacaaagatcaaaaaagacaaagaagggcattacatagtggtaaagggatcagtgcaacaagaagagcttatcatcataaatatatatgcacccaatacaggagcacctagattcataaagcaagttctaagagacctacaaagagacaaagactcccacacaataatagtgggagacttgaacaccccactgtcaatattagaccaatgagacagaaaatcaacgaagatattcaggactttaactccaagcggacctaatagacatctacagaactctccaccccaaatcaacagaacatacatgctttgcagcacctcattgcacttattctaaaattgaccacgtaattgaaggaaaacactcctcagcaaatgcaaaagaatggaaatcataacagtctctcagaccacagtgcaatcaaattagaactcagaattaagaaattcactcaaaactgcacaactacatggaaactgaacaacctgctcctgaatgactactgggtaaataacgaaatgaaggcagaaataaagatgttctttgaaaccaatgagaacaaagacacaatgtaccagaatctctgggacacactgaaagtggtgtgtagagggaaactgatagcactaaatgcccataagagaaagcagggaagatctaaaatcgacaccctaacatcacaattaaaagaactagagaagcaagagcaaacaaattcaaaagctagcagaagacaagaaataactaagatcagagtagaagtgaaggcgatagagacacaaaaaacccttcaaaaaaatcaatgaatccaggagctggatttttgaaaagatcaacaaaatagatagacttctagccaaacaaataaacaagaaaatagagaagaatcaaatagacacaagaaaaatgataaaggggatattaccacagatcccacagaaatacaaactaccatcagagaatacaataaacacctctacgcatatagaccagaaaatctagaagaaatggataaattcctggacacatacaccctcccaagtctaaaccaggaagaagtcaaatccctgaatagaccagtaacaagttctgaattgaggcactaattaacagcctatcaaacaaaaaaaaaagtccaggaccagagggattcacagccaaattctaccagaggtacaaagaggagctggtaccattccttctgaaattattccaaacaagacagggatgccctctctcaccactcctattcaacatagtgttggaagttctggccagggcaatcaggcaggagaaagaaataaagggtattcaattaggaaaagaggaagtcaaattgtccctgtttgcagatgacatgattgtatatctagaaaaccccatcgtctcagcccaaaatctccttaagctgataagcaacttcagtaaagtctcaggatacaaaatcaaggtgcaaaaatcacaagcattcctctataccaataacagacagagagccaaatcatgagtaaactcccattcacaattgcttcaaagagaataaaatacctaggaatccaacttacaagggatgtgaaggacctcttcaaggagaactacaaaccactgttcaacgaaataaaagaggatacaaacaaatggaagaacattccatgctcatggataggaagaatcaatatcgtgaaaatggccatactgcccaaggtaatttatagattcaatgccatccccatcaagctaccaatgactttcttcacagaattggaaaaaattaaagttcatatggaaccaaaaaagagcctgcattgccaagacaatcctaagccaaaagtacaaagctggaggcatcatgctacctgacttcaaactatactacaagactacagtaaccaaaaatcagcatggtactggtaccaaaacagagatatagaccaatggaatagaacagagccctcagaaataataccacacatctacaaccatctgatctttgacaaacctgacaaaaacaagaaatggggaaaggattccctatttaataaatggtgctgggaaaactggctagccatatgtagaaagctgaaactggatcccttccttacaccttttacaaaagttaattcaagatggattaaagacttaaatgttagatctaaaaccataaaaaccctagaagaaaacctaggtaataccattcgggacataggcatgggcaagaacttcatgtctaaaacaccaaaagcaatggcaacaaaagccaaaatggacaaatgggatctaattaaactaaagagcttctgcacagcaaaagaaactaccatcagagtgaacaggcaacctacagaatgggagaaaatttttgcaatctactcatctgacaaagggctaatatccagaatctacaaagaactcagacaaatttacaagaaaaaaacaaacaaccccatcaaaaagtgggtgaaggatatgaacagacacttctcaaaagaagacatttatgcagccaacagacacatgaaaaaatgctcatcatcactggccatcagagaattgcaaatcaaaaccacaatgggataccacctcacaccagttagaatggcgatcattaaaaagtcaggaaacaacaggtgctggagaggatgtggagaaataggaacacttttacactgttggtgggactgtaaactagttcaaccattgtggaagtcagtgtggcgattcctcagggatctagaactagaaataccatttgacccagccatcccattactgggtatgtacccaaaggattataaatcatgctactataaagacacatgcgcatgtatgtttactgtggcaccattcacaatagcaaagacttggaaccaacccaaatgtccatcaatgatagattggattaagaaaacatggcacatatacaccatggaatactatgcagccataaaaaatgatgagttcatgtcctttgtagggacatggatgaagctggaaaccatcattctcagcaaactatcacaaggacaaaaaaccaaacaccgcatgttctcactcataggtgggaactgaacaatgagaacacctggacataggaaggggaacgtcacacaccggggccggtcatgaggtggggggagggatagcattaggagatatacctaatgtaaatgatgagttattgggtgcagcataccaacatggcacatgtatacatatgtaacaaacctgcacgttgtgcacatgtaccctagaacttaaagtataataataaaaaaaaa

SEQ ID NO: 401 - DNA, 312 bp, Homo sapiens
  source 1..312: mol_type = other DNA
ggccaggcacggtggctcaagcctgtaatctcagcagtttgtgaggccaaggcaggatgatcacttgaggccagggggttgagaccagcctgggcaacatagtgagaccttttctcttcaaaatacttaaaaattagccaggcatggtggcacatgcctgttagtcccagctacttgggaggctgaggtaggaagatcacttgagcctgagaggtgaaggctgcagttagccctgatctcaccacactgcactctagcctgggcaacaaagcaagaccctgtctcaaaaaaaaaaaaaaaaaaaaaagaaca

SEQ ID NO: 402 - DNA, 296 bp, Homo sapiens
  source 1..296: mol_type = other DNA
gcctggcgcagtggctcatgcctgtaatctcagcattttgggaggccgaggctggcggatcccgaggtcaagagatcgagaccatcctagctaacacagtgaaaccccgtctctattaaaaatacaaaaaattagccaggcgtggtggcacacgcttatagtcccagctactcgggaggctgaggcaggagaatcgcttgaacatgggaggcagaggttgcagtgagccaagatcatgagcctgggtgacagagcgagactccatcttaaaacaaacaaacaaacaaacaaacaaa

SEQ ID NO: 403 - DNA, 1116 bp, Homo sapiens
  source 1..1116: mol_type = other DNA
acattgctttgacttaaaaattgaagtccattattctgaccgaaagttaatctgatgattaattggttaaacatactatcgttgctaattagcataattattatttacaataaagtgagctaaatagctacaactaaaatatatttaaattactgtgatattgtgatgctaaagatgtgttgaaattaatatcttgaatttctcaaccctgcctaaatgcctctgagagtaattagtataattaaaagtcactagagaaagtgaatgactctaataacaggataacaaattcttttcaagtcagatggtttccagttctttgctttcaacaaaattaatggtggcccatgaattgtcagctgatgaaggaacactatttggtttttggcatgcaactcggaaagaaaccaaacgattgattgacatgcttacaacaaaactactagcattctcacctatttatgtaaaaccatttctcagcacttgtatctgtgaaaacaacagaattgaaaatgaaccctgttaatctaccagtaggaactattcatccagataaatgaattaattggtgggtcagccccatctatctcactaagagatgtgttcccaatagaatttcaccttttataactgtgtgttatcaatatttgcaatcgtgtcattttgatccattatatactaaagatgattgtgatgattactcacttcagaagaattccagcgtagagccataaagttacacgaaattttttaaggtttactacatatgtcatatttttattgcgaagaagtgatcaagaaaaggttgttcaaacatcaaagtactatatttgaataacattttttgttagagtacaatctaaatatgttagagataataaaagaacaatgttgaagagctcattagtgtatgttttaatgcataatggtggttattcagttgttatgtagattctcttggatacattataaagagtgatttaacagttttatcttaaaatgtcagtatttacaatttgcaagaatttacatccattgcaactatttgaatttatgatggaaccagttagataccaacttaaatatataaggggtaaacactttttcaaaattttc

SEQ ID NO: 404 - DNA, 220 bp, Homo sapiens
  source 1..220: mol_type = other DNA
aagcatgagaaatggagtcttttggccagtattggggtgttcggaattcaagcgtatgagagagtggacggtagcgttgagaattttcatttgaagatctcgtcttaaccaccccaagtgtagtcagaggcggcgttttccctgcgagagtgccctggaacaaagcaaggatagcgtgggttagacatacctgaaatgaaagcgtcttactttatctagg

SEQ ID NO: 405 - DNA, 2608 bp, Homo sapiens
  source 1..2608: mol_type = other DNA
cagcatccaacttctccccatggagaggagggttttaaccccacatatagcatcctaacttaagattcttcatggtctggctcttaattcaccaactctgggagcagaggggattagacatacgcaagtctttctagaccacaggaaaaaagccgcagttagatatgggcatttaagcacttcagagctttcatcccccaggagcaatacatagaagggacttaagaaatgaagctccctgtttgcccccagaaggagtttatgacacactattccagcagcttcttgtttgtttggcttctaactaacttacattgggggagtttaggggcagtcaaatattaacctgccaccagcctgggaagagtttgtccacacattgagtccctcagctttcacagcttccaccgagggtctacatcctaaaactctcagctctgggagaagaagggattggcctatgcagatctctagacctctgcaggaaaaaagcagcagatttatacgggtgcagaagcacatcgctggactttattccccaggagaagtgcagagaaggggcttaaaatgtagccccctgtttttccccagaagggatttatgacatactcttctggtgactacttgccagcctggcttccaactaacttgcattgaggaattaaaggggtagacaaatattaacctgacaccaccctgataggcgtatgtccacacaacgagtgtcccaacttttacagctgtctcccaaaggattatatcctaaacatcttagctctgggagccaaggggactaggcatagatgagtttttctagatcacagaacaatgggggtggctttaaataggtatacaaataccttcagaggttatacctcctctgagcagtgagcagtgcagaaaggaagtaggaacatgtaggtcccatttgttctccagaaggggcttatagcacacacttccagcagctacttggcagcctggcttctaatgaacttacattcgggagctgatgggaaaacaaacagtagccctctagctaatctcagtgataaatccaaggctactcattcttcctggaaggagtttcgtcatgtctcaagtgccacaacttctataacttccacccaagggacaagctttgggagtcagtggagctttgcattcatgagtagccttagaccacagcaaacaaaaaggtggacgtacagtaggaccacttctacgagcttctcctcaggatcagagggtgcaacctgaatttgagtacaggtttttgccacagatcttctccttagcttagagcagacagagagtgggacataaatgctcaggctcagctgtgaagatagaaggaaatggaaaacccattcagcacctcaacatctccagctacatctagagattctggctcctactctacggtattgtgggggtattgatggaatgtggtacatcctaagctcgaggggaccatcaaaaaagagacagcagtctgaataaacacagagattagagagcaccttaaaatttttggctggatggattggtgagatccttctcctacatgaggccagtctgacaagtctgggagaggttatattcttatgtaatgcatagaagctaacacaaaaatcaaagaacagagaatctattcccaaaaaaaaaaaaaaaaaaagacaaatctccacaagtgaaatagagatatgtgatttacctgacagagaatctaagataatggttataaagatgttcactgaagtcaaaagaacaatgaaataacaaactaagaactttgacaaagagatagaaagtataaaatagtaccaaatagacatcaaagatgtgaaaaatactgtaactgaactaaaaaaattcaatggaggtattcaacagcagattcaatgaagcagaagaaaggatcgatgaaatcaaagacaggtcactgaaaaaaatccaatctgagcaaaaagaaaaaagaatgaaaaggatagtttaaagatagtttatgagacctgtgggacaccatcaagtggacaacaaatgcattattgatatgtcagaaaaagaagaaataaaatatattcaaagaaattatgtcagaaaacttcccaagccttatgtcagaaaacttcccaagcctggggaaggagatagaaagccaaatccaggaagcccaaagaacaccaaataagatgaacccgaaaagatccacaccaaagcaagttataatcaaattctaagttagagagagttgaaaacagcaagggaaaagtgaattgtcatatgtaagggaaccaccctaaggccagcagtggatttcacagcagaaaccttacagatcagaagagagtaggatgatacattcaaaaccctgaaaggaaaaaaaaaaaaaaaacaaaacactgccagcaaagcatactatacccagcaatcctgtctttcaaaaaacaaagggatgatcaagactttctcaaataaaaacagaatttatccccactagaccagccttacaagaaatgctaaagggaattcggaagagaacgttaatcagcaacgtgaaaacatgaaagtataaaactcactgaaagaggagatattacaactg

SEQ ID NO: 406 - DNA, 1300 bp, Homo sapiens
  source 1..1300: mol_type = other DNA
ccttcagttcctttccttctctcatctctgcttagagtccatgtacattattattaaaattacccatgtgaatatatccttaacaaacttgctcctctcttcctccagtgtagtcaccagactaaattccaacacggtattaaattcagttctccacttagtccttccctatacttgagctgctgaatgtggagaaggggacgtgaccacatggactggtttcacattaattatgaccactaaccttaagtgacctttaaaactgcccagcttaacttctgcatttccacaatgcattcatcctgcttcctcgtcagtttcgtaaatgacaatttcacatgttctttttttctcttttaaaggacagcctttcttcccacttttaactatagaacttgcttttaatttcactgatatatggacacagtcagacgagaactccttcatgctcctattaccacagctatcaacatatttacacattaatgtgaatagtctgccgcttttctgttccagtggatgactgttcatgtccttgtccagggtctgcttctctgtttgtagactggatcccatcccatccctctaatctactcaaggacatcactctaggaataatcttgtcctctttgttggatcaacaatttttgtctattgagtcattcccatcagcatataaatatactctattatctcccatttaagaatagtaaataattgaccctatatctctttctagatacttccctatttctctgcccttatttatagcagtgttcctcgagacacttgtctatgggcatttctatcttctttcattttcttgaatccattccagtcagggttctatccttaccatttcactgaaaccatttagtcagttcatttagtgctatctactttgccaaacctaattatcattggacttggttgataatttcctctttgttgaagtgcttttgtacgtattggtttttaggatatcacactcttagttctcctctcacttcattaattgctcccttttggtttcctttgctgattcttccttccatgtctctgaccaccaaacattggcataccccagtgcttaggccttggacctctttttctgtccagctatgctcaccatcaaataacatacatcggctggtaactcctgaatttctatctttagcccagacctttctcctgaactttagattctttaagtagcctgctggatcatctgcttttgaatgtttaggaggcatctcaaacttaaagtgtctaaaaccaaactttttccccctttaaacat

SEQ ID NO: 407 - DNA, 3984 bp, Homo sapiens
  source 1..3984: mol_type = other DNA
ccctatcttcagcctcctcaaacaaaacaattatcagccatgaattttgtatccagtgaaactaagcatcatatatgaggaaagataccgtcattttcagacaaacaaatgctgagagagttcaccattaccaagccactcctacaagaactgctaaaaggagctctaaattttgaaacaaatcctggaaacacatcaaaacagaacctctttaaagcataaatcacacaggacctataaaacaaaaatacaagttaaaaagcaaaaacaagaaacaaaaccaaagtacacaggcaacaaagagcatgatgaatgcaacagtacttcacatttcaatgctaacattgactgtaaatggcctaaatgctccacttaaaagatgcagaactacagaatggaaaagaactcaccaaccaactatctgctgccttcaggagactcacctaacacataaggactcacataaagtaaaggggtggaaaaaggcattcgtgcaaatggataccaaaaatgagcagaggtaggtattcatatatcagacaaaacaaactttaaagcaactacagttaaaagagataaagaagaacattatataatggtaaaaggccttgtccaacaggaaaatatcacaatcctaaacatatatgcacctaacactggcactcccaaaattataaaacaattactaatagacccaagaaatgagatagacagcaactcaataatagtgggggacttcagtactccactgacagcactagacaggtcatcaagacataaagtcaacaaagaaacaatggatttaaactataccttggaacaatggacttaacagacatatacagaacatttcatccaacaaccacagaatacacattctattcaacagcacatagaactttctcaaagatagaccacatgataggcgtcaatacatttaagaaaattgaaattatatcaagcactctctcagaccacagtggaataaaactggagatcaactccaaaaggaatcttctataccatgcaaatacgtggaaattaaataacctgctcctgaatgagcattgggtcaaaaatgaaatcaatatgaaaattaaaaaattcttcaaactaaacaacaataatgatacaacctatcaaaacctctgggatccagctaaggtggtgttaagaggaaagttcatagccctaaatgcctacatcaaaaaatctgaaagagcacaaacagacggtctaaggtcacacctcaaggaagaagagaaacaaaaacaaaccaaacccaaacccagcagaaaaaaggaaatagccaagatcggagcagaactaaatgaaattgaaacaacaacaacaacaaaaaccaaaagataaatgaaacagaaagttggttctttgaaaagacaaataaaattgatagaccattagcaacattaactaagaaaagaagagagaaaatccaaataacctcactaagaaacaaaacaggagatattacaactgacaccgctgaaatacaaaagatcattcaaaacttctatgaacacctttacacacatacactagaaaacctagaagagatggataaattactggaaaaagataaccctcctagcttaaatcaggaagaattagatactctgaacagaccaataacaagcagcgagattgaaatggtaatttaaaaattaccaacaacaaaagtccaggaccagacggtttcacagcagaattctaccagatattcaaagaaaaaatggtaccaatccttttgacattattccacaagacagggaaagaaggaacccttcctaattcattctatgaagccagcatcaccctaataccaaaaccaggaaaggatacaaccaaaaaagaaaattacagaccaatttccttaatgaacatagatgctaaaatccttaacaaaattctagctaaccgaatccaacaatatatcaaaaagataatccaccatgatcaagtggatttcataccagggatgcagggatggtttaacatacatgagtcaataaatgtgatacaccacataaacagaagtaaaaacaaaaatcacatgatcatctcaatagatgcagaaaaagcattcaacaaaatccagcatcgctttataattaaaactctcagcaaaattggcatacaggggacataacttaatgtaataaaagccatctatgacaaacccacagccaacataataatgaatgggcaaagttgaaaacattccctttgagaacgggaacaagacaaggatgcccattctcaccactcctcttcaacatagtactggaagtcctagccagagcagtcagacaagagaaagaataaagggcacccaaatcagtgaaaaggaagtcaaactgtcactgtttgctgatgatatgatggtttaccttgagaaccctaaggactcctccagaaagctcctagaactgatacaagaattcagcagtttccagatacaagattaatattcacaaatcagtagctcttctatacaccaacagcgaccaagctgagaatcaaatcgagaaatcaacccgttttacaatagctgcaaaaaaacaaaaaacaaaaaacaacaacgaaaaaaaacttaggaatatacctaataaaggagttgaaagacctctacaaggaaaactacaaaacactgttgaaataaatcgtagacaacacaaacaaatggaaacacatcccatgctcatggatgggtagaatcagtattgtcaaaatgaccatactgccaaatgcaatctacaaattcaacacaatccccatcaaaataccaacatcattcttcacagagttagaaaaaaaattctaaaattcatatggaaccaaaaaagagcccccatagccatagcaagactaagcaaaaggagcaaatctggaggcatcacactacctgatttcaaactataatataaggtcattgtcaccaaaacagcatggtactggtataaaaataagcacgtagaccaatggaacagaatagagaacccagaaataaacccaaatacttacagccaactgatattcaacaaagcaaacaaaatcataaagtggggaaagaacacccttttcaacaaatggtgctgggataattggctagccacatgtaggagaatgaaactgcatcctcatctctcactttatacaaaagtcaactcaagatggattaaggacttaaacctaagacgtgaaactataataattctacaagataccattggaaaaacccttctagatattggcttaggcaaggatttcatgaccaagaacccaaaagcaaacgcaataaaaacaaagataaatagctgggacctaattaatccaaagagatttgcatggcaaaaggaacagtcagcagagtaaacagacaacccacagagtgggagaaaatcttcacaatctatacctgacaaaggactaatatccagaatctacaatgaactcaaacaaatcagtaagaaaaaaacaatcccatcaaaaagtggactaagaacttgaatagacagttctcaaaagaagatatacaaatggccaacaaacatatgaaaaaatgctcaccatcactaatgatcagggaaatccaaatcaaaaccacaatgcggtactgcctcactcttgcaagaatgtccataatcaaaaaaattaaaaaatagtagatgttggcatggatgctgtgaacagggaacacttctacactgcttgtaggaatgtaaactagtacagccactatagaaaacagtgtggaaattccttaaagaactaaaagtagaactaccatttgatccagcaatcccactactggatatctacccagaggaaaataagtcattattcgaaaaagatactgcacacacatgtttatagcagcacaattcacaagttgcaaaatcgtggaaccaaactaattgtccatcagtcaatgagtggataaagaaactgtggtgtatatat

SEQ ID NO: 408 - DNA, 4840 bp, Homo sapiens
  source 1..4840: mol_type = other DNA
atgggactatcgcctatcaccaagcggtgagtaccatcagacctctttcacttgctattctgtcctatttttccttagaattcgggggctaaataccgggcacctgtcggccagttaaaagcaactagcatggctgccagactaaagacacgggtgtcaggctttctgggaaagggctctctaacaacccccgactcttcggagtgggagggttggtttgcttggaaccagcttccgcttttcccgtacttctgggctgagccgagggttgacagagaggaaagccattcagctccagggtcccaacaacaagtttgttgaccctgcggccatgagcggaattctcaaaggcatgtcgcccaagcgagactcacccatctatcctatctatcctgacccttgccccctgggtcctaatgcctgccagacaaacttcctctcacctctcttctccgaggctagtcccacttctaaaaatcactccgtctctggtgttttctagtttctcctataagaatgacttctagtataaactccaagactctgttaccttctttaggcaccctggctcaccaatcagaaagacataatgtttgcccaaagccccattgtaggggggactatctggaattttaggatccctcctcagactaacaggcctaacaaaagctattcctcaagtgaggatatgggaagcctcaaaaattgtatccttcctattcatataagtgaggacaaaaggtgtcactcttccaaccctggagatcccttccctccctcagggtatggacctccacttcatttttggggcataacatctttataggacaggggtaaagtcccagtactaacaggagaatgcttaggactctaacaggttttcaagaatgcattggtaagggccactaaatctgatttttctcagtcctccttgtggtctaggaggacaggcaagggtgcagattttcaagaatgcgtcggtaagagccactaaatccgaccttcctcggtcctccttgtggtctgggggaaaaactagtgtttctgctgctgcatcggagagcgcaattattctgatcagcagggtccagggaccgttgcaggttcttgggcagggggagaaacaaaacaaaccaaaactgtgggcggttttgtctttcagatgggaaacactcaggcatcaacaggctcacccttgaaatgcatcctcagccattgggaccaatttgacccacaaaccctgaaaaagaagcggctcatttttttctgcactacagcttggccccaatattctctctctgatagggaaaaatggccacctgagggaagtacaaattacaatactatcctgcagcttgaccttttctgtaagagggaaggcaaatggagtgaaataccttatgtccaagctttcttttcattgaaggagaatacacaactatgcaaagcttgcaatttacatcccacaggaggacctctcagcttacccccatatactagactccctatagctccccttcctatgaatgataatactcctctaatctcccctgcccagaaggaaataagcaaagaaatctccaaaggaccacaaacccccccgggctatcggttatgtccccttcaagcttgtagggggaggggaatttggcccaacccgggtacatgtccccttctccctctctgatttaaagcagatcaaggcagacctggggaagttttcagatgatcctggtaggtacataaatgtcctacagggtctagggcaaaccttcaacctcgcttggagagatgtcatgctgctgttagatcaaaccctggcctttaatgaaaacaatgcagctttagctgcagcccaagagtttggagatacttggtatcttagtcaagtaaatgataaaatgacagccgaagaaagtgataaattccctaccagtcagcaagctgtcctcaatatggatccccactgggaccttgaatgagatcatggggactggagtcataaacatctgttgacctgtgttctagaaggactaaggagaattaggaaaaagcccatgaattattcaatgatgtccaccataactcagggaaaggaagaaaatccttctgccttccttgagcagctacaggaggccttaagaaaatatactcccctgtctcccgaatcactcgagggtcaactgattctaaaagataagtttattacccaatcagccgcagatatcaggagaaagctccaaaagcaagccctgggccctgaacaaaatctggaggcattattaaacctggcaacctcagtgttctataatagggaccaagacgaacaagcccagaaggaaaagtgagatcagagaaaggctgcagccttagtcatggccctcagacaaacaaaccttggtggttcagagaggacagaaaatgaagcaggccaatcacccggtagggcttgttatcagtgtggtttattaggacactttaaaaaagattgtccaatgagaaacaagctgccccctcgtccacgtccactatgccgaggcaatcactggaaggtgcactgctccagaggatgaaggttctctgggtcagaagcccccaaccagatgatccaacaacaggattgagggtgcccggggcaagtgccagctcatgtcatcaccttcactgagccctgggtacagttaaccactgagggccaggaaattgacttcctcctggacactggcgcagccttctcagtgttaatctcatgtcttagatgactgtcctcaaggtcccttaccatccaaggaatcctgggacagcctgtaaccaggtatttctcccacctcctcagttgtaattgggagactttgctcttttcacatgcctttcttgttatgcctgaaagtcccacacccttattagggagggatatattagccaaggctggagctattatctacatgaatatggggaacaagttacccatttgttgtccccctacttgaggagggaatcaaccctgaagtctgggcattgaaaggacaatttggaagggcaaaaaatgcccgcccagtccaaatcagactgaaagaccccaccacttttccttatcaaaggcaatatcccttaagacctgaagctcataaaggattacaggatattgttaaacatttaaaagctcaaggcttagtaaggaaatgcagcagtccctgcaacaccccaattctaggagtacaaaaaccggtcagtggagactagtgcaagatcttagactcatcaatgaggcagtaattcctctatatccagttgtactcaacccctataccctgctctctcaaataccagaggaagcagaatggttcactgttctggacctcaaggatgtcttctgtattcccctgcactctgactcccagtttctctttgcctttgaggatcccacagaccacacgtcccaacttatgtggacagtcttgccccaagggcttagggatagccctcacctgtttggtcaggcactggcccaagatctaggccacttctgaagtccaggcactctggtccttcagtatttggatgatttacttttggctaccagttcggaagcttcatgccagcaggctactctagatttcttgaactttctagctaatcaagggtacaagtgtctaggtcgaaggcccagctttgcctatagcaggtcaaatatctaggcctaatcttagccagagggaccagggccctcagcaaggaatgaatacagcctatactggcttatcctcaccctaagacattaaaacagttgcggggttccttgaaatcactggcttttgctgactatggatcccaggatacagcaagatagccaggcccctctatactctaatcaaggagacccagagagcaaatactcatctagtagaatgggaaccagaggcagaaacagccttcaaaaccttaaagcaggcccttgtacaagctccagctttaagccttcccataggagaaaacttctctttatacatcacagagagagtagggatagctctttgagtccttactcagactcgtgggacaaccccacaaccagtggcatacctaagtaaggaaattgatgtggtagcaaaaggctggcctcactgtttacaggtagttgtggtggtggctgtcttagtgtcaggagctgtcaaaataatacaaagaaaggatctcactatctggactactcatgatgtaaatggcatactaggtgccaaaggaattttatggctatcagacaactgcctacttagataccaagcgctactccttgagggactggtgcttcaaataggtacgtgcatggccctcaaccctgccacttttctcccagaggatggggaaccaatcgagcatgactgccaacaaattatagtccagacttatgccgcccgagatgatctcttagaagtccccttagctaatcctgaccttaacctatataccgatggaagttcatttgtggagaatggggtatgaagggcaggttatgccatagataatgatgtaactgtacttgaaagtaagtctcttcccccagggaccagtgcccagttagcagaagtagtggcacttacttgagccttagaactgggaaagggaaaaagaataaatgtgtatacaaatagcaagtatgcttatctaatcctacatgctcatgctgcaatatggaaagaaagggagttcctaacctctgggggaacccccattaaataccacaaagaaattatggagttattgcacgcagtgcaaaaacccaaggaggtggcagtcttacactgccgaagccatcaaaaaggggaaggaaaggggagaa

SEQ ID NO: 409 - DNA, 6054 bp, Homo sapiens
  source 1..6054: mol_type = other DNA
gggaggagccaagatggccgaataggaacagctccggtctacagctcccagcgtgagcgacgcagaagacggtgatttctgcatttccatctgaggtaccgggttcatctcactagggagtgccagacagtgggcgcaggccagtgtgtgtgcgcaccgtgcgcgagccgaagcagggcgaggcattgcctcacctgggaagcgcaaggggtcagggagttccctttccgagtcaaagaaaggggtgacggacgcacctggaaaatcgggtcactcccacccgaatattgcgcttttcagaccggcttaagaaacggcgcacctcgagactatatcccacacctggctcggagggtcctacgcccacggaatctcgctgattgctagcacagcagtctgagatcaaactgcaaggcggcaacgaggctgggggaggggcgcccgccattgcccaggcttgcttaggtaaacaaagcagccgggaagctcgaactgggtggagcccaccacagctcaaggaggcctgcctgcctctgtaggctccacctctgggggcagggcacaaacaaaaagacagcagtaacctctgcagacttaagtgtccctgtctgacagctttgaagagagcagtggttctcccagcacgcagctggagatctgagaacgggcagactgcctcctcaagtgggtccctgactcctgacccccgagcagcctaactgggaggcaccccccagcaggggcacactgacacctcacacggcagggtattccaacagacctgcagctgagggtcctgtctgttagaaggaaaactaacaaccagaaaggacatctacaccgaaaacccatctgtacatcaccatcatcaaagaccaaaagtagataaaaccacaaagatggggaaaaaacagaacagaaaaactggaaactctaaaacgcagagcgcctctcctcctccaaaggaacgcagttcctcaccagcaacagaacaaagccggatggagaatgattttgacgagctgagagaagaaggcttcagacgatcaaattactctgagctacgggaggacattcaaaccaaaggcaaagaagttgaaaactttgaaaaaaatttagaagaatgtataactagaataaccaatacagagaagtgcttaaaggagctgatggagctgaaaaccaaggctcgagaactacgtgaagaatgcagaagcctcaggagccgatgcgatcaactggaagaaagggtatcagcaatggaagatgaaatgaatgaaatgaagcgagaagggaagtttagagaaaaaagaataaaaagaaatgagcaaagcctccaagaaatatgggactatgtgaaaagaccaaatctacgtctgattggtgtacctgaaagtgatgtggagaatggaaccaagttggaaaacactctgcaggatattatccaggagaacatccccaatctagcaaggcaggccaacgttcagattcaggaaatacagagaacgccacaaagatactcctcgagaagagcaactccaagacacataattgtcagattcaccaaagttgaaatgaaggaaaaaatgttaagggcagccagagagaaaggtcgggttaccctcaaaggaaagcccatcagactaacagcggatctctcggcagaaaccctacaagccagaagagagtgggggccaatattcaacattcttaaagaaaagaattttcaacccagaatttcatatccagccaaactaagcttcataagtgaaggagaaataaaatactttatagacaagcaaatgttgagagattttgtcaccaccaggcctgccctaaaagagctcctgaaggaagcgctaaacatggaaaggaacaaccggtaccagccactgcaaaatcatgccaaaatgtaaagaccatcgagactaggaagaaactgcatcaactaatgagcaaaatcaccagctaacatcataatgacaggatcaaattcacacataacaatattaactttaaatataaatggactaaattctgcaattaaaagacacagactggcaagttggataaagagtcaagacccatcagtgtgctgtattcaggaaacccatctcacgtgcagagacacacataggctcaaaataaaaggatggaggaagatctaccaagccaatggaaaacaaaaaaggcaggggttgcaatcctagtctctgataaaacagactttaaaccaacaaagatcaaaagagacaaagaaggccattacataatggtaaagggatcaattcaacaagaggagctaactatcctaaatatttatgcacccaatacaggagcacccagattcataaagcaagtcctcagtgacctacaaagagacttagactcccacacattaataatgggagactttaacaccccactgtcaacattagacagatcaacgagacagaaagtcaacaaggatacccaggaattgaactcagctctgcaccaagcagacctaatagacatctacagaactctccaccccaaatcaacagaatatacatttttttcagcaccacaccacacctattccaaaattgaccacatagttggaagtaaagctctcctcagcaaatgtaaaagaacagaaattataacaaactatctctcagaccacagtgcaatcaaactagaactcaggattaagaatctcactcaaagccgctcaactacatggaaactgaacaacctgctcctgaatgactactgggtacataacgaaatgaaggcagaaataaagatgttctttgaaaccaacgagaacaaagaaaccacataccagaatctctgggatgcattcaaagcagtgtgtagagggaaatttatagcactaaatgcctacaagagaaagcaggaaagatccaaaattgacaccctaacatcacaattaaaagaactagaaaagcaagagcaaacacattcaaaagctagcagaaggcaagaaataactaaaatcagagcagaactgaaggaaatagagacacaaaaaacccttcaaaaaatcaatgaatccaggagctggttttttgaaaggatcaacaaaattgatagaccgctagcaagactaataaagaaaaaaagagagaagaatcaaatagacacaataaaaaatgataaaggggatatcaccaccgatcccacagaaatacaaactaccatcagagaatactacaaacacctctacgcaaataaactagaaaatctagaagaaatggatacattcctcgacacatacactctcccaagactaaaccaggaagaagttgaatctctgaatagaccaattacaggctctgaaattgtggaaataatcaatagtttaccaaccaaaaagagtccaggaccagatggattcacagccgaattctaccagaggtacatggaggaactggtaccattccttctgaaactattccaatcaatagaaaaagagggaatcctccctaactcattttatgaggccagcatcattctgataccaaagccgggcagagacacaaccaaaaaagagaattttagaccaatatccttgatgaacattgatgcaaaaatcctcaataaaatactggcaaaccgaatccagcagcacatcaaaaagcttatccaccatgatcaagtgggcttcatccctgggatgcaaggctggttcaatatacgcaaatcaataaatgtaatccagcatataaacagagccaaagacaaaaaccacatgattatctcaatagatgcagaaaaagcctttgacaaaattcaacaacccttcatgctaaaaactctcaataaattaggtattgatgggacgtatttcaaaataataagagctatctatgacaaacccacagccaatatcatactgaatgggcaaaaactggaagcattccctttgaaaaccggcacaagacagggatgccctctctcaccgctcctattcaacatagtgttggaagttctggccagggcaatcaggcaggagaaggaaataaagggtattcaattaggaaaagaggaagtcaaattgtccctgtttgcagacgacatgattgtttatctagaaaaccccattgtctcagcccaaaatctccttaagctgataagcaacttcagcaaagtctcaggatacaaaatcaatgtacaaaaatcacaagcattcttatacaccaacaacagacaaacagagagccaaatcatgggtgaactcccattcacaattgcttcaaagagaataaaatacctaggaatccaacttacaagggatgtgaaggacctcttcaaggagaactacaaaccactgctcaaggaaataaaagaggagacaaacaaatggaagaacattccatgctcatgggtaggaagaatcaatatcgtgaaaatggccatactgcccaaggtaatttacagattcaatgccatccccatcaagctaccaatgactttcttcacagaattggaaaaaactactttaaagttcatatggaaccaaaaaagagcccgcattgccaagtcaatcctaagccaaaagaacaaagctggaggcatcacactacctgacttcaaactatactacaaggctacagtaaccaaaacagcatggtactggtaccaaaacagagatatagatcaatggaacagaacagagccctcagaaataatgccgcatatctacaactatctgatctttgacaaacctgagaaaaacaagcaatggggaaaggattccctatttaataaatggtgctgggaaaactggctagccatatgtagaaagctgaaactggatcccttccttacaccttatacaaaaatcaattcaagatggattaaagatttaaacgttaaacctaaaaccataaaaaccctagaagaaaacctaggcattaccattcaggacataggcgtgggcaaggacttcatgtccaaaacaccaaaagcaatggcaacaaaagacaaaattgacaaatgggatctaattaaactaaagagcttctgcacagcaaaagaaactaccatcagagtgaacaggcaacctacaacatgggagaaaattttcgcaacctactcatctgacaaagggctaatatccagaatctacaatgaactcaaacaaatttacaagaaaaaaacaaacaaccccatcaaaaagtgggcgaaggacatgaacagacacttctcaaaggaagacatttatgcagccaaaaaacacatgaagaaatgctcatcatcactggccatcagagaaatgcaaatcaaaaccactatgagatatcatctcacaccagttagaatggcaatcattaaaaagtcaggaaacaacaggtgctggagaggatgcggagaaataggaacacttttacactgttggtgggactgtaaactagttcaaccattgtggaagtcagtgtggcgattcctcagggatctagaactagaaataccatttgacccagccatcccattactgggtatatacccaaatgagtataaatcatgctgctataaagacacatgcacacgtatgtttattgcggcactattcacaatagcaaagacttggaaccaacccaaatgtccaacaatgatagactggattaagaaaatgtggcacatatacaccatggaatactatgcagccataaaaaatgatgagttcatatcctttgtagggacatggatgaaattggaaaccatcattctcagtaaactatcgcaagaacaaaaaaccaaacaccgcatattctcactcataggtgggaattgaacaatgagatcacatggacacaggaaggggaatatcacactctggggactgtgggggactgtggtggggtcggaggaggggggagggatagcattgggagatatacctaatgctagatgacacattagtgggtgcagcgcaccagcatggcacatgtatacatatgtaactaacctgcacaatgtgcacatgtaccctaaaacttagagtataataaaaaaacaaaacaaaacaaaacaaaacaaaac

SEQ ID NO: 410 - DNA, 1469 bp, Homo sapiens
  source 1..1469: mol_type = other DNA
cccagctcctctcacttacagaaagacagtgctcctgtagatgtacctactttctctccacatcattgacttctccctttctgctggattctattaatatacaaacatgtcctgccatctcccattcttagacaaaattctcccatttcccacttccccctgaagccacataccctttttctgctcctctttacagcaatgcttctcaaaaaccttgtgcatatgtcttctcctctgttctctcttgagtcctttccagtctggattcatctccaccactctactaaaactgcttttcacgggatcaccaacaaccttcatagtccaaatccaaaggtcattttttgttcctcactttttttttattcatcccagcatctgacataattgatcagtttttcttcccagagtctcctctacccttctgttggtcattcttctttgctgaccagcatttagattccattcctgtctccttccatctttccagactcttagactttgggactggggcacctgctttggacctcttctctttattagctgtgctttccctaggggggttgatttcacctacctttgtggtctgaaaaatcatctattctctgatgactcttaatctgtatctttagcctcagcctctcccaactctggacccaaatattccagctctttacttaatgtcttcatttgcattgaaaatgtcacatgtaccaagaacaacacttgattgtgtcccatttccaacctattccctcccaggatccccatttcagtaaaaggcaactccatcctttcagttgttcagactggaaatgtagcagtgagtcatcctgtatgtctctgtttttcacacttctcatcaacctcaccaggaaatctcaccaattccactgctgccaccctaatctaactaaccaaccatcgcttctcacctggatcagtgggaacagcctcgcaacccctttccttgcttccatcacgtgcctccctgcagcctattcacaggatagccaggagtgccccctttcaagtgttaatcagatcctgtcacccctctgctcaaagctctccactggcttttcatctcctttgccctgacctataagccccttgatgattgggtgccttccacctctgatcttgtcacttgtcctctccaccacccaccagccccctttattgtgctcaaacccacaccccagggccttcacacctgctgatctcttcgtctgtccaccttacgtaaaatcacatccccattgctctccactctcttgcctagctttttttttcatgatgctcattcttcatttattatctttttcttgtactccctctctcattccatctctatgcaagcatcacaagagcacaatccttgcttttcttgttcacagttatattcccagcatcttagaatagtgactgacacatagtaggagtttaataaatattttttgaatgaa

SEQ ID NO: 411 - DNA, 206 bp, Homo sapiens
  source 1..206: mol_type = other DNA
tcctcctactctgttgaagctgctcttgttatgcttgcctgtgtgccttgcatctccacatccactgcacactttgctgtcttcttactccacctctcagccacgttgaacacagatggcaacctcctctttcttcaaacatgctgctcttgtgacgcttgtgatgccatagactactgcttctcagcattcttgtgttttcctcc

SEQ ID NO: 412 - DNA, 125 bp, Homo sapiens
  source 1..125: mol_type = other DNA
tttaattgtttggccttcattcctcttctacagtgctccctgcaatcagtactggtgctgtacatatttgctagcttcgtacatacggcacgaagtagatgctcagtaaatgttggttgactgag

SEQ ID NO: 413 - DNA, 2068 bp, Homo sapiens
  source 1..2068: mol_type = other DNA
taggaataggaaccagacaaggattcctactcctcttcaacatagcacagaaagtcctagacagagcaatcaggtaagagaaataaattaaagggatccaaataggaaaataagtcaaattatctctctttactgacaatatgattatatacctagaaaacccaaaagactccaccaaaaacctgataaacaacttcagtaaagtgtcagcatacaaaatcaatgtaaaaaatctgtaggatttctacaccaataacattcaagctgagagtcaaaccaagaatataatcccatttacaaaagccacaaaaatatataaaataccaaggagtacatccaatcatggaggtgacggagctctccaagaactacgaaacactgctgaatgaaataacagatgacacaaatggaaatacattccatgctcgtcaattggaaaaattaatataattaaaatagcaatactacccaaagcaatctatagattcaagcctgttcttatcaatcaacatcatttttcatagaattagaaacaaactattctaaagttcacatagaaccaaaaaggaacctgaatagccaaagtaatcctaagcaaaaagaacaaagcttgaggcatcacatgatccaacttcaaatgatattataaatctacagtaaccaaaacaacatcgtactggtacaaaaacagacatacagaccaatggaacagaagagagaacccagaaataaacccacacacctacaactgtctggtcttcaacaaaatcaacaaaaataagcaatggggaaaggacttcctattcaataaatggtactgggatagtttgctggccatatgcagaagaatgaaactagacccctaccttgaaccatatacaaaaattaatgtgagatggattaaatatttagatgtaaacctcaaactataaaaaacctagaaaaaattctaggaaatgccattttggacactagtcttggcaaatagtttatgactaagtctttcctcaaaagtaatttcaataaaacaaaaaacaagtgagacctagctaaactaaatagattttgcacaacaaaagaaactatcaacaaattaaacaacaacacacagaataggagaaaatatttgcaactatgcatccaacaaaggtccaatatctgaaatccaaaagtatcttatagaactcaacaagcaaaacccagataaccccattaaaaagtgggcaaaggacatgagcagacacttctgaaaagaagacattcaaacagcgaaaaaagtatgaataaatgctccataccgttaatcatcagaggcatgaaaatcaaacccataatgaaataccatctcacactagtcagaatgacttattgaaaagaccaaaaataacagatgatggtgaggctgcagagaaaagggaagacttatatactgttggtggaaaagtaaattagttcagccactgtggaaagcagtttggagacttctcaaagaacttaaaacggaactacaatttattccagctatcccattagtatcccaaagaaaaacaaatcattctaccaaaaggacacatgcactcatttgttcatcacagcactattcacagtagcaaagacatggaatcaaactaggtgcccattatcagtggattgaatacagaaaatgtgaataaagaaaatattttccatatactgtgaaataccatggaatactatgcagccataaaaagaacaaaatcatgtcctttgcagcaacatgggtgcagctctaggtcatcatcctaaatgaaatgatgaaggaacaaaaaccaaaatattgtgattctcactgacagctaaacattgggtacctatggacacaaagatgggaaaaatagacactgaagactactagagaggggagagggggaagaggaaagagctgaaaaaccactctattgggtactgtgctcactatttggatgatgggatcattcataacgcaaacatgagtatcatgcaatatacccatgtaacaaacctatgtatgtatcccttgaatctaaaataaaagttgaaattataaaaa

SEQ ID NO: 414 - DNA, 6029 bp, Homo sapiens
  source 1..6029: mol_type = other DNA
ggggaggagccaagatggccgaataggaacagctccggtctacagctcccagcgtgagcgacgcagaagacggtgatttctgcatttccatctgaggtaccgggttcatctcactagggagtgccagacagtgggcgcaggccagtgtgtgtgcgcaccgtgcgcgagccgaagcagggcgaggcattgcctcacctgggaagcgcaaggggtcagggagttccctttccgagtcaaagaaaggggtgacggacgcacctggaaaatcgggtcactcccacccgaatattgcgcttttcagaccggcttaagaaacggcgcaccacgagactatatcccacacctggctcggagggtcctacgcccacggaatctcgctgattgctagcacagcagtctgagatcaaactgcaaggcggcaacgaggctgggggaggggcgcccgccattgcccaggcttgcttaggtaaacaaagcagccgggaagctcgaactgggtggagcccaccacagctcaaggaggcctgcctgcctctgtaggctccacctctgggggcagggcacagacaaacaaaaagacagcagtaacctctgcagacttaagtgtccctgtctgacagctttgaagacaccagtggttctcccagcacgcagctggagatctgagaacgggcagactgcctcctcaagtgggtccctgactcctgacccccgagcagcctaactgggaggcaccccccagcagaggcacactgacacctcacacggcagggtattccaacagacctgcagctgagggtcctgtctgttagaaggaaaactaacaaccagaaaggacatctacaccgaaaacccatctgtacatcaccatcatcaaagaccaaaagtagataaaaccacaaagatggggaaaaaacagaacagaaaaactggaaactctaaaacgcagagcgcctctcctcctccaaaggaacgcagttcctcaccagcaacagaacaaagctggatggagaatgattttgacgagctgagagaagaaggcttcagacgatcaaattactctgagctacgggaggacattcaaaccaaaggcaaagaagttgaaaactttgaaaaaaatttagaagaatgtataactagaataaccaatacagagaagtgcttaaaggagctgatggagctgaaaaccaaggctcgagaactacgtgaagaatgcagaagcctcaggagccgatgcgatcaactggaagaaagggtatcagcaatggaagatgaaatgaatgaaatgaagcgagaagggaagtttagagaaaaaagaataaaaagaaatgagcaaagcctccaagaaatatgggactatgtgaaaagaccaaatctacgtctgattggtgtacctgaaagtgatgtggagaatggaaccaagttggaaaacactctgcaggatattatccaggagaacttccccaatctagcaaggcaggccaacgttcagattcaggaaatacagagaacgccacaaagatactcctcgagaagagcaactccaagacacataattgtcagattcaccaaagttgaaatgaaggaaaaaatgttaagggcagccagagagaaaggtcgggttaccctcaaaggaaagcccatcagactaacagcggatctctcggcagaaaccctacaagccagaagagagtgggggccaatattcaacattcttaaagaaaagaattttcaacccagaatttcatatccagccaaactaagcttcataagtgaaggagaaataaaatactttatagacaagcaaatgttgagagattttgtcaccaccaggcctgccctaaaagagctcctgaaggaagcgctaaacatggaaaggaacaaccggtaccagccgctgcaaaatcatgccaaaatgtaaagaccatcgagactaggaagaaactgcatcaactaatgagcaaaatcaccagctaacatcataatgacaggatcaaattcacacataacaatattaactttaaatataaatggactaaattctgcaattaaaagacacagactggcaagttggataaagagtcaagacccatcagtgtgctatattcaggaaacccatctcacgtgcagagacacacataggctcaaaataaaaggatggaggaagatctaccaagccaatggaaaacaaaaaaaggcaggggttgcaatcttagtctctgataaaacagactttaaaccaacaaagatcaaaagagacaaagaaggccattacataatggtaaagggatcaattcaacaagaggagctaactatcctaaatatttatgcacccaatacaggagcacccagattcataaagcaagtcctgagtgacctacaaagagacttagactcccacacattaataatgggagactttaacaccccactgtcaacattagacagatcaacgagacagaaagtcaacaaggatacccaggaattgaactcagctctgcaccaagcagacctaatagacatctacagaactctccaccccaaatcaacagaatatacatttttttcagcaccacaccacacctattccaaaattgaccacatagttggaagtaaagctctcctcagcaaatgtaaaagaacagaaattataacaaactatctctcagaccacagtgcaatcaaactagaactcaggattaagaatctcactcaaagccgctcaactacatggaaactgaacaacctgctcctgaatgactactgggtacataatgaaatgaaggcagaaataaagatgttctttgaaaccaacgagaacaaagacaccacataccagaatctctgggacgcactcaaagcagtgtgtagagggaaatttatagcactaaatgcctacaagagaaagcaggaaagatccaaaattgacaccctaacatcacaattaaaagaactagaaaagcaagagcaaacacattcaaaagctagcagaaggcaagaaataactaaaatcagagcagaactgaaggaaatagagacacaaaaaacccttcaaaaaatcaatgaatccaggagctggttttttgaaaggatcaacaaaattgatagaccgctagcaagactaataaagaaaaaaagagagaagaatcaaatagacacaataaaaaatgataaaggggatatcaccaccgatcccacagaaatacaaactaccatcagagaatactacaaacacctctacgcaaataaactagaaaatctagaagaaatggatacattcctcgacacatacactctcccaagactaaaccaggaagaagttgaatctctgaatcgaccaataacaggctctgaaattgtggcaataatcaatagtttaccaaccaaaaagagtccaggaccagatggattcacagccgaattctaccagaggtacaaggaggaactggtaccattccttctgaaactattccaatcaatagaaaaagagggaatcctccctaactcattttatgaggccagcatcatactgataccaaagccgggcagagacacaaccaaaaaagagaattttagaccaatatccttgatgaacattgatgcaaaaatcctcaataaaatactggcaaaccgaatccagcagcacatcaaaaagcttatccaccatgatcaagtgggcttcatccctgggatgcaaggctggttcaatatacgcaaatcaataaatgtaatccagcatataaacagagccaaagacaaaaaccacatgattatctcaatagatgcagaaaaagcctttgacaaaattcaacaacccttcatgctaaaaactctcaataaattaggtattgatgggacgtatttcaaaataataagagctatctatgacaaacccacagccaatatcatactgaatgggcaaaaactggaagcattccctttgaaaaccggcacaagacagggatgccctctctcaccgctcctattcaacatagtgttggaagttctggccagggcaatcaggcaggagaaggaaataaagggtattcaattaggaaaagaggaagtcaaattgtccctgtttgcagacgacatgattgtttatctagaaaaccccatcgtctcagcccaaaatctccttaagctgataagcaacttcagcaaagtctcaggatacaaaatcaatgtacaaaaatcacaagcattcttatacaccaacaacagacaaacagagagccaaatcatgggtgaactcccattcacaattgcttcaaagagaataaaatacctaggaatccaacttacaagggatgtgaaggacctcttcaaggagaactacaaaccactgctcaaggaaataaaagaggatacaaacaaatggaagaacattccatgctcatgggtaggaagaatcaatatcgtgaaaatggccatactgcccaaggtaatttacagattcaatgccatccccatcaagctaccaatgactttcttcacagaattggaaaaaactactttaaagttcatatggaaccaaaaaagagcccgcattgccaagtcaatcctaagccaaaagaacaaagctggaggcatcacactacctgacttcaaactatactacaaggctacagtaaccaaaacagcatggtactggtaccaaaacagagatatagatcaatggaacagaacagagccctcagaaataatgccgcatatctacaactatctgatctttgacaaacctgagaaaaacaagcaatggggaaaggattccctatttaataaatggtgctgggaaaactggctagccatatgtagaaagctgaaactggatcccttccttacaccttatacaaaaatcaattcaagatggattaaagatttaaacgttaaacctaaaaccataaaaaccctagaagaaaacctaggcattaccattcaggacataggcgtgggcaaggacttcatgtccaaaacaccaaaagcaatggcaacaaaagacaaaattgacaaatgggatctaattaaactaaagagcttctgcacagcaaaagaaactaccatcagagtgaacaggcaacctacaacatgggagaaaatttttgcaacctactcatctgacaaagggctaatatccagaatctacaatgaactcaaacaaatttacaagaaaaaaacaaacaaccccatcaaaaagtgggcgaaggacatgaacagacacttctcaaaagaagacatttatgcagccaaaaaacacatgaagaaatgctcatcatcactggccatcagagaaatgcaaatcaaaaccactatgagatatcatctcacaccagttagaatggcaatcattaaaaagtcaggaaacaacaggtgctggagaggatgcggagaaataggaacacttttacactgttggtgggactgtaaactagttcaaccattgtggaagtcagtgtggcgattcctcagggatctagaactagaaataccatttgacccagccatcccattactgggtatatacccaaatgagtataaatcatgctgctataaagacacatgcacacgtatgtttattgcagcactattcacaatagcaaagacttggaaccaacccaaatgcccaacaatgatagactggattaagaaaatgtggcacatatacaccatggaatactatgcagccataaaaaatgatgagttcatatcctttgtaggggcatggatgaaattggaaaccatcattctcagtaaactatcgcaagaacaaaaaaccaaacaccgcatattctcactcataggtgggaattgaacaatgagatcacatggacacaggaaggggaatatcacactctggggactgtggtggggtcgggggaggggggagggatagcattgggagatatacctaatgctagatgacacattagtgggtgcagtgcaccagcatggcacatgtatacatatgtaactaacctgcacaatgtgcacatgtaccctaaaacttagagtataataaaaaaaaaaaa

SEQ ID NO: 415 - DNA, 6082 bp, Homo sapiens
  source 1..6082: mol_type = other DNA
agatggccgaataggaacagctccagtctacagctcccagcaggatggacacagaagatgggtgatttctgcattttcaactaaagtacctggttcgtctcactgggactggctggacagtgggtgtagcccacagagggttagccgaagcaaggtggggcatcgcctcacctgggaagcgccaaggggtcgggggatttccctttcctagccaagggaagccgtgagtgactatacctggaggaggggtacactcctgcccaaatactgctcttttcccacagtcttcgcaactggcagaccacgaaatcccctcccatgcctggttcagtgggtcccacgcccacagagccttgctcactgctagcgccagcagtctgaaatcgacctgggacgtgggagcttggcggggtagaggtgtccgccattgctgaggcttgagtaggcggttctatgctcacagtgtaaacaaagcagcagggaagctcaaactgggcagagcccaccacagctcagcaaggcctactgtctctgtagattccacctccaggggcagggcatatctgaacaaaaggcagcagacagcttctccagacttaaacgtccctgcctgacagctctgaagagagcagtggttctcccagcaccgcgttcaagctccgataatagacagactgcctcctcaagtgggtccctgacccccgtgtagcctgactgggagacatctcccagtaggcgccgaaagacacctcagagaggtagatgccccactggaacgaagcttccacagtaaggatcaggcagcaatatttgctgttctgcagcctccactggtgacacccaggcaaacagggtctggagtggacctccagcaaactccaacagacctgcagctaaggggcctgtctattagaaggaaaactaacagaaaggaatagcatcaacatcaaaaaaaggacatctacaccaaaaccccatccataggacaccaacatcagagaccaaaggtaggtaaaaccacaaagatggggagaaaccagaccagaaaggctgaaaattccaaaaaccagaatgcctcttctcctccaaaggaacacaactccttgccagcaagggaacaaaactggacagagaatgagtttgacaagttgacagaagtaggcttcagaaggtcggtaataacaaacttctccaagctaaaggagcatgttctaatgcgtcgcaaggaagctaaaaatcttgaaaaaaggttagacaaatggctaactagaataaccagtgtagagaagagcttaaatgacctgatggagctgaaaaccacagtacgggaacttcgtgaagcatacacaagcttcaatagccaattcgatcaagtggaagaaaggatatcagtaactgaagatcaaattaatgaaataaagcgagaggacaagattagagaaaaaagagtgaaaagaaatgaacaaagcctccaagaaatatgagactatgtgaaaagaccaaatctatgtttgattggtgtacctgaaagtgatggggagaacagaaccaagtttgaaaacactcttcaggatattatccaggagagcttccccaacctagcaaggaaggccaacattcaaattcaggaaatacagagaacaccacaaagatactcctcaagaagagcaaccccaagacacataattgtcagattcaccaaggttgaaatgaaggaaaaactgttaagggcagccagagagaaaggtcaggttacccacaaagggaagcccatcagattaacagcggacctctgggcagaaaccctacaagccagaagagaatgggggccaatattcaacattcttaaagaaaagaattttcaacccagaatctcatatccagccaaactaagcttcttaagtgaaggagaaataaaatcctttacagacaagcaaatgctgagagattttgtcaccaccaggcctgccttacaagagctcctgaagtaagcactaaaatggacaggaacaaccagtaccagccactgcaaaaacatgccaaatggtaaagaccatcaacactatgaagaaactgcatcaattaatggatgaaataaccagctagcatcataatgacaggatcaaattcccacataacaatattaaccttaaatgtaaatgggataaatgccccaattaaaagacacagactggcaaattgaataaacagtcaagacccatcagtgagctatattcaggagacccatctcatgtgcaaagacacacataggctcagaataaaaggatgtaggaagatttaccaagcaaatggaaagcagaaaaaagcaggggttgcaatcctagtctctgataaaacagactttaaaccaacaaagatcaaaagagacaaagaaggtcattacataatggtaaagggatcaattcaacaagaacagctaactatcctaaatatatatgcacccaatacaggagcacccagattcataaagcaagttctacaaagagatttagactcccacacaatattaatgggtgactttaacaccccactgtcaatattagacagatcaacaagacagaaaattaacaaagatatccaggacttgaactcagctctggaccaagcagacctaatagacatcgacagaactctccaccccaaatcaacagaatatacattcttgtcagcaccacatcacacttattccaaaattgaccacataattggaagtaaagcactcttcagcaaatgcaaaagaacagaaatcacaacaaaccgtctcagaccacaatgcaatcaaattagaactcaggatcaagaatctcactcaactgcacaactgcatggaaactgaacaacctgttcctgaatgactactgggtaaataacgaaatgaaggcagaaataaagatgttctttggaaccaacgagaacaaagacacaatgtaccagaatctctaggacatgtttaaagcagtatgtagagggaaatttatagcactaaatgcccacaagtgaaagcaggagtgatctaaaatcaacaccctaacatcacaattaaaagaactagagaagcaagaccaaacaaattcaaaagctagcagaaggcaagaaataactaagatcagagcagaactgaaggagatagagactcaacaaacccttcaaaaaatcagtgaatccaggagctagttttttgaaaagatcaacaaaattgatagaccgttagcaaggctaaaaaagaagaaaagagagaagagtcaaatagatgcaataaaaaatgataaaggggatatcaccactgatcccacagaaatacaaactaccatcagcgaatactataaacacctctacacaaataaactagaaaatctagaagaaatggataaattcctcgacacatacaccctcccaagactaaaccaggaagaagttgaatctctgaataaaccagtaacaggttctgaaattgaggcaataattaatagcctaccaaccaaaaaaagtccaggaccagacggattcacagccaaattctacgaaaggtacaaagaggtgctggtaccattccttctgaaactattccaatcaatagaagaaaagggaatcctccctaactcattttatgaggctaacatcatcctgataccaaagcctggcagagacacaacaaaaaaagagaattttaggccaatatccctgatgaacatcgatgcgaaaatcctcaataaaatactggcaaaccgaatccagcagcatatcaaaaagcttatccaccacgatcaagtcagcttcttccctgggatgcaaggctggttcaacatatgcaaatcaataaacataatccatcacataaacagaaccaacggcaaaaaccacatgattatctcaatagatacaaaaaaggccttcaacaaaattcaacagcctttcatgctaaaaaccctcaataaactaggtattgatggaatgtatctcaatataataagaggttatttatgacaaacccacagccaatagcatactgaatgggcaaaagctggaagcatttcctttgaagaccagcacaaggcaaggatgccctctctcaccactcctattcaacatagtattggaagttctggccagggcaatcaggcaagagaaagcaataaagcatattcaaataggaagagaggaagtcaaattgtctctgtttgcagatgacatgattgtatatttagaaaaccccatcgtctcatcccaaaatctccttaagctgataagcaacttcagcaaagtctcaggatacaaaatcggtgtgcaaaaatcacaagcattcctatataccaataatagacaaagagccaaatcatgagtgaactcccattcacaattgctactaagaaaataaaatacaaagcactgctcaaggaaataagagaggacacaaacaaatggaaaaacattccatgctcatggataggaagaatcaatatcatgacaatggccttgttgcccaaactgatttatagattcaatgctatccccatcaagctaccactaactttcttcacagaattggaaaaaactactttaagattcatatggaaccaaaaaagagcccacctagccaagacaatcctgggcaagaagaacaaagctggaggcatcacactacctgacttcaaactttactacaagcctacagtaaccaaaacagcatggcactggtacaaaaacagatatgcagacgaatggaacagaatggaggcctcagaaataacaccacacgtctaccaccatctgatctttgacaaacctgacacacacaagcaatggggaaaagattccctatttaataaatggtgttgggaaaacgggctagccatatgcagaaaactgtaactggaccctttccttacaccttatacaaaaatcaactcaagatggaacaaagacttaaacgtaagacctaggaccataaaaatcctagaagaaaacctgggcaataccattcaggacataggcatgggcaaagacttcatgtctaaaacaccaaaagcaatggcaacaaaagccaaaattgacaaatgggttctaattaaagagcttctgcacagcaaaataaactatcatcagagtgaacaggcaacctacagaatgggagaacatttttgcaatatatccatctgacaaagggctaatatccagaatctacaaagaacttaaacaaatttacaagaaaaaagcaaacaaccccatcaaaaaatgggcaaaggatatgaacagatacttctcaaaagaagacatttatgcagccaacagacatatgaaaaaatgctcatcatcactagtcattagagaaatgaaaatcaaaaccacagtgagataccatctcatgccagttagaatggcgatcattaaaaatcaggaaacaatagatgctggagaggttgtggaaaaattggaacgcttttacactgttggtgggagtgcaaattagtccgaccattgtggaagtcagtgtgacgactcctcaaggatctagaactggaaataccatttgacccagcaatcccactattgggcatatacccaaaagattataaatcattctacaataaagacacatgcacacgtatgtttattgctgcactattcacaatagcaaagatttgaaaccaacccaaatgcccgtcaatgatagactggattaagaaaatgtggcacatgtataccatggaatactatgcagccataaaaaaggatgagttcatgtcctttgcagggacatggataaagccggaaaccatcattctcagcaaactatcacaagatcagaaaaccaaacaacgcatgttctcactcataagtgggagttaaacaatgagaacacatggacacagggagggtaacatcacacaccagggcctgtggggggtggggggctaagggagggataacattaggagaaatacctaatgtaggtgacaggttggtgggtgcagcaaaccaccatggcatgtgtatacctatgtaacaaaactacatgttctgcacatgtaacccagaacttaaagtataataaaaaaaataa

SEQ ID NO: 416 - DNA, 151 bp, Homo sapiens
  source 1..151: mol_type = other DNA
cagcgaaaaatcagcagagccacctacccaacccacagttgacttagaagataattccagaagagctgtccaactaatgcagagactcctaagaaaaaaggtatagttattgttgtaacccactgccctttgggtggcttcttaggcagca

SEQ ID NO: 417 - DNA, 385 bp, Homo sapiens
  source 1..385: mol_type = other DNA
gtcaggcctctgagcccaaactaagccatcatatcccctgtgacctgcatgtatacatacagatggcctgaagcaactgaagatccacaaaagaagtgaaaatagccttaactgatgacattccaccattgagatttgttcctgccccaccctaactgatacgatatattctcccccgcccttaagaaggtactttgtgatattctccctgcccttgagaatgtactttgtacgcctatcccaaacctataagaactaatgataatcccaccaccctttgttgactcctttttagactcagcccgcctgcacccaggtgaaatatacagccttgttgctcacacaaagcctgtttggtggtttcttcacacggatgcatgtgaca

SEQ ID NO: 418 - DNA, 6153 bp, Homo sapiens
  source 1..6153: mol_type = other DNA
agggtggagccaagatggccaaataggaacagctccagtccacagctcccagcatgagcgatgcagaagacgggtgatttctgcatttccaactgaggtaccggattcatctcactgctgagtgttggacagtgggtgcaggacagtgggtgcagtgcaccgagcatgagctgaagcagggcaaggcatcgcctcacccaggaagcgcaaggggtcagggaattccctttcctagtcaaagaaaggggtgacagatggcacctggaaaatcgggtcacacccaccctaatactgcacttttccaatggtctttgcagatggcacacaaggagattatatcccgcacctggcttggaggatcctacgcccatggagcctcgctcattggtggcacagcagtctgagatcaaactgcaaggtggcagcgaggctgggggcagggcgcccaccattgccgaggcttgagtaggtaaacaaagcacccgggaagctcgaactgggtggagcccaccccagctcaaggaggcctgcctgcctctgtagactccacctctgggggcagggcatagccaaacaaaggcagctgaaacctctgcagacttaaatgtccctatctgacagctttgaagagagtagtggttctcccagcacgcagcttgagatctgagaatggacagactgcctcctcaagtgggtccctgacccacaagtagcttaactgggaggcaacccccagtaggggcagactgacacctcacacggccaggcactcctctgagacaaaacttccacaggaatgatcaggcagcaacatttgctgttcaccaatatctgctgttctgcagcctccgctgctgatacccaggcaaacagggtctggagtggacctccagcaaactccaacagacctgcagctgagggtcctgactgttagaaggaaaactaacaaacagataggacatccacaccaaaaccccatctgtacgtcaccatcatcaaagaccaaaggtagataaaatcacaaagatggggaaaaaacagagcagaaaaactggaaactctaaaaatcagagtgcctctccttctccaaaggaatgcagctcctcaccagcagtggaacaaagctggatggagaatgactttgacgagttgagagaagaaggcttcagatgatcaaactagtccgagctaaaggaggaagttcgaacccatggcaaagaagttaaaaaccttgaaaaaaaattagatgaatggctaactagaataaccaatgcagagaagtccctaaaggacctgatggagctgaaaaccacggcacaagaactatgtgacgaatgcacaagcctcagtagccgattcaatcaactggaagaaagggtatcagtgttggaagatcaaatgaatgaaatgaagtgagaagagaagtttagagaaaaaagaataacaagaaatgaacaaagcctccaagaaatatgggactatgtgaaaagaccaaatctacatctgattggtgtacctgaaagtgacggggagaatggaaccaagttggaaaacactctgcaggatattatccaggagaacttccccaatctagcaaggcaggccaacattcaaattaaggaaatacagagaacaccacaaagatactccttgagaagagcaactccaagacacataattgtcagattcaccaaagttgaaatgaaggaaaaaatgttaagggcagccagagagaaaggttgggttacccacaaagggaagcccatcagactaacagctgatctcttggcagaaactctacaagccagaagagagtgggggccaatattcaacattcttaaagaaaagaattttcaacccagaatttcatatccagccaaactaagcttcataagtgaaggagaaataaaatcctttacagacaagcaaatgctgagagattttgtcaccaccaggcctgccctaaaagagctcctgaatgaagcactaaacatggaaaggaacaaccggtaccagccactgcaaaaacatgtcaaatggtaaagaccattgaggctaggaagaaactgcatcaactaacgagcaaaataaccagctaacatcataatgacaggatcaaattcacacataataatattaaccttaaatgtaaatgggctaaatgccccaattaaaagacacagactggcaaattgaataaagagtcaagactcatcagtgtgctgtattcaggaaacccatctcacgtgcagagacacacataggctcaaaataaagggatggaggaagatctaccaagcaaatggaaaacaaaaaaaggcaggggttgcaatcccagtctctgacaaagcagactttaaaccaacaaagatcaaaagagacaaagaaggccattacataatggtaaagggatcaattcaacaagaagagctaactatcctaaacatatatgcacccaacacaggagcacccagattcataaagcaagtccttagagacctacaaagagacttagactcccacacaataataatgggagactttaacaccccactgtcaacattagacagatcaacgagacagaaagttaacaaggatatccaggaattgaactcagctctgcaccaagcatacctaatagacatctacagaactctccaccccaaatcaacagaatatacattcttttcagcaccacaccacacctattccaaaactgaccacatagttggaagtaaagcactcctcagcaaatgtaaaagaacagaaattataacaaactgtctctcagaccacagtgcaatcaaactagaactcaggattaagaaactcactcaaaaccgctcaagtacatggaaactgaacaacctgctcctgaatgactactgggtatataacaaaatgaaggcagaaataaagatgttatttgaaaccaatgagaacaaagacacaacataccagaatctctgggacacattcaaagcagtgtgtagagggaaatttatagcactaaatgcccacaagagaaagcaggaaagatctaaaattgacaccctaacatcacaattaaaagaactagagaagcaagagcaaacacattcaaaagctggcagaaggcaacaaataactaagatcagagcagaactgaaggaaatagagacacaaaaaacccttcaaaaaatcaatgagtccaggagctggttttttgaaaagatcaacaaaattgatagaccactagcaagactaataaagaagaaaagagagaagaatcaaatagacgcaataaaaaaatgatagaggggatatcaccaccgatcccacagaaatacaaactaccatcagagaatactataaacacctctatgcaaataaactagaaaatctagaagaaatggataaattcctcgacacatacaccctcccaagactaaaccaggaagaagttgaatctctgaatagaccaataacaggctctgaaattgaggcaataattaataacttaccaaccaaaaagagtccaggaccagatggattcacagccaaattctaccagagatacaaggaggagctggtaccattccttctgaaactattccaatcaatagaaaaagagggaatcctccctaactcattttatgaggccagcatcatcctgataccaaagcctggcagagacacaacaaaaaaagagaattttagaccaatatccctgatgaacatcgatgcaaaaatcctcaacaaaatactggcaaaccaaatccagcagcacatcaaaaagcttatccaccatgatcaagtgggcttcatccctgggatgcaaggctggttcaagatacgcaaatcaataaatataatccatcatataaacagaaccaacgacaaaaactacatgattatctcaatagatgcagaagacctttgacaaaattcaacaacgcttcatgctaaaaactctcaataaattaggtattgatgggacgtatctcaaaataataagagctatctatgacaaacccacagccaatatcatactgaatggagaaaaactggaagcattccttttgaaatctggcacaagacagggatgccctctctcaccactcctagtcaacatagtgttggaagttctggccagggcaatcaggcaggagaaggaaataaagggtattcaattaggaaaagaggaagtcaaattgtccctgtttgcagatgacatgattgtatatctagaaaaccccattgtctcagcccaaaatctccttaagctgataggcaacttcagcaaagtctcaggatacaaaatcaatgtgcgaaaatcacaagcattcctatacgccaataacagacaaacagagagccaaatcatgagtgaactcccattcacaactgcttcaaagagaataaaatacctaggaacccaacttacaagggaagtgaaggacctcttcaaggagaactacaaaccactgctcaatgacataaaagaggatacaaacaaatggaagaaaattccatgctcatgagtaggaagaatcaatattgtgaaaatggccatactgcccaaggtaacttatagattcaatgccatccccatcaagctaccatgactttcttcacagaattggaaaaaactactttaaagttcatatggaaccaaaaaaggggccggattaccaagtcaatcctaagccaaaagcacaaagctggaggcatcatgctacctgacttcaaactatactacaaggctacagtaaccaaaacagcatggtactggtaccaaaacagcatggtactggtaccaaaacagagatacagatcaatggaacagaacagagccctcagcaataatgccacatatctataaccatgtgatctttgacaaacctgacaaaaacaagaaatggggaaaggattccctatttaataaatggtgctgggaaaactggctagccatatgtagaaagctgaaactggatcctttccttacatcttatacaaaaattaattgaagatggattaaagacttaaatgttagacctaaaaccataaaaaccctagaagaaaacctaggcaatactatttaggaaaaaggcatgggcaaggacttcatgtctaaaacaccaaaagcaatggcaacaaaagccaaaattgacaaatgggatctaattaaactcaagagcttctgcacaccaaaagaaactaccatcagagtgaacaggcaacctacagaatgggagaaaatttttgcaatctactcatgtgacaaagggctaatatccagaatctacaatgaactcaaacaaatttacaagaaaaaaacaaaaaaccccatcaacaagtgggcgaaggatatgaacagacacttctcaaaagaagacatttacacagccgaaagacacatgacaaaatgctcatcatcactggccatcagagaaatgcaaatcaaaaccacaatgagataccatctcacaccagttagaatggtgatcattaaaaagtcaggaaacaacaggtgctggagaggatgtggagaaataggaacacttctacactgttggtgggactgtaaactagttcaaccattgtggaagtcagtgtggcaattcctcagggatctagaactagaaatgccattcgactcagccatcccattactgggtatatacccaaaggattataaatcatgctgctataaagacacacgcacacgtatgtttattgcagcactattcacaatagcaaagacttggaaccaacccaaatgtccaacaatgatagattggactaagaaaatgtggcacatatacaccatggaatattatgcagccataaaaaatcatgagttcatgtcctttgtagggacatggatgaagctggaaaccgttattctcagcaaactattgcaaggacaaaaaaccaaacaccacatgttctcactcataggtgggaattgaacaatgagaacacatggacacaggaaagggaacatcacacacccgggcctgttgtggggtggggggaggggggagggatagcattaggagaaatacctaatgtaaatgacgagttaatgggtgcagcacaccaacatggcacatgtatacatatgtaacaaacctgcatgttatgcacatgtaccctagaacttaaagt

SEQ ID NO: 419 - DNA, 6030 bp, Homo sapiens
  source 1..6030: mol_type = other DNA
gggggaggagccaagatggccgaataggaacagctccggtctacagctcccagcgtgagcgacgcagaagacggtgatttctgcatttccatctgaggtaccagtttcatctcactagggagtgccagacagtgggcgcaggccagtgtgtgtgcgcaccgtgcgcgagccgaagcagggcgaggcattgcctcacctgggaagcgcaaggggtcagggagttccctttccgagtcaaagaaaggggtgacggacgcacctggaaaatcgggtcactcccacccgaatattgcgcttttcagaccggcttaagaaacggcgcaccacgagactatatcccacacctggctcggagggtcctacgcccacggaatctcgctgattgctagcacagcagtctgagatcaaactgcaaggcggcaacgaggctgggggaggggcgcccgccattgcccaggcttgcttaggtaaacaaagcagctgggaagctcgaactgggtggagcccaccacagctcaaggaggcctgcctgcctctgtaggctccacctctgggggcagggcacagacaaacaaaaagacagcagtaacctctgcagacttaagtgtccctgtctgacagctttgaagagagcagtggttctcccagcacgcagctggagatctgagaacgggcagactgcctcctcaagtgggtccctgactcctgacccccgagcagcctaactgggaggcaccccccagcaggggcacactgacacctcacacggcagggtattccaacagacttgcagctgagggtcctgtctgttagaaggaaaactaacaaccagaaaggacatctacaccgaaaacccatctgtacatcaccatcatcaaagaccaaaagtagataaaaccacaaagatggggaaaaaacagaacagaaaaactggaaactctaaaacgcagagcgcctctcctcctccaaaggaacgcagttcctcaccagcaacagaacaaagctggatggagaatgattttgacgagctgagagaagaaggcttcagacgatcaaattactctgagctacgggaggacattcaaaccaaaggcaaagaagttgaaaactttgaaaaaaatttagaagaatgtataactagaataaccaatacagagaagtgcttaaaggagctgatggagctgaaaaccaaggctcgagaactacgtgaagaatgcagaagcctcaggagccgatgcgatcaactggaagaaagggtatcagcaatggaagatgaaatgaatgaaatgaagcgagaagggaagtttagagaaaaaagaataaaaagaaatgagcaaagcctccaagaaatatgggactatgtgaaaagaccaaatctacgtctgattggtgtacctgaaagtgatgtggagaatggaaccaagttggaaaacactctgcaggatattatccaggagaacttccccaatctagcaaggcaggccaacgttcagattcaggaaatacagagaacgccacaaagatactcctcgagaagagcaactccaagacacataattgtcagattcaccaaagttgaaatgaaggaaaaaatgttaagggcagccagagagaaaggtcgggttaccctcaaatgaaagcccatcagactaacagcggatctctcggcagaaaccctacaagccagaagagagtgggggccaatattcaacattcttaaagaaaagaattttcaacccagaatttcatatccagccaaactaagcttcataagtgaaggagaaataaaatactttatagacaagcaaatgttgagagattttgtcaccaccaggcctgccctaaaagagctcctgaaggaagcgctaaacatggaaaggaacaaccggtaccagccgctgcaaaatcatgccaaaatgtaaagaccatcgagactaggaagaaactgcatcaactaatgagcaaaatcaccagctaacatcataatgacaggatcaaattcacacataacaatattaactttaaatataaatggactaaattctgcaattaaaagacacagactggcaagttggataaagagtcaagacccatcagtgtgctgtattcaggaaacccatctcacgtgcagagacacacataggctcaaaataaaaggatggaggaagatctaccaagccaatggaaaacaaaaaaaggcaggggttgcaatcctagtctctgataaaacagactttaaaccaacaaagatcaaaagagacaaagaaggccattacataatggtaaagggatcaattcaacaagaggagctaactatcctaaatatttatgcacccaatacaggagcacccagattcataaagcaagtcctcagtgacctacaaagagacttagactcccacacattaataatgggagactttaacaccccactgtcaacattagacagatcaacgagacagaaagttaacaaggatacccaggaattgaactcagctctgcaccaagcagacctaatagacatctacagaactctccaccccaaatcaacagaatatacatttttttcagcaccacaccacacctattccaaaattgaccacatagttggaagtaaagctctcctcagcaaatgtaaaagaacagaaattataacaaactatctctcagaccacagtgcaatcaaactagaactcaggattaagaatctcactcaaagccgctcaactacatggaaactgaacaacctgctcctgaatgactactgggtacataacgaaatgaaggcagaaataaagatgttctttgaaaccaacgagaacaaagacaccacataccagaatctctgggacgcattcaaagcagtgtgtagagggaaatttatagcactaaatgcctacaagagaaagcaggaaagatccaaaattgacaccctaacatcacaattaaaagaactagaaaagcaagagcaaacacattcaaaagctagcagaaggcaagaaataactaaaatcagagcagaactgaaggaaatagagacacaaaaaacccttcaaaaaatcaatgaatccaggagctggttttttgaaaggatcaacaaaattgatagaccgctagcaagactaataaagaaaaaaagagagaagaatcaaatagacacaataaaaaatgataaaggggatatcaccaccgatcccacagaaatacaaactaccatcagagaatactacaaacacctctacgcaaataaactagaaaatctagaagaaatggatacattcctcgacacatacactctcccaagactaaaccaggaagaagttgaatctctgaatagaccaataacaggctctgaaattgtggcaataatcaatagtttaccaaccaaaaagagtccaggaccagatggattcacagccgaattctaccagaggtacatggaggaactggtaccattccttctgaaactattccaatcaatagaaaaagagggaatcctccctaactcattttatgaggccagcatcattctgataccaaagccgggcagagacacaaccaaaaaagagaattttagaccaatatccttgacgaacattgatgcaaaaatcctcaataaaatactggcaaaccgaatcgagcagcacatcaaaaagcttatccaccatgatcaagtgggcttcatccctgggatgcaaggctggttcaatatacgcaaatcaataaatgtaatccagcatataaacagagccaaagacaaaaaccacatgattatctcaatagatgcagaaaaagcctttgacaaaattcaacaacccttcatgctaaaaactctcaataaattaggtattgatgggacgtatttcaaaataataagagctatctatgacaaacccacagccaatatcatactgaatgggcaaaaactggaagcattccctttgaaaaccggcacaagacagggatgccctctctcaccgctcctattcaacatagtgttggaagttctggccagggcaatcaggcaggagaaggaaataaagggtattcaattaggaaaagaggaagtcaaattgtccctgtttgcagacgacatgattgtttatctagaaaaccccattgtctcagcccaaaatctccttaagctgataagcaacttcagcaaagtctcaggatacaaaatcaatgtacaaaaatcacaagcattcttatacaccaacaacagacaaacagagagccaaatcatgggtgaactcccattcacaattgcttcaaagagaataaaatacctaggaatccaacttacaagggatgtgaaggacctcttcaaggagaactacaaaccactgctcaaggaaataaaagaggagacaaacaaatggaagaacattccatgctcatgggtaggaagaatcaatatcgtgaaaatggccatactgcccaaggtaatttacagattcaatgccatccccatcaagctaccaatgactttcttcacagaattggaaaaaactactttaaagttcatatggaaccaaaaaagagcccgcattgccaagtcaatcctaagccaaaagaacaaagctggaggcatcacactacctgacttcaaactatactacaaggctacagtaaccaaaacagcatggtactggtaccaaaacagagatatagatcaatggaacagaacagagccctcagaaataatgccgcatatctacaactatctgatctttgacaaacctgagaaaaacaagcaatggggaaaggattccctatttaataaatggtgctgggaaaactggctagccatatgtagaaagctgaaactggatcccttccttacaccttatacaaaaatcaattcaagatggattaaagatttaaacgttaaacctaaaaccataaaaaccctagaagaaaacctaggcattaccattcaggacataggcgtgggcaaggacttcatgtccaaaacaccaaaagcaatggcaacaaaagacaaaattgacaaatgggatctaattaaactaaagagcttctgcacagcaaaagaaactaccatcagagtgaacaggcaacctacaacatgggagaaaattttcgcaacctactcatctgacaaagggctaatatccagaatctacaatgaactcaaacaaatttacaagaaaaaaacaaacaaccccatcaaaaagtgggcgaaggacatgaacagacacttctcaaaagaagacatttatgcagccaaaaaacacatgaagaaatgctcatcatcactggccatcagagaaatgcaaatcaaaaccactatgagatatcatctcacaccagttagaatggcaatcattaaaaagtcaggaaacaacaggtgctggagaggatgcggagaaataggaacacttttacactgttggtgggactgtaaactagttcaaccattgtggaagtcagtgtggcgattcctcagggatctagaactagaaataccatttgacccagccatcccattactgggtatatacccaaatgagtataaatcatgctgctataaagacacatgcacacgtatgtttattgcggcactattcacaatagcaaagacttggaaccaacccaaatgtccaacaatgatagactggattaagaaaatgtggcacatatacaccatggaatactatgcagccataaaaaatgatgagttcatatcctttgtagggacatggatgaaattggaaaccatcattctcagtaaactatcgcaagaacaaaaaaccaaacaccgcatattctcactcataggtgggaattgaacaatgagatcacatggacacaggaaggggaatatcacactctggggactgtggtggggtcgggggaggggggagggatagcattgggagatatacctaatgctagatgacacattagtgggtgcagcgcaccagcatggcacatgtatacatatgtaactaacctgcacaatgtgcacatgtaccctaaaacttagagtataataaaaaaaaaaaa

SEQ ID NO: 420 - DNA, 6411 bp, Homo sapiens
  source 1..6411: mol_type = other DNA
ggtggctggcaagatggtcaaataggaacagctccggtctgcagctcccagtgagatcaacacagaaggtgggtgatttctgcatttccaactgaggtacctggctcatctcactgggactggttagacagtggatgcagcccatggaggacaagccaaagcagggtggggcgttgcctcacctgggaagtgcacagggtcgggaaactccctcccctagccaagggaagccgtgagggactgtgccgtgaggaattgtgcattccagcccagatactatgcttttcccatgctctttgcaacctgcagaccaggagattcccttggttgcctacaccaccagggctctgggtttcaagcacaaaactgggtggccatttgggcagacaccgagctagctgcaggagtttttttttttcataccccagtggtgcctggaacaccagcaagatagaatggttcactcccctggaaatggggctaaagccaggggagccacctggtctagttcagtggattccacccctatggagcccagcaagctaagatccactggcttgaaattcttgctgccagaacagcagtctgaagtcgacctgggatgctcaagcttggaagagggaggggcgtccaccattactgaggcttgagtaggtggttttcccctcacagtgtgaacagagctgccaggaatttcaaactgggcagagcccaccacagtgctgcaaagctgctctagccagactgcctctctagattcctcctctctgggcagggcatctctgaaagaaaggcagcagcccccgtcagggacctatagataaaactcccatctccctgggacaaagcatctgggggaaagggcagctgtgggtgcagcttcagcaggcttaaacattcctgcctgccagctctgaagagagcagtgaatctcccagcacagcgctcaagctctgctgagggacagactgcctcctcaagtgggtccctaacccctgtgcctcctgactgggagacacctcccagctggggttgacagacacctcatacaggagagctccagctggtatctggtgggtgcccctctgggacaaagcttccagaggaaagaacaggcagcaatctttgctgttctgaagcctccactagtgatacccaggcaaacagggcctggagtggaccttcagcaaactccggcagacctgcagcagaggggcctattagaaggaaaactaacaaacagaaaggaatagtatcaacatcaacaaaaaggacatccacacaaaaaccccatccgaaggtcaccaacatcaaagaccaaagttagataaatccacaaagatgaggaaaaaccagcaccaaaaggctgaaaattccaaaaaccagaacacctcttctccaaaggatcacaactcctcaccagcaagggaacaaatctggatagagaatgagtttgacaaattgacagaagcaggcttcagaaggttggtaataacaaactcctctgaggtaaaggagcatgttctaacccaatgcaaggaagctaagaaccttgaaaaaaggttagaggaattgctaactagaataactagtttagagaagaacataaattacttgatggagctgaaaaacacagcacaagaacttcataaagcatacacaagtatcaatagccaaatcgataaagtggaagacaggatatcagagattgaagatcaacttaatgaaataaaatgtgaagacaagattagagaaaaaagaatgacaaggaatgaacaaagcctctaagaaatataggactatgtgaaaagaccaaaccaaagtttgattggtatacatgaaatgaaatggaaccaagctggaaaacactcttcaagacattatccaggagaacttcaccaacctagcaattcaggccaacactgaaattaaggaaataaagggaccaccacaaaggtacttctcgagaagagcaaccccaagacacataattgtcagattcaccaaggttgaaatgaaggaaaaaatgttaagggcagccagagagaaaggtcgggttacccacaaagggaagcccatcagactaacagctgatctcttggcagaaactctgcaagccagaagagagtgggggccaatattcaacattcttaaaagaattttcaacccagaatttcatatccagccaaactaagcttcctaagcaaaggagaaataaaatcctttacagacaagcaaatgctgagagattttgttaccaccaggtctgccttacaagagctcctgaaggaagcagtaaatatggaaaggaaaaactggtaccagccactgcaaaaacataccaaattgtaaagactatcagcactatgaagaaactgcatcaactaatgggcaaaataaccagctagcatcataatgtcaggatcaaattcacacataacaatattaaccttaaatgtaaatgggctaaatgccccaattaaaagacacagactggcaatctggataaagggtcaagacccatcagtgtgctgtattcaggagacccatctcacatgcaaagatacacataggctcaaaataaaggaatggaggaatatttaccaagcaaatggaaagaaaaaaaagcaggggttgcaatcctagactctgataaaacagactttaaaccaacaaagataaaaaaagacaaacaagggcattacataatggtaaagggatcaatgcaacaagaagagctaactatcctaaatatatatgtacccaatacaggagcacccagatttataaagcaagttcttagagacctacagagagacttaggctcccacacaataattgtgggagactttaacaccacactgtcaatattagacagatcaacgagacagaaaattaacaagaatattcaggacttgaactcagctctggaccaagcagacctaatagacatctacagaactctccaccccaaatcaacagaatatacattcttttcagcaccatattgtacttattctaaaattgaccacataattggaagtaaaacactcctcagcaaatgcaaaagaacagaagtcataacaaacaatctctcagaccacagtgcaatcaaattagaactcaggattaagaaactcactcaaaaccacacaactacatggaaactgaacaatctgctcctgaatgactactgggtgaataacaaaattaagacagaaataaataagttctttgaaaccaatgagaacaaagacacaacataccagaatctctgggacatatttaaagcagtgtgtagagggaagtttatagcactaaatgcccacaagagaaagcaggaaagatctaaaatcaataccctaatatcacaattaaaagaactacagatgtaagagcaaacaaattcaaaagctagcagaagacaagaaataactaagaccagagcagaactgaagaagatagagacacaaaaaaactcttcaaaaaaatagatgaatccaggagctggttttttgaaaagatcaacaaaatagaccagtagcaagaccaataaagaagaaaagagagaagaatcaaatagacacaataaaaaattataaaggggatgtcaccaccaatcccacagaaataccaactaccatcagaaaatactataaacacctctacgcaaataaactagaaaatctagaagaaatggataaattcctggacacatacaccctcccaagactaaaccaggaagaagtccaatccctgaatagaccaataacaagttctgaaattgaggcagtaattaatagcctaccaatcaaaaacagcccaggaccagatggattcacagctgaattctaccagaggtacaaagaggagctggtaccattccttctgaaactattccaaacaatcgaaaaacagggactcgtccctaactcattttatgaggccagcatcatcctgataccaaaacctggcagagaaataacaaaaaaagaaaatttcaggccaatatccctgatgaacattgatgcaaaaatcctcaataaaatactggcaaaccaaatccagcaacacatcaaaaagcttatccaccacgatcaacttggcttcatccctggatgcaaggctggttcaacatatgcaaatcaataaacgtaatccatcacataaatagaaccaatgacaaaaaccacatgattatctcaatagatacagaaaagggcttttataaaattcaacagcccttcaagctaaaaactctcaataaactaggcattgatggaataataagggctatttatgacaaacccacagccaatatgacactaaatgagcaaaagctggaagccttccctttgaaaactggcacaagacaaggatgctctctcccaccactcctattcaacatagtatcggaagttctggccagggcaatcaagcaagataaagaaataaaggctattcaaataggaagagaggaagtaaaattgtctctatttgcagatgatatgattgtatatttagaaaatcccatctctcagcccaaaatctccttaagctgtcaagaaacttcagcaaagtctcaggatacaaaaccaatgtgcaaaaatcacaagtattcctatacaccaataatagccaaatcatgagaactcccattcacaattgctatgaagagaataaaatacctaggaatccaacttacaagggatgtgaaggacctcttcaagaagaactacaaaccactgctgaaggaaataagagaggacacaaacaaatggaaaaacattccatgctcatggataggaagaatcaatatcgtgaaaatggccatactgcccaaagtaatttatagattcaatgctatccccatcaagctaccattgactttcttcacagaattagaaaaaactactttaaatttcatatggaaccaaaaaagagcccataaagccaagacaatcctaagcaaaaagaacaaaggtggaggcatcacactacctgacttcaaactatgctacaaaggctacagtaaccaaaacaacatggtactggcaccaaaacatatatagaccaatggaacagaacagaggcctcagaaataatgctacacatctacaaccatctgatctttgacgaacctgacaaaaactagcaatggggaaaggattccctatttaataagtggtgttgggaaaactggctagccatatgcagaaaactgaaactggaccccttccttacaccttatacaaaaattaactcaagatggattaaagacttaaacataagacctaaaaccataaaaaccctagaagaaaacctgtgcaataccattcaggaacataaggcatgggcaaagccttcatgactaaaacaccaaaagcaatggtaacaaaagccaaaattgacaaacgggatctaattaaactagagcttctacatagcaaaagaaactatcatcagagtgaacaggcaacctacagaatgggagaaaatttttgcaatctatccatctgacaaagggctaatatccagaatctacaaagaatttaaacaaatttacaagaaaaaaaaaccatcaaaaagtgggcaaaggatatgaacagagacttctcaaaagaagacatttatgtggccaaaaaacatttgaaaaaaagctcatcactggtcattagagatgtgcaaatcaaaaccacagtgagataccatctcacgcccattagaatggtgatcattaaacagtcaggaaacatcagatgctggagaggatgtggagaaataggaatgcttttacactgttggtgggagtgtaaattacttcattatggaagacagtgtggcgattcctcaaggatctagaaccagaaataccatttgacccagcactgacattactgggtatataaccaaaggattataaatcattctactataaagatacatgcacacatatgtttattgcagcactattcacaatagcaaagacttgaaaccaacacaaatgcccatcaatgatagcctggataaagaaaatgtggcacatatacatcatggaatgccatgcagccataaaaagggatgcattcatgtcctttgtagggatacggatgaagttggaaaccatcattctcagcaaagtaacacaggaacagaaaaccaaacactgcatgttctcactcataagtgggagttgaacaatgagaacacatggacacagggaggggaacatcacacaccagggcctgttgtagggtggggggatgggggaaggatagcattaggagaaatacctaatgtagatgatgagttgatgggtgcagcaaaccaccatggcacatgtatacctatgtaacaaacctgcacgttctgcacgtgtatcccagaacttaaagtataattaaaaaaaaa

SEQ ID NO: 421 - DNA, 679 bp, Homo sapiens
  source 1..679: mol_type = other DNA
caaaatatccttcaaaaactatataaacagtaagaataaatgaagccatacaaaacacacttgcagtataactagaagagagaacactacaaacatcaaattagctctatacagaacaaataagtgacattttccagtagatttgtttctaacaccctgccctaagccttgaaagacaagaagccaggatccacaaaaactgtacggaagaaagaagaacggaatgaagggtttatgattaaactcagccaccctcagaaacacaacgtctatcctaggtgtgaaagtactagagaaagaagtcctaatagatcaaagtgtaattacacggaaatgacctaaaattgcacaagggactccaaaaagcattctagaaaaggcagtgctcaccgagaaagatgagtgagagagaggcaactgttggaaattgcacagtaaaggggaaaatgagccaaaagggtaaattgaggatactgtaagacacataattttttaaaaaactggaagacacatactccctcccctcctatcactatgctccaaaggagccatccattaaataaactatatttcacttcactgacaagagtgggtagctcttgaactagaaatctcacaactcacatcaaaactgccagccctatacaaggaagtacaagaacaatcaaaagtactttat

SEQ ID NO: 422 - DNA, 609 bp, Homo sapiens
  source 1..609: mol_type = other DNA
aaatacacaagagaaatggaaatctatccaaaaagaggggtaaagggtatgaataggccagatatggaaagggaaacccaaacagctagcaaggatatgaagaaatgatcaacctccctaataaacagagaaacataaattaaagcaactatcagattatatttagcaactgaaaaattagcaaaatgtagaatgttgtacaataccgaaggctggcaaaaacgtgagaaaatagttcttttacattgttggtgagcgtaaaaaatggtgttgctgtttttaaaataatctgacagaatttagtaattattaaatatgtgattgacctatactcagcaatactatgtctggacaataccatgtccctagatatggtagtgctgagaaactcttccacagccattagcaacacgtaggaggatgtttattacagaattattggtatctaagaattggagtcaatctgggaatctgccattaggggaattgataggtaatttgtgcttactacataaatgaactactgcaaggttaaaagcaatgaactagctgtacatatagcaacatatctagctatcaaacaatgctaagtaaagaaagtaaattata

SEQ ID NO: 423 - DNA, 5161 bp, Homo sapiens
  source 1..5161: mol_type = other DNA
cccacaggaaacactgaacctgctcaacaccaagcatatcactactacaacgagcatctgagaaaaacatcacacaaagattctctataaccaagaaacttatacagagtcttcaccactgaaagcacctagagccaaagctaggtgacaataaattataaacattaaagtcataccctcaaggggaataaaagaaataaaaaccccagttaaatgaaaaataaattcaaaaataatgagaagaaatagtctacccaaatgagaaggaaccagaaaaataattctggcaatatgaaaaaacagggttctgtaacacctcccaaaaaacacactaactctccagcagtggattcaaaccaagattaaatctttgaaacaccagataaaaattcaaaaggttgattattaatttactcaaggagatacaagataaaggtaaaaaccaacacaaattaaaaaaaaattaggatatcaatgaaaaatttttttttaaagagatagatttttaaaagaaaaccaatcagaacttccagaaatgaaagacacacttagggtactacaaaatgcagtggaaagtgttaataatacactagattaagtagaagaaacaatttcagagcttgaagacaaggctttcaaattaacccaatcagacaaaaataaagaaaaaagatttagaagaaacaaagtctccaagaaatatgggattatgcaaaacagacaaagaattataggttttcctgagggagaggaaaaaacaaaaaatttggaaaacctatttgagggaataattgaggaaaacttccctgtccttgctaaaaatttagacatccaaataaaagaagctcaaagaagtcctggaagactcattacaaaaaggacgtcaccaaagaacatagtcatcagattatctaaagtcaatgtgaaggaaataattctaagaacagcgagacaaaagcatcaggtaacctattaaggaaaacctagcagactaacagcagacttctcagcagaacaaaccagaagagattggggtcattttttagtcttcttaaacagaataactgtcaggcaagaattttgtatccagcaaaactaagtttcataaatgaaggagaaataacgtctttctcagacaagcaaatgctgagggaatttgtcaatactagaccaatgttacaagaaatgctaaaaggagttctaaatcttgaaagaaaagattgatacacaccaggatagaaacctctgaaaacataaaattcacacggcttataaaacaataacacagtgaagaaaagaaagtatctaggtaacaatcaacattatgactggaatagtatctcacaatactaacattgaatggagatggtctaagtgctccattaaaagatacagattggcaaaatgaataaaatcgtcacaaaccaaatatctgctgtcttcaggagacacatctaacacaaggattcttatagacccaagggaaaagggtggaaaaagatatttcatgcaatcagaaaccaaaagcaagcaggaggaactattcttatatcagataaaacagacattaaggcaacaatagtaaaaaaaaaaaagacaaggtcattatacaatgataaaaggatccaattcatgaagaagataaaataattctaaatatatatgcacctaactccagagctcccagattcgtaaagcaactaccactagacctaagaacagagatagacagaaacacaataatagtagagggctttcactccactggcagcactagacagagcactgaggcagaaagtcaacaaagaaatactggactctagaacaaactgacctaagagatatttacagaacattctactcaagaactacccaagaactgcagaatatacattcttcttatcagcacatggaacattctccaaaatagatcatatgtaagctgcaaaacaaatctcaataaattttttaaaaattgaaatcacatcaaccatattctcagaccacagcagaataaaatcaattccaagagtaatcctcaaaactgtataaatacatggaagttaatctgttcctgagtgatttttgggttaacaatgaaatcaagatgaaaattgaaaaatttctgaaatgattgataacaatgacacaagttctcagaacctctaggacacagcaaaagcagtgttaagaggcgtttatagcactaaatacctacatcaaaaaatctgcaaggttacaaattgacaagctaatgtcatgcctcagggaactagaaaaagaacaaaccaaactcaaagctagcagaagaaaaataacaaagatcagggcagaatgaaatgaaattgaaaagacagtacaaaaatcaatgaaacaaaagctagttatttggaaagataaacaaaactgatacactactagctagattaaccaagaaaagaagagaaaagattcagataagctcaattagaagtgaaaatggagacattacaactgacacctcagaaatataaaagactatttgagattactatgagcacctctatgcacacaagctagaaaatctagcggaaatggataaattcccggaaacatacgacaccctagcttgagtcaggaagaaatagaaatcctaaacagaccaataacaggctgtcagattgaatcaggtaaacaaacaaacaaaccaaaaaaacaaacctgtcaacaaaaaaagcccagggcatatggattcaagccgaattctactagacattaaaagcagaactggaatcaattctactgaactattccacaagattgagaaggagggaaacctccctacctcattcgacccagtcagtatcatcctgataccaaagccaagaaagaacctagcaaaataagaaaactacagaccaatatccctgttgtatatagatgcaaaaatcctcaacaaaatactagaaatggaatgaactagaacaaaaaaaaaaatcatgatgaagtgggttttattccgactttttctttctcaataggtgcagaaaaagcatttgataaaatctggtatccctttatgataaaaattctcaacaaactagttatagatgaaacatacctcaaaataataaaagccatctatgacagattcacagctaacataatactgaaaggggagaacttgaaagaattccccctaagaatgggaacaagacaaggatgcccactttcaccacttctattcagtataataccggaagtcctagccagagcaatcaggcaagagaaataaagggcatccaaactggaaaagaggaagtcaaacttatgtctatttgctgatgatgtgatcatatacctagaaaaccctgactcctccaaagaatcctagatctgataaatgaatccagtaaagtctcaggttacaaaattaatatacataaatcagtagcaatgctatatgcactgagaaccaagctgagtatgaaattgagaactcaattccttttacaatagttatacaaaaatatttaggaatatatataaccaaggaagtgaaacatctgtacaaggagaactacaaaatactgctaaataaatcacaggtgacacaaacaaatggaaatacaccttatgctcatggattggaagaatcaatatcgtgaaaatgaccatactgcccaaagcaatttacagattcaatgtaattcctatcaaaataaccaacatcgttttttcagataattagaaaaaaaatcataaaattcacatggaaccaaaatagagcccaaatagccaaagcaatcctaagcaaaaagaacaaatctgaaggtgacatcacattacctaacttcaaaatacactacagggctatagttaccaaaacagtatggtactggtaaaaaagtagttacatagaccgtggaacaaaatagagaaccaagaaataaagccgaatacttacaaccaactgatctttggcaaagcgtacaaaaacataaattggggaaaggacatcccattaaataaatggtgatgggaaaattgaatagccacatgtagaagaatgaaactggattcctacctgtcaccatatacaaaaattaagatagattaaagacttaaatctaagacctgaaaccatgaaaattctagaagaaaaacttttctggacattggcctaagcaaagaatttatgaataagacatcaaaagcaaatgcagcaaaagcaaaaataaataaatgggacctaattaaacaaaagcttctgcacagcaaaagaaataaccattaaatagacaacctacagaatgagagaaaaaatctgcgaattttgcatctgacaacatacacggaactcaaatcactaagaaaaaacaaataatcccattaaagagtgggcaaaggacatgaatagacagttttcaaaggatgatttgcaaatggccaacaaacatgcagaaatgctcaacatcactaatcatcagggaaatgcaagttaaaacgcaacaagatactactgtaccccagccagaatgaccattattaaaaattcaaataacaatagatgttggcatggacagggtgaaaaaggaacacttatacactgctggttggaaagtaaattagtataacttctatagaatacagtatggagatttgatccatgaattccactactgagtatctacccaatggaaaggaaatcaatatataaaaaagacatatttatcacagcacagttcacaattgtaatgatacggaatcaacctaaatacccatcaaccaaagagtagataaagaaaatgtggcatatgtatattgtagaatactactcagccataaaaaagaatgaaataatgtcttttgcagcaactgggatggaactggaggctattattctaagtgaagtaattctggaatcaaaatctaaatccaacatgttctcatttacaggtggtttctaagcttatggatatgcaagggcatacagagtggtataatgtacattggagactcagaaggctggcaagcaggagagaggtgagagatgaaaaagtacctattggatatagtgttcaggtggtgggtgcactaaaattctagacttctccatggtaccgttcatccatgtaaccaaaaaatcactcatacccctaaagctactgaaataaaaaaa

SEQ ID NO: 424 - DNA, 231 bp, Homo sapiens
  source 1..231: mol_type = other DNA
tcgtatttcttacttgaaaatcagtaaattgttattctagtttacacagttccttttttttgagatttataaatttgagactactctaaaaaatgaacccactgttgggcttacaataccaatttctagttctacagagccaggctttcgaacacagaaaattcaccagtaagtactttcttgtcatatcctttgacaggtaataatttaccctctccttggggacacccc

SEQ ID NO: 425 - DNA, 6031 bp, Homo sapiens
  source 1..6031: mol_type = other DNA
gggggaggagccaagatggccgaataggaacagctccggtctacagctcccagcgtgagcgacgcagaagacgggtgatttctgcatttccatctgaggtaccgggttcatctcactagggagtgccagacagtgggcgcaggccagtgtgtgtgcgcaccgtgcgcgagccgaagcagggcgaggcattgcctcacctgggaagcgcaaggggtcagggagttccctttccgagtcaaagaaaggggtgacggacgcacctggaaaatcgggtcactcccacccgaatattgcgcttttcagaccggcttaagaaacggcgcaccacgagactatatcccacacctggctcagagggtcctatgcccacggaatctcgctgattgctagcacagcagtctgagatcaaactgcaaggcggcaacgaggctgggggaggggcgcccgccattgcccaggcttgcttaggtaaacaaagcagccgggaagctcgaactgggtggagcccaccacagctcaaggaggcctgcctgcctctgtaggttccacctctgggggcagggcacagacaaacaaaaaggcagcagtaacctctgcagacttaagtgtccctgtctgacagctttgaagagagcagtggttctcccagcactcagctggagatctgagaacgggcagactgcatcctcaagtgggtccctgacccctgacccccgagcagcctaactgggaggcaccccccagcaggggcacactgacacctcacacggcagggtattccaacagacctgcagctgagggtcctgtctgttagaaggaaaactaacaaccagaaaggacatctacaccgaaaacccatctgtacatcaccatcatcaaagaccaaaagtagataaaaccacaaagatggggaaaaaacagaacagaaaaactggaaactctaaaacgcagagcgcctctcctcctccaaaggaacgcagttcctcaccagcaacagaacaaagctggatggagaatgattttgaccagctgagagaagaaggcttcagacgatcaaattactctgagctacgggaggacattcaaaccaaaggcaaagaagttgaaaactttgaaaaaaatttagaagaatgtataactagaataaccaatacagagaagtgcttaaaggagctgatggagctgaaaaccaaggctcgagaactacgtgaagaatccagaagcctcaggagccgatgcgatcaactggaagaaagggtatcagcaatggaagatgaaatgaatgaaatgaagtgagaagggaagtttagagaaaaaagaataaaaagaaatgagcaaagcctccaagaaatatgggactatgtgaaaagaccaaatctacgtctgattggtgtacctgaaagtgatgtggagaatggaaccaagttggaaaacactctgcaggatattatccaggagaacttccccaatctagcaaggcaggccaacgttcagattcaggaaatacagagaacgccacaaagatactcctcaagaagagcaactccaagacacataattgtcagattcaccaaagttgaaatgaaggaaaaaatgttaagggcagccagagagaaaggtcgggttaccctcaaaggaaagcccatcagactaacagcggatctctcggcagaaaccctacaagcaagaagagagtgggggccaatattcaacattcttaaagaaaagaattttcaacccagaatttcatatccagccaaactaagcttcataagtgaaggagaaataaaatactttatagacaagcaaatgctgagagattttgtcaccaccaggcctgccctaaaagagctcctgaaggaagcgctaaacatggaaaggaacaaccggtaccagctgctgcaaaatcatgccaaaatgtaaagaccatcgagactaggaagaaactgcatcaactaacgagcaaaatcaccagctaacatcataatgacaggatcaaattcacacataacaatattaactttaaatataaatggactaaattctgcaattaaaagacacagactggcaagttggataaagagtcaagacccatcagtgtgctgtattcaggaaacccatctcacgtgcagagacacacataggctcaaaataaaaggatggaggaagatctaccaagcaaatggaaaacaaaaaaaggcaggggttgcaatcctagtctctgataaaacagactttaaaccaacaaagatcaaaagagacaaagagggccattacataatggtaaagggatcaattcaacaagaggagctaactatcctaaatatttatgcacccaatacaggagcacccagattcataaagcaagtcctgagtgacctacaaagagacttagactcccacacattaataatgggagactttaacaccccactgtcaacattagacagatcaacgagacagaaagtcaacaaggatacccaggaattgaactcagctctgcaccaagcagacctaatagacatctacagaactctccaccccaaatcaacagaatatacatttttttcagcaccacaccacacctattccaaaattgaccacatagttggaagtaaagctctcctcagcaaatgtaaaagaacagaaattataacaaactatctctcagaccacagtgcaatcaaactagaactcaggattaagaatctcactcaaagccgctcaactacatggaaactgaacaacctgctcctgaatgactactgggtacataacgaaatgaaggcagaaataaagatgttctttgaaaccaaggagaacaaagacaccacataccagaatctctgggacgcattcaaagcagtgtgtagagggaaatttatagcactaaatgcctacaagagaaagcaggaaagatccaaaattgacaccctaacatcacaattaaaagaactagaaaagcaagagcaaacacattcaaaagctagcagaaggcaagaaataactaaaatcagagcagaactgaaggaaatagagacacaaaaaacccttcaaaaaatcaatgaatccaggagctggttttttgaaaggatcaacaaaattgatagactgctagcaagactaataaagaaaaaaagagagaagaatcaaatagacacaataaaaaatgataaaggggatatcaccaccgatcccacagaaatacaaactaccatcagagaatactacaaacacctctacgcaaataaactagaaaatctagaagaaatggatacattcctcgacacatacactctcccaagactaaaccaggaagaagttgaatctctgaatagaccaataacaggctctgaaattgtggcaataatcaatagtttaccaaccaaaaagagtccaggaccagatggattcacagccgaattctaccagaggtacaaggaggaactggtaccattccttctgaaactattccaatcaatagaaaaagagggaatactccctaactcattttatgaggccagcatcattctgataccaaagccgggcagagacacaaccaaaaaagagaattttagaccaatatccttgatgaacattgatgcaaaaatcctcaataaaatactggcaaaccgaatccagcagcacatcaaaaagcttatccaccatgatcaagtgggcttcatccctgggatgcaaggctggttcaatatacgcaaatcaataaatgtaatccagcatataaacagagccaaagacaaaaaccacatgattatctcaatagatgcagaaaaagcctttgacaaaattcaacaacccttcatgctaaaaactctcaataaattaggtattgatgggacgtatttcaaaataataagagctatctatgacaaacccacagccaatatcatactgaatgggcaaaaactggaagcattccctttgaaaactggcacaagacagggatgccctctctcaccgctcctattcaacatagtgttggaagttctggccagggcaatcaggcaggagaaggaaataaagggtattcaattaggaaaagaggaagtcaaattgtccctgtttgcagatgacatgattgtttatctagaaaaccccatcgtctcagcccaaaatctccttaagctgataagcaacttcagcaaagtctcaggatacaaaatcaatgtacaaaaatcacaagcattcttatacaccaacaacagacaaacagagagccaaatcatgggtgaactcccattcacaattgcttcaaagagaataaaatacctaggaatccaacttacaagggatgtgaaggacctcttcaaggagaactacaaaccactgctcaaggaaataaaagaggacacaaacaaatggaagaacattccatgctcatgggtaggaagaatcaatatcatgaaaatggccatactgcccaaggtaatttacagattcaatgccatccccatcaagctaccaatgactttcttcacagaattggaaaaaactactttaaagttcatatggaaccaaaaaagagcccgcattgccaagtcaatcctaagccaaaagaacaaagctggaggcatcacactacctgacttcaaactatactacaaggctacagtaaccaaaacagcatggtactggtaccaaaacagagatatagatcaatggaacagaacagagccctcagaaataatgccacatatctacaactatctgatctttgacaaacctgagaaaaacaagcaatggggaaaggattccctatttaataaatggtgctgggaaaactggctagccatatgtagaaagctgaaactggatcccttccttacaccttatacaaaaatcaattcaagatggattaaagatttaaacgttaaacctaaaaccataaaaaccctagaagaaaacctaggcattaccattcaggacataggcgtgggcaaggacttcatgtccaaaacaccaaaagcaatggcaacaaaagacaaaattgacaaatgggatctaattaaactaaagagcttctgcacagcaaaagaaactaccatcagagtgaacaggcaacctacaacatgggagaaaattttcgcaacctactcatctgacaaagggctaatatccagaatctacaatgaactcaaacaaatttacaagaaaaaaacaaacaaccccatcaaaaagtgggcgaaggacatgaacagacacttctcaaaagaagacatttatgcagccaaaaaacacatgaagaaatgctcatcatcactggccatcagagaaatgcaaatcaaaaccactatgagatatcatctcacaccagttagaatggcaatcattaaaaagtcaggaaacaacaggtgctggagaggatgcggagaaataggaacacttttacactgttggtgggactgtaaactagttcaaccattgtggaagtcagtgtggcgattcctcagggatctagaactagaaataccatttgacccagccatcccattactgggtatatacccaaatgagtataaatcatgctgctataaagacacatgcacacgtatgtttattgcggcactattcacaatagcagagacttggaaccaacccaaatgtccaacaatgatagactggattaagaaaatgtggcacatatacaccatggaatactatgcagccataaaaaatgatgagttcatatcctttgtagggacatggatgaaattggaaaccatcattctcagtaaactatcgcaagaacaaaaaaccaaacaccgcatattctcactcataggtgggaattgaacaatgagatcacatggacacaggaaggggaatatcacactctggggactgtggtggggtcgggggaggggggagggatagcactgggagatatacctaatgctagatgacacattagtgggtgcagcgcaccagcatggcacatgtatacatatgtaactaacctgcacaatgtgcacatgtaccctaaaacttagagtataataaaaaaaaaaaa

SEQ ID NO: 426 - DNA, 1848 bp, Homo sapiens
  source 1..1848: mol_type = other DNA
ctctccctctccctctccctcctctccctcctctccctcctctccctcctctccctcctctccctctctttccacggtctccctctgatgcagagctgaagctggactgtactgctgccatctcggctcactgcaacctccctgcctgattctcctgcctcagcctgccgagtgcctgcgattgcaggcgcgcgccgccacgcctgactggttttcgtatttttttggtggagacggggttttgctgtgttggccgggctggtctccagctcctaaccacgagtgatccaccagcctcggcttcccgaggtgctgggattgcagacggagtctcgttcactcagtgctcaatggtgcccaggctggagtgcagtggcgtgatctcggctcgctacaacctccacctcccagcagcctgccttggcctcccaaagtgctgagattgcagcctctgcccggccgccaccccatctgggaagtgaggagcgtctctgcctggccgccatcccatctaggaagtgaggagcgtctctgcccggccgcccatcgtctgagatgtggggagcgcctctgccctgctgccccgtctgggatgtgaggagcgtctctgcccggccaccccgtctgagaagtgaggagcccctccgcccggcagccgcaccgtctgagaagtgaggagtccctccctccggcagccaccccgtctgggaagtgaggagcgtctccgccaggccagccgccccgtctgggagggaggtgggggtcagccccccgcccggccagccgccccgtccgggagggaggtgggggagtcagccccccgcccggccagccgccccgtccgggagggaggtagggagggtcagccccctgcccggccagccgccccatccgggaggtgaggggcgcctctgcccggccgcccctactgggaagtgaggagcccctctgcccggccagccgccccgtccgggagggaggtgggggggtcagccccccgcccggccagctgccccgtctgggagggaggtgggggggtcagccccccgcccggccagcctccccgtccgggagggaggtggggggatcagccccccgcccggccagccgccccgtccgggaggtgaggggcgcctctgcccggccgcccctactgggaagtgaggagcccctctgcccggccagccgccccgtccgggagggaggtggggggggtcagccatccgtccggccagccgccccatccgggaggtgaggggcgcctctgcccggccgcccctactgggaagtgaggagcccctctgcccggccaccaccccgtctgggaggtgtacccaacagctcattgagaatgggccatgatgacaatggcggttttgtggaatagaaaggggggaaaggtggggaaaagattgagaaatcggatggttgccgtgtctgtgtagaaagaggtagacatgggagacttttcattttgtgctgtactaagaaaaattcttcttccttgggatcctgttgatctgtgaccttgcccccaaccctgtgctctctgaaacatgtgctgtgtccactcagggttgaatggattaagggtggtgcaagatgtgctttgttaaacagatgcttgaaggcagcatgctccttaagagtcatcaccactccctaatctcaagtacccagggacacaaacactgcggaaggccgcagggtcctctgcctaggaaaaccagagacctctgttcacttgtttatctgctgaccttccctccactattgtcctgtgaccctgccaaatccccctctgcgagaaacacccaagaatgatcaataaaaaaaaaaaagaaaaaa

SEQ ID NO: 427 - DNA, 1141 bp, Homo sapiens
  source 1..1141: mol_type = other DNA
attctttcttaattcaaacacttctcttccttggctttctcaatactagacttttctgattttctttctcttgtcactcgttttcattcccctttgctggttcctccccacttctccagcctctaaatattggagtcccttggagctcaatatttggatctattcctccattccccatgccaataccatattcatatatctaactgcctacttgtcagctcaacttaaatatctaaaagtcattccaaatcaagacccttatgtgctccacccacatctaaatgagaatcctgtacagtcctccccatctcaattaataaaaatcctactcttccacttagtcttttatgcacaaagtcttcgagtcatccttgactcctttcctccatcacaccttaccactaagccatgagcaaatcctgtcacttccaccttcaaaatatacccagaatccagccacttctcaatatctctggtctaagctgtcatcatttctcacctcaattattgaaaaagctttctaatggtctccctccttctgccttactgcaccacagtctattttcagaacaacaactagagtaatccttttaaaacataaatcaaatcacttcactcctctgtacaataccctctaatgacttcccctgtacctcagagtaagagccaaaattctcactgtcactcttaaggcctctgtatgtttagaaccctattacttctccgacctcatatcctaccattctctaacctttgcttactttgctcctaataggttagccaccagctgttccctaaagatatcagacatgattccaccccatgagctttccatttgctgcgctgcagctttaaataatttcccgttacattccacatgatttacattctcacctcattcaaataattgctcaaatacctcttttccactgagctccttccaaactatccatttaaaattgcacacccaacactccctgcacttcttccaggctttacataccatcacaatgtttatgtccttacaaaaaaaatgtttatttcacttatgattttatagtattactatcagtttcctccaactaaaatgtattttccaagaggccaggaatttgagtgtgttttattcacctgtttgtcc

SEQ ID NO: 428 - DNA, 6125 bp, Homo sapiens
  source 1..6125: mol_type = other DNA
tccattccaagatggctgaataggaacagatctggtctgcagctcccagtgtgatcaatgcagaagacaggtgatttctgcatttccaactaaggtacctggttcatctcattgggactgattggacagtgggtgcagcccatggagggcaagctggaggagggcagggcatcacctcacctgggaagagcaaggggccaggggatttccctttcctagccaagggaagctgtgacagtctgtacctggaaaaatgggacactcccacgcaaatactgtgcttttcccaaggtcttagcaactagcagacaaggagattctctcccatgcctggcttggcagtttgcacacccacggagccttgctcactgctagcgctgcagtctgagattgaactgtgaggcagcaggctgactgggggagggcgttcaccattgctgaggcttgagtaggtaaacaaagtggccgggaagcttgaactgggcagagcccaccgcagctcagcaaggcctactgcctctatagactccacctctgtgggaagggcatagctgaacaaaaggcagcacacaacttctgcagacttagatgtccctgtctgacagctctgaagagaaaagtggttttcctagcacagtgtttgagttctgggaacagagagactgcctcctcaagtgggtacctggccccgtgtagcctaactgggagacacctcctagtaggggccaacagacacctcatataggtgggtgcccctctgggacgaggcttccagaggaaggatcaggcagcaatatttgctgttctgcaatattttctgttctgcagcctccactggtgatacccaggaaaaatctggagtggacctccagcaaactccaacagacctgcagctgagggacttgactgttagaaggaaaactaaccaacagaaaggaatagcatcaacatcaacaaaaagaacatctacaccaaaaccccatctgtgggtcactaacatcaaagaccaaaggtagataaaaccacaaagatggggagaaaccagagcagaaaagctgaaaattctaaaaaccagagcacttcttctctaaaggatcacagctcctcaccagaaatggaacaaagctggacagagaatgactttgacaagttgacagatgtaggcttcagaaggtcagaaataatgaaaaacttatctgagctaaaggagcatgttcaaacccattgcaaggaagctaaaaaccttgaaaaaagttagacaaatggctaactaaaataaacagtgaagagaagaccttaaatgacctgatagagatgaaaaccatggcacaagaacttcatgatgtatgcacaagcttcaatagccaattccatcaagtggaagaaagggtgtcagtgattgaagatcaaatcaatgaaataaagtgagaagacaaagttagagaaaaagagtaaaaagaaatgaatgaagcctgcaagaaatatgggactatgtgaaaaaaccaaatctctgttgaattggtgtacctgaaagcagtggggagaatggaaccaagttggaaaaccctcttcaggatattatccaggagaacttcccaatctagcaaggcagaccaacattcaaattcaggaaatacagagaacaccacaaaggtactcattgagaagagcaaacccaagacataattgtcagattcaccaaggttgaaataaggaaaaaatgttaagggcagccggagagaaaggtcaggtcacccacaaagggaagcccatcagactaacagcagatctctctgcaaaaaccctacaagccagaagagagtgggggccaatagtcaacgttcttaaagaaaagaactttcaacccagaacttcatatccagccaaactaaccttcataagtgaaggagaaataaaatcctttacagacaagcagatgctgagagattttgtcaccaccaggcctgccttacaagagctcctgaaggaaacaataaacatgaaaagaaacaactgttaacagccactgcaaaaacatgccaaattgtaaagaccattgatgctatgaagaaactgcaatgaacaggcaaaataaccagcaaacattataatgacgggattaaattcacacataacaatattaaccttcaatgtaaatggactaaatgccccaattaaaagacaaagactggcaaattggataaagagtcaagacccatcagtgtgttgtattcaggagacccatctcacatgcagagacacatagactcaaaataaagggatggaggaagatctaccaagcaaaaggaaagcaaaaaaaaaaaaaaaagcaggggttgcattcctgtctttgataaaacagactttaaactaacaaagatcaaaagagacaaagaatggcattacataatggtaaatggatcaatgcaacaagaagagttaactattctaagtatatatgcacccaatacaggagcacctagattcataaagcaagtccttagagatctacaaagagacttagactcccacacaataataatgggagacgattaacaccccactctcaatattagacagatcaatgagacagaaggttaacaaggatatccaggacttgaactcagctctgcaccaagcagacctaatggacatctacagaactttccaccccaaatcaacagaatatacattcctctcagcaacacatcacacttattctaaaattgaccagataattggaattaaagcactcctcagcaaatataaaagaacagaaattacaacaaactgtttctcagaccacagtgccatcaaattagagctcaggattaagaaactcactcaaaactgcacaactacatggaaactgaacaacctactcctgaatgactactaggtaaataatgaaatgaaggctgaaataaagatgttctttgaaaccaatgagaacaaagacacaatgtaccagaatcactgggacacatttaaagcagtgtgtagtgggaaatttatagcactaaatgcccacaagagaaagcaggaaagatctaaaatcgacacccaagcattacaattaaaagaactagagaagcaagagcaaacacattcaaaagctagcagaaggcaagaaataactaagatcagagcagaatggaaaatatagagacacaaaaatacccttcaaaaaatcaatgaatccaggagctggttttttgaaaagctcaacaaaattgatagaccactagcaagactaataaagaagaaaagagagaataatcaaatagatgcaataaaaaatgataaaggggatatcaccactgatcccacagaaatacaaactacatcagagaatactataaaaacctctatgcaaataaactagaaagtctagaagaaatggataaattcctggacacacgcacccttccaatactaaaccaggaagaagttgaatctctgaatagaccaataaaagactgtgaaattgaggcaataattaatagcctaccaaccaaaaaaagtccaggacccgaaggattcacagctgaattctaccagaggtacaaagaggagctggtaccattccttctgaaactattccaatcaatagaaaaagaaggaatcctccctaactcattttatgaggccagcatcatcctgataccaaaggctggcagagacacaacaaaaaaagaaaaatttagaccaatatccctgatgaacatcgatgtgaaaatcctcagtaaaatactggcaaaccaaatccagcagcacatcaaaaagcttatccaccaggatcaagtcagcttcatccctgggaagcaaggctggttgaacatatgcaaatcaataaatgtaatccatcacataaacagaaccaatgacaaaaaccacatgattatctcaatagatgcagaaaaggcctttgacaaaactcaacagcgcttcatgctaacaactctgaataaactaggtattgatgaaacgtatctgaaaataatatgagctatttatgacaaacccacagccaatatcatactgaatgggcataactggaagcattccctttgaaaactggcacaagacaaggatgccctctttcaccactcctattcaacatagtgttggaagttctggccagggcaatcaggaaagagaaagaaataaaaggtattcaattaggaaaagaagaagtcaaattgtccctgtttgcagatgacatgattgtatatttagaaaaccccattgtttcagctcaaaatctccttaagctgataagcaacttcagcaaagtctcaggatacaaaatcaatgtgcaaaaatcacaagcattcctatacggcaacaacagacaaacagagagccaaatcataagtaaactcccattcacaattgctacaaagagaattaaatacctaggaatccaacttacaagggatgtgaaggacctcttcaaggagagctacaaaccactgctcaatgaaataaaagaggatacaaacaaatggaagaacattccatgcttacgggtaggaagaatcagtatggtgaaaatggccatacggtgcaaggtaatttatagattcaatgccatccctattaacctaccaatgactttcttcacagaattggaaaaaactactttaaagttcatatggaaccaaaaaagagcccgcattcccaagacaatcctaagcagaaagaacaaagctagaggcatcatgctacctgacttcaaattatattataaggccacagtaaccaaaacagcatggtactggtaacaaaacagatatatacaccaatggaacagaacagaggcctcagaaataacaccacacatctacaaccatctgatctttgacaaacctgacaaaaacaagaaaaaggaaaaggattccctattttacaaatggtcctgggaaagaaaactggctagccatatgtagaaagctgaaactggatcccttccttacaacttatacaaaaattaatccagatagattaatgacttaaatgttagacttaaaaccacaaaaaccctagaagaaaacctaggcaatgccattcaggacataggcatgggcaaggacttcatgactaaaacaccaaaagcaatgggaataaaagccaaaatagacaaatgggatctaattaaactaaagaacttctgcatggcaaaagaaactaccatcagagtgaataggcaacctacagaatgggagaaaatttttgccctctactgatctgaaaaagggctaatatccagaatctacaaagaattcaaacaaatttacaggaaaaaaacaaccccgtcaacaagtgggcaaaggatatgaacagacacttctcaaaagaagacatctatgcagccaacagacacatgaaaagatgctcatcatcactggtcatcagagaaatgtaaatcaaaatcacaccagttagaacggtgatcattaaaaagtcaggaaacaacagatgctggagaggatgtagagaaataggaatgcttttacattgttggtgggagtttaaattagttcaaccattgtggaagacagtgtggtgattcctcaaggatctagaactagaaataccatttgatccagccatcccattactgggtatatacccaaaggattataaatcatgctactataacatgcatgcacacgtatgtttattgtggcactattcacaataacaaagacttggaaccaacccaaatgtccatcaatgatagactggattaagaaaatgtagcacatatacaccatggaatattatgcagccataaaaatgaatgagttcatgtcctttgcagggacatgggtgaagctggaaaccatcattctcagcaaactatcacaaggactgaaaatcaaacactgcatgttcctactcataggtgggaattgaacaatgagaacacttggacacagggcagggatcatcacacaccagagcctttcatgggatgggaggcttgcggatggatagcattagaagaaatacctaatgtaaatgacgagttgatgggtgcagcaaaccaacatggcacatttatacctatgtatcaaacctacacattgtgcatgtgtaccctagaacttaaagtataa

SEQ ID NO: 429 - DNA, 7529 bp, Homo sapiens
  source 1..7529: mol_type = other DNA
ctggtgcccaacgtggaggcttttctctagggtgaaggtacgctcgagcgtggtcattgaggacaagtcgacgagagatcccgagtacgtctacagtcagccttacggtaagcttgtgtgctcggaagaagctagggtgataatggggcaaactaaaagtaaaattaaaagtaaatatgcctcttatctcagctttattaaaattcttttaaaaagagggggagttaaagtatctacaaaaaatctaatcaagctatttcaaataatagaacaattttgcccatggtttccagaacaaggaactttagatctaaaagattggaaaagaattggtaaggaactaaaacaagcaggtaggaagggtaatatcattccacttacagtatggaatgattgggccattattaaagcagctttagaaccatttcaaacagaagaagatagcatttcagtttctgatgcccctggaagctgtttaatagattgtaatgaaaagacaaggaaaaaatcccagaaagaaacggaaggtttacattgtgaatatgtagcagagccggtaatggctcagtcaacgcaaaatgttgactataatcaattacaggaggtgatatatcctgaaacgttaaaattagaaggaaaaggtccagaattagtggggccatcagagtctaaaccatgaggcacaagtcctcttccagcaggtcaggtgcccgtaagattacaacctcaaacgcaggttaaagaaaataagacccaaccgccagtagcttatcaatactggccgccggctgaacttcagtatcggccacccccagaaagtcagtatggatatccaggaatgcccccagcaccacagggcagggcgccataccctcagccacccactaggagacttaatcctacggcaccacctagtagacagggtagtgaattacatgaaattattgataaatcaagaaaggaaggagatactgaggcatggcaattcccagtaacgttagaaccgaagccacctggagaaggagcccaagagggagagcctcccacagttgaggccagatacaagtctttttcgataaaaatgctaaaagatatgaaagaaggagtaaaacagtatggacccaactccccttatatgaggacattattagattccattgctcatggacatagactcattccttatgattgggagattctggcaaaatcgtctctctcaccctctcaatttttacaatttaagacttggtggattgatggggtacaagaacaggtccgaagaaatagggctgccaatcctccagttaacatagatgcagatcaactattaggaataggtcaaaattggagtactattagtcaacaagcattaatgcaaaatgaggccattgagcaagttagagctatctgccttagagcctgggaaaaaatccaagacccaggaagtacctgcccctcatttaatacagtaagacaaggttcaaaagagccctatcctgattttgtggcaaggctccaagatgttgctcaaaagtcaattgccgatgaaaaagcccgtaaggtcatagtggagttgatggcatatgaaaacgccaatcctgagtgtcaatcagccattaagccattaaaaggaaaggttcctgcaggatcagatgtaatctcagaatatgtaaaagcctgtgatggaatcggaggagctatgcataaagctatgcttatggctcaagcaataacaggagttgttttaggaggacaagttagaacatttggaggaaaatgttataattgtggtcaaattggtcacttaaaaaagaattgcccagtcttaaacaaacagaatataactattcaagcaactacaacaggtagagagccacctgacttatgtccaagatgtaaaaaaggaaaacattgggctagtcaatgtcgttctaaatttgataaaaatgggcaaccattgtcgggaaacgagcaaaggggccagcctcaggccccacaacaaactggggcattcccaattcagccatttgttcctcagggttttcagggacaacaacccccactgtcccaagtgtttcagggaataagccagttaccacaatacaacaattgtcccccgccacaagcggcagtgcagcagtagatttatgtactatacaagcagtctctctgcttccaggggagcccccacaaaaaatccccacaggggtatatggccccctgcctgaggggactgtaggactaatcttgggaagatcaagtctaaatctaaaaggagttcaaattcatactagtgtggttgattcagactataaaggcaaaattcaattggttattagctcttcaattccttggagtgccattccaggagacaggattgctcaattattactcctgccatatattaagggtggaaatagtgaaataaaaagaataggagggcttgtaagcactgatccaacaggaaaggctgcatattgggcaagtcaggtctcagagaacagacctgtgtgtaaggccattattcaaggaaaacagtttgaagggttggtagacactggagcagatgtctctatcattgctttaaatcagtggccaaaaaattggcctaaacaaaaggctgttacaggacttgtcggcgtaggcacagcctcagaagtgtatcaaagtactgagattttacattgcttagggccagataatcaagaaagtactgttcagccaatgattacttcaattcctcttaatctgtggggtcgagatttattacaacaatggggtgcggaaatcaccatgcccgctccattatatagccccacgagtcaaaaaatcatgaccaagatgggatatataccaggaaagggactagggaaaaatgaagatggcattaaaattccagttgaggctaaaataaatcaaaaaagagaaggaatagggtatcctttttaggggcggccactgtagagcctcctaaacccataccattaacttggaaaacagaaaaaccggtgtgggtaaatcagtggccgctaccaaaacaaaaactggaggctttacatttattagcaaatgaacagttagaaaagggtcatattgagccttcgttctcaccttggaattctcctgtgtttgtaattcagaagaaatcaggcaaatggcgtatgttaactgacttaagggctgtaaacgccgtaattcaacccatggggcctctccaacctgggttgccatctccagccatgatcccaaaagattggcctttaattataattgatctaaaggattgcttttttaccatccctctggcagagcaggattgtgaaaaatttgcctttactataccagccataaataataaagaaccagccaccaggtttcagtggaaagtgttacctcagggaatgcttaatagtccaactatttgtcagacttttgtaggtcgagctcttcaaccagttagagaaaagttttcagactgttatattattcattatattgatgatattttatgtgctgcagaaacgaaagataaattaattgactgttatacatttctgcaggcagaggttgccaatgctggactggcaatagcatctgataagatccaaacctctactccttttcattatttagggatgcagatagaaaatagaaaaattaagccacaaaaaatagaaataagaaaagacacattaaaagcactaaatgattttcaaaaattactaggagatattaattggattcggccaactctaggcattcctacttatgccatgtcaaatttgttctctatcttaagaggagactcagacttaaatagtaaaagaatgttaaccccagaggcaacaaaagaaattaaattagtggaagaaaaaattcagtcagcgcaaataaatagaatagatcccttagccccactccaacttttgatttttgccactgcacattctccaacaggcatcattattcaaaatactgatcttgtggagtggtcattccttcctcacagtacagttaagacttttacactgtacttggatcaaatagctacattaattggtcagacaagattacgaataataaaattatgtggaaatgacccagacaaaatagttgtccctttaaccaaggaacaagttagacaagcctttatcaattctggtgcatggcagattggtcttgctaattttgtgggaattattgataatcattacccaaaaacaaagatcttccagttcttaaaattgactacttggattctacctaaaattaccagacgtgaacctttagaaaatgctctaacagtatttactgatggttccagcaatggaaaagcagcttacacagggccgaaagaacgagtaatcaaaactccatatcaatcggctcaaagagcagagttggttgcagtcattacagtgttacaagattttgatatcaatattatatcagattctgcctatgtagtacaggctacaagggatgttgagacagctctaattaaatatagcatggatgatcagttaaaccagctattcaatttattacaacaaactgtaagaaaaagaaatttcccattctatattactcatattcgagcacacactaatttaccagggcctttgactaaagcaaataaacaagctgacttactggtatcatctgcactcataaaagcacaagaacttcatgctttgactcatgtaaatgcagcaggattaaaaaacaaatttgatgtcacatggaaactggcaaaagatattgtacaacattgcacccagtgtcaagtcttacacctgcccactcaagaggcaggagttaatcccagaggtctgtgtcctaatgcattatggcaaatggatgtcacgcatgtaccttcatttggaagattatcatatgttcatgtaacagttgatacttattcacatttcatatgggcaacttgccacacaggagaaagtacttcccatgttaaaaaacacttattgtcttgttttgctgtaatgggagttccagaaaaaatcaaaactgacaatggaccaggatattgtagtaaagctttccaaaaattcttaagtcagtggaaaatttcacatacaacaggaattccttataattcccaaggacaggccatagttgaaagaactaatagaacactcaaaactcaattagttaaacaaaaagaagggggagacagtaaggagtgtaccactcctcagatgcaacttaatctagcactctatactttaaattttttaaacatttatagaaatcagactactacttctgcagaacaacatcttactggtaaaaagaacagcccacatgaaggaaaactaatttggtggaaagataataaaaataagacatgggaaatagggaaggtgataacgtgggggagaggttttgcttgtgtttcaccaggagaaaatcagcttcctgtttggatacccactagacatttgaagttctacaatgaacccatcagagatgcaaagaaaagcacctccgcggagacggagacaccgcaatcgagcaccgttgactcacaagatgaacaaaatggtgacgtcagaagaacagatgaagttgccatccaccaagaaggcagagccgccaacttgggcacaactaaagaagctgacgcagttagctacaaaatatctagagaacacaaaggtgacacaaaccccagagagtatgctgcttgcagccttgatgattgtatcaatggtggtaagtctccctatgcctgcaggagcagctgcagctaactatacctactgggcctatgtgcctttcccgcccttaattcgggcagtcacatggatggataatcctatagaagtatatgttaatgatagtgtatgggtacctggccccatagatgatcgctgccctgccaaacctgaggaagaagggatgatgataaatatttccattgggtatcgttatcctcctatttgcttagggacagcaccaggatgtttaatgcctgcagtccaaaactggttggtagaagtacctattgtcagtcccatcagtagattcacttatcacatggtaagcgggatgtcactcaggccacgggtaaattatttacaagacttttcttatcaaagatcattaaaatttagacctaaagggaaaccttgccccaaggaaattcccaaagaatcaaaaaatacagaagttttagtttgggaagaatgtgtggccaatagtgcggtgatattacaaaacaatgaatttggaactattatagattgggcacctcgaggtcaattctaccacaattgctcaggacaaactcagtcgtgtccaagtgcacaagtgagtccagctgttgatagcgacttaacagaaagtttagacaaacataagcataaaaaattgcagtctttctacccttgggaatggggagaaaaaggaatctctaccccaagaccaaaaatagtaagtcctgtttctggtcctgaacatccagaattatggaggcttactgtggcctcacaccacattagaatttggtctggaaatcaaactttagaaacaagagatcgtaagccattttatactgtcgacctaaattccagtctaacagttcctttacaaagttgcgtaaagcccccttatatgctagttgtaggaaatatagttattaaaccagactcccagactataacctgtgaaaattgtagattgcttacttgcattgattcaacttttaattggcaacaccgtattctgctggtgagagcaagagagggcgtgtggatccctgtgtccatggaccgaccgtgggaggcctcaccatccatccatattttgactgaagtattaaaaggtgttttaaatagatccaaaagattcatttttactttaattgcagtgattatgggattaattgcagtcacagctacgggtgctgtagcaggagttgcattgcactcttctgttcagtcagtaaactttgttaatgattggcaaaaaaattctacaagattgtggaattcacaatctagtattgatcaaaaattggcaaatcaaattaatgatcttagacaaactgtcatttggatgggagacagactcatgagcttagaacatcgtttccagttacaatgtgactggaatacgtcagatttttgtattacaccccaaatttataatgagtctgagcatcactgggacatggttagacgccatctacagggaagagaagataatctcactttagacatttccaaattaaaagaacaaattttcaaagcatcaaaagcccatttaaatttggtgccaggaactgaggcaattgcaggagttgctgatggcctcgcaaatcttaaccctgtcacttgggttaagaccattggaagtactacaattataaatctcatattaatccttgtgtgcctgttttgtctgttgttagtctgcaggtgtacccaacagctctgaagagacagcaaccatcgagaacgggccatgatgacgatggcggttttgtcaaaaagaaaagggggaaa

SEQ ID NO: 430 - DNA, 418 bp, Homo sapiens
  source 1..418: mol_type = other DNA
aaaacaggtaaaaacaatgaacagacggttcacgttaagaggaatacgaaaagccaataacaatactgacataacaatcttatttgtaatgaaagaaatacaaattttaaaaatgacataccattttttaattacattggcaaaaattaaaccaaaaagaatacctacaattgaccaaggagtattctggcagggggagggaagtcacatacatatagtactaattagaggggtaaattgtataattaaagccctatgaaccagtcaaaccaatcattccacttttagaaactttctcaaggacataattaagcatgtaactcaaaatgtacaaggacattcactctgccactgcttgtagtaataaactgcagataatcaaaatgtctaacacagaaaaaagtgagtaaattatggt

SEQ ID NO: 431 - DNA, 1926 bp, Homo sapiens
  source 1..1926: mol_type = other DNA
aaaaagaagaaaatatgatgaaagttatttgtcttttggatttacttacttcggaaatagagatgcacctcatgctcagtgtgtattatgtaagaaaattttatcaaatagctctttagcccctagtaagcttcgaagacatttggaaactaaacatgctgcatataaagacaaagacataagctttttcaagcaacatctcgattcacctgaaaataataaacccccaacacctaaaattgtgaatacagataatgaaagtgctacagaagcatcatacaatgtaagttaccatatagcgctgagtggagaggctcatactattggagaattgcttatcaaaccttgtgcaaaagatgtagtgatgcggatgtttgatgaacaatatagtaaaaaaatagatgcagtacagctatcaaacagtactgttgcacgtcgaattaaggatctagctgctgacattgaagaagagcttgtttgtagactgaaaatttgcgatgggttttcactgcaactagatgaatcagctgatgtttcaggacttgctgtgctgcttgtgtttgttcgttataggtttaataagtctattgaggaagacctactcctgtgtgaatctttgcaaagtaatgctaccggtgaagaaatattcaactgtatcaacagttttatgcagaaacatgaaattgaatgggaaaaatgtgttgatgtttgtagtgatgcttctagggcagtggatgggaaaattgccgaagctgtcaccttaataaaatatgtggctcccgaaagcaccagtagtcactgcctattatacagacatgcactggcagttaaaataatgcctacatctctaaaaaatgtgctagaccaggcagtacaaatcatcaattatattaaagctcgaccacatcaatccagactattaaaaattttatgtgaggaaatgggtgctcagcacacagcacttcttctaaatacagaggtgaggtggctttctcgaggtaaagttcttgtaagactttttgaacttcgtcgtgaacttttggttttcatggattctgcttttcgactatctgattgtttaacaaattcatcttggctgctaagacttgcatatcttgcagatatttttactaaattaaatgaagttaatttgtcaatgcaaggaaaaaatgtgaccgtttttacagtatttgataaaatgtcgtcattgttaagaaaattggaattttgggcctcatctgtagaagaagaaaactttgattgttttcctacactcagtgattttttgactgaaattaattctacagttgataaagatatttgcagtgccattgtgcagcacctaaggggtttgcgcgctactctgttaaaatactttcctgtaacaaatgacaataatgcttgggttagaaatccatttacagttactgttaaaccagcttcattagtagcacgggactatgagagcctgattgatttaacatctgattctcaagtgaagcaaaattttagtgaactttcactaaatgatttttggagtagcctaattcaggaatacccaagcattgcaaggcgtgcagtgcgtgtacttcttccttttgctacaatgcacctgtgtgaaacggggttttcatattacgctgcaacaaaaacaaaatataggaaaagacttgatgctgcacctcatatgcgaatccgacttagcaatattacacctaatattaagcggatatgtgataaaaagacacaaaaacactgttctcattaaaattggaggagtttgcatgtctcatgataaccaaatgtaagatgaaaataaaagatgatttacttcatctctggtatttgggggatttaaataaaatgattccatttttttatactatttagattttaagaaggctaaagaatcaaacgttttaaaca

SEQ ID NO: 432 - DNA, 6146 bp, Homo sapiens
  source 1..6146: mol_type = other DNA
gggcggttccaagatggccgaataagaacagctccagtccacagctcccagcatgagcgacgcagaagacggatgatttctgcatttccaactgaggtaccgggttcatctcactggggactgtcggacagtgggttcaggacagtgggtgcagcgcaccgagcgtgagccgaagcagggcgaggcatcacctcacctgggaagcacaaggggtcagggaattcccttttctagccaaggaaaggggtgacagacagcatctgaaaaattgggtcattcccaccctaatactacacttttccgatggtcttagcaaacggcacaccaggagattatatcccgcgcatggctcagagggtcctacgcccacggagcctcgctcattgctagcacagcagtctgagatcaaactgcaaggcggcagcaaggctgggggaggggcgcccgccattgctgagacttcagtaggtaaacaaagcagccaggaagctcgaactgggtggagcccaccacagctcaaggaggcctgcctgcctcttgtagactccacctctggcagcagggcatagccaaacaaaaggcagcagaaacctctgcagacttaaatgtccctgtctgacagattggaagacagcagtggttctcccagcatgcagcttgagatccgagaacggacagactgcctcctcaagtgggtccctgacccccgagtagcctaactgggaggcaccccccagtaggggcagactgacacctcacacggccaggtacccctctgagacaaaatttccagaggaacgatcagacagcagcatttgctgttcaccaatattcgctgttctgcagcctccgctgctgatacccaggcaaacagggtctggagttgagctctggcaaactccgacagacctgcagctgagggtcctgactgttagaaggaaaactaacaaacagaaagaacatccacaccaaaaccccatctgcatgtcaccatcatcaaagaccaaaggtagataaaaccacaaagatggggaaaaaacagaacagaaaaactgaaaattctaaaaatcagagaacctcttcttctccaaaggaacgcagctcctcaccagcagcggaacaaagctggatggagaatgactttgatgagttgagagaagaaggcttcagacgatcaaacttctccgagctaaaggaggaagttcgaacccatggcaaagaagtcaaaaaccttgaaaaaagattagacaaatggctaactagaataactaatacacagaagtccttaaaggacctgatggagctgaaaaccacggcacgagaactacatgatgaatgcacaagcctcactaaccaattcgatcaactggaagaaagggtatcttgatggaagatcaaatgaatgaaatgaagtgagaagagaagtttagagaaaaaagaataaaaagaaacaaacaaaccctccaagaaatatgggactatgtgaaaagaccaaatctacatctgattggtgtacctgaaagtgacggggagaatggaaccaagttggaaaacactctgcaggaaattatgcaggagaacttccccaatccagcaaggcaggctaacattcaaattcaggaaatacagagaagtccacaaagatactccttgagaaggacaactccaagacacttaattgtcagattcaccaaagtggaaatgaaggaaaaaatgttaagggcagccagagacaaaggtcgggttacccacaaagggaagcccatcagactaatagctgatcgctcggcagaaattctacaagccagaagagagtgggggccaatattcaacattcttaaagaaaagaattttcaacacagaatttcatatccagccaaactaagcctcataagtgaaggagaaataaaatcctttacagacaagcaaatgctgagagattttgtcaccaccaggcctgccctacaagagctcctgaaggaagcactaaacatggaaaggaacaactggtaccagccactgcaaaaacatgccaaatcgtaaagaccatcaaggttaggaagaaactgcatcaactaacgagcaaaataaccagctaacatctcaatgacaggatcaaattcacacataacaatataaaccttaaatgtaaatgggctaaatactccaattaaaagacacagactggcaagttggataaagagtcaagacccatcagtgtgctgtattcaggaaacccttctcacgtgcagagacacacaggctcaaaataaagggatggaggaagatctaccaagcaaatggaaaacaaaacaaggcaggggttgcaaccctagtctctgataaaacagactttaaaccaacaaagatcaaaagagacaaagaaggccattacataatggtaaagggatcaattcaacaagaagagctaactaacctaaatatatatgcacccagtacaggagcacccggattcataaaggaagtccttagaggcctacgaagaggcttagactcccacacaataataatgggagactttaacacccactgtcaacattagacagatccacaagacagaaagttaacaaagatatctaggaattgaactcagccctgcaccaagtggagctaatagacatctacagaactctccaccccaattcaacaaaatatacattcttctcagcaccacaccgcacttgttccaaaattgaccacatagttggaagtaaagcactcctcagcaaatgtaaaagaacagaaatgataacaaactgtctctcagaccacagtgcgatcaaactagaactcaagattaagaaactcactcaaaaccgctcaactacatggaaactgaacaacctgctcctgaatgactactgggtacataacgaaatgaaggcagaaataaagaagttctttgaaaccaatgagaacaaagatacaacataccagaatctctgggagacatttaaagcagtgtgtagagggaaatttatagcactaaatgcccacaagagaaagcaggaaagatctaaaattgacaccctaacaccacaattaaaagaactagagaagcaagagcaaacacattcaaaagctagcagaaggcaagaaataactaagatcagagcagaactgaaggagacagagacacaaaaaacccttcaaaaaatcaatgaatccaggagctggttttttttaaaagatcaacaacattgacagaccactagcaagactaataaagaagaaaagagagaagaatcaaatagatgcaataaaaaatgataaaggggatatcaccactgatcccacagaaatacaaactaccatcagagaatactataaacacctctatgcaaataaactagaaaatctagaagaaatggataaattcctggacacatacaccctcccaagactaaaccaggaagaagttgaatctctgaatagaccaataacaggctctgaaattgaggcaataattaatagcttaccaaccaaaaaaagtccaggaccagacagattcacagccaaattctaccagaggtacaaggaggagctggtaccattccttctgaaactattccaatcaatagaaaaagagggaatcttctctaactcattttatgaggccagcatcatcctgataccaaagcctggcagagacacaacagaaaaagagaattttagaccaatatccctgatgaacatcgatgcaaaaatcatcaataaaatactggcaaaccgaatccagcaaacacatcaaaaagcttatccaccatgatcaagtgggcttcatccctgggatgcaaggctggttcaacatatgcaaatcaataaacataatccagcatataaacagaaccaaagacaaaaaccacatgattatctcaacagatgcagaaaaggcctttgataaaatccaacaacccttcatgctaaaaactctcaataaattggtactgatgggacatatctcaaaataatgggagctatttatgacaaacccacagccaatatcatactgaatgggcaaaaactggaagcattccctttgaaaactggcataagacagggatgccctctctcactactcctattcaacatagtgttggaagttctggccagggcaatcaggcaagagaaggaaataaaggttattcaagtaggaaaagaggaagtcaaattgtccctgtttgcagatgacatgattgtgtatctagaagaccccatcatctcagccccaaatctccttaagctgataagcaacttcagcaaagtctcaggatacaaaatcaatgtgcaaaaatcacaagcattcttatacaccaataacagacaaacagagagccaaatcatgagtgaactcccattcacaattgcttcaaagagaataaaatacctgggaatccaacttacaagggatgtgaaggacctcttcaaggaaaactacaaaccactgctcaaggaaataagaggatacaaacaaatggaagaacattccatgctcatgggtaggaagaatcaatatagtgaaaatggccatactgcccaaggtaatttatagattcaatgccatccccatcaagctaccaatgactttcttcacagaattggaaaaaagctactttaaagttcatatggaaccaaaaaagagcccgcatcaccaagtcaatcctaagccaaaagaacaaagctggaggcatcatgctacctgacttcaaactatactacaagactacagtaaccaaagcagcatggtactggtaccaaaacagagatacagaccaatggaacagaacagagccctcagaaataatgccacacatctacaactatctgatctttgacaaacctgacaaaaacaagcaatggggaaaggattccctatttaataaatggtgctgggaaaactggctagccatatgtagaaagctgaaactggaccccttccttacaccttatacaaaaattaattcaagatggattaaagacttaaatgttagacctaaaaccataaaaaccctagaagaaaacctaggcaataccattcaggacataggcatggacaaggacttcacgtctaaaacaccaaaagcaatggcaacaaaagccaaaattgacaaatgggatataattaaactaaagagcttctgcacagccaaagaaactaccatcagagtgaacaggcaacctacagaatgggagaaaatttttgcaatctactcatctgacaaagggctaatatccagaatctacaatgaactcaaacaaatttacaagaaaaaatcaaacaaccccatcaaaaagtgggcaaaggatatgaacgacacttctcaaaagaagatatttatgcagccaaaagacacatgaaaaaaggctcatcatcactggccatcagagaaatgcaaatcaaaaccacaatgccatactatctcataccagttagaatggcgatcattaaaaagtcaggaaacaacaggtgctggagaggatgtggagaaataggaacacttttacactgttggtgggactgtaaactagttcaaccattgtggaagtcagtgtggcgattcctcagggatctagaactagaaataccatttgacccagccatcccattactgggtatatacccaaaggattacaaatcattctgctataaagacacatgcacacgtatgtttattacagcagtgctcacaatagcaaagacttggaaccaacccaaatgtccatcaatgacagactggattaagaaaatgtggcacatatacaccatggaatactatgcagccatataaaaggatgagtttatgtcctttgtagggacatggatgaagctggaaaccatcgttctcagcaaagtatcccaaggacaaaaaaccaaacactgcatgttctcactcataggtgggaattgaacaatgagaacacttggacacagaaacgggaacatcacacactggggcctgttgtggggtggggggagcggggagggatagcattagcagatatacctaatgtaaatgacgagttaatgggtgcagcacaccaacatggcacatgtatacgtatgtaacaaacctgcacgttgtgcacatgtaccctaaaacttaaagtataattaaaaaaaaaaa

SEQ ID NO: 433 - DNA, 6030 bp, Homo sapiens
  source 1..6030: mol_type = other DNA
ggaggagccaagatggtcgaataggaacagctccggtctacagctcccagcgtgagcgacgcagaagacgggtgatttctgcatttccatctgaggtaccgggttcatctcactagggagtgccagacagtgggcgcaggccagtgggtgcgtgcaccgtgcgtgagccgaagcagggcgaggcattgcctcacctgggaagcgcaaggggtcagggagttccctttccgagtcaaagaaaggggtgacggacgcacctggaaaatcgggtcactcccacccgaatattgcgcttttcagaccggcttaagaaacggcgcaccacgagactatatcccacacctggctcagagggtcctacgcccacggagtctcgctgattgctagcacggcagtctgagatcaaactgcaaggcagcaacgaggctgggggaggggcgtccgccattgcccaggcttgcttaggtaaacaaagcagccgggaagctcgaactgggtggagcccaccacagctcaaggaggcctgcctgcctctgtaggctccacctctgggggcagggcacagacaaacaaaaagacagcagtaacctctgcagacttaagtgtccctgtctgacagctttgaagagagcagtggttctcccagcacgcagctggagatctgagaacgggcagactgcctcctcaagtgggtccctgacccctgacccccgagcagcctaactgggaggaggcaccccccagcaggggcacactgacacctcacacggcagggtattccaacagacctgcagctgagggtcctgtctgttagaaggaaaactaacaaccagaaaggacatctacaccgaaaatccatctgtacagcaccatcatcaaagaccaaaagtagataaaaccacaaagatggggaaaaaacagaacagaaaaactggaaactctaaaacgcagagcgcctctcctcctccaaaggaacgcagttcctcaccagcaacagaacaaagctggatggagaatgattttgacgagctgagagaagaaggcttcagacgatcaaattactctgagctatgggaggacattcaaaccaaaggcaaagaagttgaaaactttgaaaaaaatttagaagaatgtataactagaataaccaatacagagaagtgcttaaaggagctgatggagctgaaaaccaaggctcgagaactacgtgaagaatgcagaagcctcaggagccgatgcgatcaactggaagaaagggtatcagcaatggaagatgaaatgaatgaaatgaagcgagaagggaagtttagagaaaaaagaataaaaagaaatgagcaaagcctccaagaaatatgggactatgtgaaaagaccaaatctacgtctgattggtgtacctgaaagtgatgtggagaatggaaccaagctggaaaacactctgcaggatattatccaggagaacttccccaatctagcaaggcaggccaacgttcagattcaggaaatacagagaacgccacaaagatactcctcgagaagagcaactccaagacacataattgtcagattcaccaaagttgaaatgaaggaaaaaatgttaagggcagccagagagaaaggtcaggttacccgcaaaggaaagcccatcagactaacagcggatctctcggcagaaaccctacaagccagaagagagtgggggccaatattcaacattcttaaagaaaagaattttcaacccagaatttcatattcagccaaactaagcttcataagtgaaggagaaataaaatactttatagacaagcaaatgctgagagattttgtcaccaccaggcctgccctaaaagagctcctgaaggaagcgctaaacatggaaaggaacaactggtaccagccgctgcaaaatcatgccaaaatgtaaagaccatcgagactaggaagaaactgcatcaactaatgagcaaaatcaccagctaacatcataatgacaggatcaaattcacacataacaatattaactttaaatataaatggactaaattctgcaattaaaagacacagactggcaagttggataaagagtcaagacccatcagtgtgctgtattcaggaaacccatctcacgtgcagagacacacataggctcaaaataaaaggatggaggaagatctaccaagccaatggaaaacaaaaaaaggcaggggttgcaatcctagtctctgataaaacagactttaaaccaacaaagatcaaaagagacaaagaaggccattacataatggtaaagggatcaattcaacaagaggagctaactatcctaaatatttatgcacccaatacaggagcacccagattcataaagcaagtcctcagtgacctacaaagagacttagactcccacacattaataatgggagactttaacaccccactgtcaacattagacagatcaacgagacagaaagtcaacaaggatacccaggaattgaactcagctctgcaccaagcagacctaatagacatctacagaactctccaccccaaatcaacagaatatacacttttttcagcaccacaccacacctattccaaaattgaccacatagttggaagtaaagctctcctcagcaaatgtaaaagaacagaaattataacaaactatctctcagaccacagtgcaatcaaactagaactcaggattaagaatctcactcaaagccgctcaactacatggaaactgaacaacctgctcctgaatgactactgggtacataacgaaatgaaggcagaaataaagatgttctttgaaaccaacgagaacaaagacaccacataccagaatctctgggacgcattcaaagcagtgtgtagagggaaatttatagcactaaatgcctacaagagaaagcaggaaagatccaaaattgacaccctaacatcacaattaaaagaactagaaaagcaagagcaaacacattcaaaagctagcagaaggcaagaaataactaaaatcagagcagaactgaaggaaatagagacacaaaaaacccttcaaaaaatcaatgaatccaggagctggttttttgaaaggatcaacaaaattgatagaccgctagcaagactaataaagaaaaagagagaagaatcaaatagacacaataaaaaatgataaacgggatatcaccactgatcccacagaaatacaaactaccatcagagaatactacaaacacctctacgcaaataaactagaaaatctagaagaaatggatacattcctcgacacatacactctcccaagactaaaccaggaagaagttgaatctctgaatagaccaataacaggctctgaaattgtggcaataatcaatagtttaccaaccaaaaagagtccaggaccagatggattcacagccgaattctaccagaggtacaaggaggaactggtaccattccttctgaaactattccaatcaatagaaaaagagggaatcctccctaactcattttatgaggccagcatcattctgataccaaagccgggcagagacacaaccaaaaaagagaattttagaccaatatccttgatgaacattgatgcaaaaatcctcaataaaatactggcaaaccgaatccagcagcacatcaaaaagcttatccaccatgatcaagtgggcttcatccctgggatgcaaggctggttcaatatacgcaaatcaataaatgtaatccagcatataaacagagccaaagacaaaaaccacatgattatctcaatagatgcagaaaaagcctttgacaaaattcaacaacccttcatgctaaaaactctcaataaattaggtattgatggtacatatttcaaaataataagagctatctatgacaaacccacagccaatatcatactgaatgggcaaaaactggaagcattccctttgaaaactggcacaagacagggatgccctctctcaccgctcctattcaacatagtgttggaagttctggccagggcaatcaggcaggagaaggaaataaagggtattcaattaggaaaagaggaagtcaaattgtccctgtttgcagacgacatgattgtttatctagaaaaccccattgtctcagcccaaaatctccttaagctgataagcaacttcagcaaagtctcaggatacaaaatcaatgtacaaaaatcacaagcattcttatacacgaacaacagacaaacagagagccaaatcatgggtgaactcccattcacaattgcttcaaagagaataaaatacctaggaatccaacttacaagggatgtgaaggacctcttcaaggagaactacaaaccactgctcaaggaaataaaagaggacacaaacaaatggaagaacattccatgctcatgggtaggaagaatcaatatcgtgaaaatggccatactgcccaaggtaatttacagattcaatgccatccccatcaagctaccaatgactttcttcacagaattggaaaaaactactttaaagttcatatggaaccaaaaaagagcccgcattgccaagtcaatcctaagccaaaagaacaaagctggaggcatcacactacctgacttcaaactatactacaaggctacagtaaccaaaacagcatggtactggtaccaaaacagagatatagatcaatggaacagaacagagccctcagaaataatgccgcatatctacaactatctgatctttgacaaacctgagaaaaacaagcaatggggaaaggattccctatttaataaatggtgctgggaaaactggctagccatatgtagaaagctgaaactggatcccttccttacaccttatacaaaaatcaattcaagatggattaaagatttaaacgttaaacctaaaaccataaaaaccctagaagaaaacctaggcattaccattcaggacataggcgtgggcaaggacttcatgtccaaaacaccaaaagcaatggcaacaaaagacaaaattgacaaatgggatctaattaaactaaagagcttctgcacagcaaaagaaactaccatcagagtgaacaggcaacctacaacatgggagaaaatttttgcaacctactcatctgacaaagggctaatatccagaatctacaatgaactcaaacaaatttacaagaaaaaaacaaacaaccccatcaaaaagtgggcgaaggacatgaacagacacttctcaaaagaagacatttatgcagccaaaaaacacatgaagaaatgctcatcatcactggccatcagagaaatgcaaatcaaaaccactatgagatatcatctcacaccagttagaatggcaatcattaaaaagtcaggaaacaacaggtgctggagaggatgcggagaaataggaacacttttacactgttggtgggactgtaaactagttcatccattgtggaagtcagtgtggtgattcctcagggatctagaactagaaataccatttgacccagccatcccattactgggtatatacccaaatgagtataaatcatgctgctataaagacacatgcacacgtatgtttattgcggcactattcacaatagcaaagacttggaaccaacccaaatgtccaacaatgatagactggattaagcaaatgtggcacatatacaccatggaatactatgcagccataaaaaatgatgagttcatatcctttgtagggacatggatgaaaatggaaaccatcattctcagtaaactatcacaagaacaaaaaaccaaacaccgcatattctcactcataggtgggaattgaacaatgagatcacatggacacaggaaggggaatatcacactctggggactgtggtggggtcgggggaggggggagggatagcattgggagatatacctaatgctagatgacacattagtgggtgcagcgcaccagcatggcacatgtatacatatgtaactaacctgcacaatgtgcacatgtaccctaaaacttagagtataataaaaaaataaaaa

SEQ ID NO: 434 - DNA, 1299 bp, Homo sapiens
  source 1..1299: mol_type = other DNA
cactcgattgtatttctgtacttaacagcaaacaacctgaaaatgaaataaagcaattttattcatcatagtgtgaaaaagaacaacatacacaggaataaatgtgacaaaagagcaaaaaacatttacctccaaaactacaaaatattgtttaaataaattaaataaccgaataaattggaagacattctgtgttcatgggttggaagacttaacattgctaagacagcagtacctacaaattgatctacagattcagtgaaatccttatcagaatcccaggatcccatgacttctttgacaagttgattctaaaatttatatggaaattcaagacccagaatagccaaaacaatcttgaaaaagaagaacaaagttggaggactcacactttgtgatttcaaaacttactacagagctacagtctgaatcaagacagtgtggtactgggataaattagacatatcatcaatggagtagaatcacaagtccagaaataaacccttatatttattgtcaattgattttcaacagatataccaagacaattcaataggaaataatagacttttcaacaaatgatgctgagacatgcgaagagtgaagtcggatcccttcctcacatatcatatatcataattaactagaaaatgatcatagatgtaaaagctatgattatgaaactccagaaggaaatacaggaatgagtctttctgactttggattaggcaaagccttagatgtgacaacaaaagtataagtggtaaagtaaaaatagagaaaattcatgaaaattaaaaaactttcctgcttcaaaggatatcatcaagaaaatgaaaaggcaatccagagaacaggagaagatattttcaaatcataaatctagtaagcaacttgtatctagaatatataaaggacttttgccattaataaaaagataactatccagttaaagaatggacagaggatctgactggacctttccttaaaaaagacatacgttgaaaaacacaccaaagatgctcaaaaccattagctagcagggaaatgcaaattaaaactacactgcgatatcactttatatctcttaggatggctatcattaaaaaaaaaaaaacagacaataacaagtgttagggaggatgtagagaaatgggaaccctcacaggtcactggtgggtttataaagatggcataaccactctggaaacagtctggaagttctttaaaagactcaccatagagttattataggacccaaaagaaatgaaaacagatgtccatacaaacacttgtaca

SEQ ID NO: 435 - DNA, 141 bp, Homo sapiens
  source 1..141: mol_type = other DNA
gagtcagtttttagtgaaaaaacattgagctaggagccaagacccatctcttcactattttggtattgtgcaagtcatcttacctctctggatctcagttgtctcatctgtaaaaaggagataaaaattatttacctgcct

SEQ ID NO: 436 - DNA, 1932 bp, Homo sapiens
  source 1..1932: mol_type = other DNA
ccctctccctttccccctccccctccccctccctctccctctgccctctttccaccgtctccctctgatgccgagccgaagctggactgtactgctgccatctcggctcactgcaacctccctgcctgattctcctgcctcagcctgccgagtgcctgcgattgcaggcgcgcgccgccacgcctgactggttttcgtattttttgggtggagacggggtttcgctgtgttggccgggctggtctccagctcctaaccgcgagtgatccgccagcctcggcctcccgaggtgccgggattgcagacggagtctccttcactcagtgctcaatggtgcccaggctggagtgcagtggcatgatctcggctcgctacaacatccacctcccagcagcctgccttggcctcccaaagtgccgagattgcagcctctgcccggccgccaccccgtctgggaagtgaggagcgtctctgcctggccgcccatcgtctgggatgtgaggagcccctctgcctggctgcccagtctggaaagtgaggagcgtctctgcccagccgccatcccatctaggaagtgaggagcgcctcttccaggctgccatcccatctaggaagtgaggagcgtctctgcccggccacccatcgtctgagatgtggggagcgcctctgccctgtcgccccgtccgggatgtgaggagcgtctctgcccggccgccccgtctgagaagtgaggagaccctctgcctggcaaccgccctgtctgagaagtgaggagcccctccgcccggcagccgccccgtctgagaagtgaggagcccctctgcccggcagccaccccgtctgggaagtgaggagcgtctccgcccggcagccaccccgtctgggagggaggtggggggtcagccccccgcctggccagccgccccgtccgggaggtgaggggcgcctctgcccggccgcccctactgggaagtgaggagcccctctgcccggccagccgccccgtccaggagggagttggggggggtcagccccccgcctggccagccgccccatccgggagggagggggggtcagccccccgcctggccagccgccccatccgggaggtgaggggcacctctgcccggccgcccctactgggaagtgaggagcccctctgcccggccagccgccccgtccgggagggaggtgggggggtcagccccccgcccggccagccgccccgtccgggagggagttgggggtggtcagccccccgcccggccagccgccccgtccgggagggaggtgggggggtcagccccccacccggccagccgcccggtccgggaggtgaggggcgcctctgcccggccacccctactgggaagtgaggagcccctctgcccggccaccaccccgtctgggaggtgtactcaacagctcattgagaacgggccatgatgacgatggcggttttgtggaatagaaaggggggaaaggtggggaaaagattgagaaatcggatggttgccgtgtctgtgtagaaagaggtagacatgggagacttttcattttgttctgtactaagaaaaattcttctgccttgggatcctgttgatctgtgaccttacccccaaccctgtgctctgtgaaacatgtgctgtgtccactcagggttaaatggattaagggcggtgcaagatgtgctttgttaaacagaagcttgaaggcagcatactcgttaagagtcatcaccactccctaatctcaagtacccagggacacaaacactgcggaaggccgcagggtcctctgcctaggaaaaccagagacctttgttcacttgtttatctgctgaccttccctccactattgtcctgtgaccctgccaaatccccctctgcgagaaacacccaagaatgatcaataaaaaaaaaaaaaaaaaaa

SEQ ID NO: 437 - DNA, 3981 bp, Homo sapiens
  source 1..3981: mol_type = other DNA
tgtaaacaggctaaatgccccaatcaaaagacacagactgacaaattggataaagagcccagacccttcagtgtgctgtattcaggagacccatctcacgtgcaaagacagacataggctcaaaataaagggatgaaggaatatttaccaagcaaatggaaagcaaaaaaaaaaaaaaaagcagagttgcaatcctagtctccaataaaacagactttaaaccaagaaagataaaaagatacaaagaaggccattacatgacggtaaagagatcaatgcaacaagaagagctcactatcctaaatatatatgcacccaaaacaggagcacccagattcataaagcaagtccttagagacctacaaagagacttagactcccacacaataacagtgggagactttaacaccctactgtcaatattagacagatgaacaaaacagaaaattaacaaggatatccaggacttgagctcatctctggaccaagcacacctaatagacatctacagaactctcaaccccacatcaacagaaaatatgttcttctcagcaccacatcacacttattctaaaattgaccacataatcggaagtaaaacactcctcagcaaatgcaaaagaatggaaatcatagcaaacagactctcagaccacagtgcaatcaaattagaactcatgaataagaaactcactcaaaaccacacaactacatggaaactgaacaacctgctcctgaatgactactgggtacataaggaaatgaaggcagaaataaagatgttctttgaaaccaatgagaacaaagatacaacatactagaatatctgggacacatttaaagcagtgtgtagagggaaatttatagcactaaatgcccacaagagaaagcaggaaagatctaaaatcgacaccctgagatcacaattaaaagaactagagaagcaagagcaaacaaattcaaaagctagcagaagacaagaaataactaagatcagagcagaactgaaggagatagagacacaaaaaacccttcaaaaaatcagtgaatccaggaggtcgttttttgaaaagatcaacaaaatagactgctagccagactaatacagaagaaaagagaaaagaatcaaataagatgcaatagaaaatgataaaggggatatcaccaccaatcccacagaaatacaaactaccatcagagaatactataaacagctctacgtaagcaaactagaaaatctagaagaaatggataaattcctggacacatacaccctcccaagactaaaccaggaagaagtcaaatccctgagaagaccaataagaagttctgacattgaggcagcaattaatagcctaccaaccaaaaaaagtccagaactagatggattcacatccaaattttaccagaggtacaaagaggatctagtaccattccttgtgaaactattccaaataatagaaaaagaaggaatcctccctggctcattttatgaggccagcatcatcctgataccaaaacctggcaaagacaaaacaaaaaaagaaaatttcaggccaatatccttgatgaacatcaatgtgaaaatcctcggtaaaatactggcaaaccaaatccagcagcacatcaaaaagcttatccaccatgatcaagtgggcttcatccctgggatgcaaggctggttcaacataagaaaatcaataaatgtaatccatcacataaacagaaccaaagacaaaaaccacatgattatctcaatagatgcagaaaaggccttggacaaattcaacagcccttcatgctaaacactcttaataaactagatattgatggaatgtatctcaaaataataagagctatttatgacaaacccacagccaatatcatactgaatgggcaaagactggaagcattccctttgaaaactggcacaagacaaggatgccctctctcaccgctcctattcaacatagtattggaagttctggccagggcaatcaagcaagagaaggaaataaagggtattcaattgggaaaacaggaagtcaaattgtctctgtttgcagataacatgattgtatgtttagaaaaccccatcttctcagcccaaaatctccttaacctgataagcaacttcagcaacatctcaggatacaaaatcaatgtgcaaaaatcacaagcattcctatacgccaataacagaaaaacagagaaccaaatcatgagtgaactcccattcacaattgctacaaagagaataaaatacctaggaatacaacttacaagggacgtgaaggacctcttgaaggagaactacaaaccactgctcaaggaaataagagaggacataaacaaatgcaaaaacattccatgttcatggatagtaagaatcaatatcatgaaaatggccatactgcccaaagtaatttatagattcaatgctatccccatcaagctaccaatgactttcttcacagaattgtaaaaaaactactttaaatttcatatggaaccaaaaaagagtctgcctagccaagacaatcttaagcaaaaagaacaaagctggagacatcacactgacttcaaactatactacaaggctacagtaaccaaaacagcatggtactggtaccaaaacagatatatagaccaatgggacagaacagaggcctcagaaataatgccacacatctacaaccatctgatctttgacaaacctgacaaaaacaagcaatggggaaaggattccctatttaataaatggtgttggcaaaactggctagccatatgcagaaagctgaaactggaccccttccttacacctcatacaaaaattaacccaagatggattaaagaattaaacctaagacctaaaatcataaaaaccttagaagaaaacctaggcaatactattcaggacataggcatgggcaaagccttcatgactaaaatatcaaaagcaatgggaacaaaaccaaaatagacaaaagggatctaattaaagagcttctgcacagcaaaagaaacttcatcagagtgaacaggcaacctacaacattgaagaaaatttttgcaatctatccatctgacaaagggctaatatccagaacttaaacaaatttataaagaacttaaacaaatttacaagaaaaaaacacccacccacccatttagtgggtgaaggatatgaacagacacttttcaaaagaagacatttatgcagccaacaaacatatgaagaaatgcaaatcaaaaccacaatgagataccatctcatgtcagttagaatggcaatcattaaaaagtcaaggaacaacagatgctggagaggatgtggagaaataggaacacttttatactgttgatgagagtgtaaattagttcaaccattatgtaagacagtgtggcaattcctcaaggatctagaactagaaataccatttgacccagcaatcccattactgggtatatacccccaaaggattataaatcattttactataaagacgcatgcacacgtatgtttattgcagcactgttcacaatagcaaagatttggaaccaacccaaatgcccatcaatgatagagtggataaagacatgtggcacatatacaccatggaattctatgcagccataaaaaggatgagttcatgtccttttcagggacatggatgaagctggaaaccatcattctcagcaaactaacacaagaaccaaaaaccaaacactggatgttctcattcataagtgggagttgaacaatgagaacacatggcacatggatacatggaggggaacatcagacaccagggcctgtcggggggtggggggctaggggagggatagtattaggagaaatgcctaatgtagatgacgagttgatgggtgcagcaaaccaccatggcacatgtatacgtacgtaacgaacctgcacattctgcacatgtaccccagaacttaaagtataataaaaaaaaa

SEQ ID NO: 438 - DNA, 6049 bp, Homo sapiens
  source 1..6049: mol_type = other DNA
gggaggagccaagatggccgaataggaacagctccggtctacagctcccagcgtgagcgacgcagaagacggtgatttctgcatttccatctgaggtaccgggttcatctcactagggagtgccagacagtgggcgcaggccagtgtgtgtgcgcaccgtgcgcgagccgaagcagggcgaggcattgcctcacctgggaagcgcaaggggtcagggagttccctttccgagtcaaagaaaggggtgacggacgcacctggaaaatcgggtcactcccacccgaatattgcgcttttcagaccggcttaagaaacggcgcaccacgagactatatcccacacctggctcggagggtcctacgcccacggaatctcgctgattgctagcacagcagtctaagatcaaactgcaaggcggcagcgaggctgggggaggggcgcccgccattgcccaggcttgcttaggtaaacaaagcagccgggaagctcgaactgggtggagcccaccacagctcaaggaggcctgcctgcctctgtaggctccacctctgggggcagggcacagacaaacaaaaagacagcagtaacctctgcagacttaagtgtccctgtctgacagctttgaagagagtagtggttctcccaggacgcagctggagatctgagaacgggcagactgcctcctcaagtgggtccctgactcctgacccccgagcagcctaactgggaggcaccccccagcaggggcacactgacacctcacacggcagggtattccaacagacgtgcagctgagggtcctgtctgttagaaggaaaactaacaacaagaaaggacatctacaccgaaaacccatctgtacatcaccatcatcaaagaccaaaagtagataaaaccacaaagatggggaaaaaacagaacagaaaaactggaaactctaaaacgcagagcgcctctcctcctccaaaggaacgcagttcctcaccagcaacagaacaaagctggatggagaatgattttgacgagctgagagaagaaggcttcagacgatcaaattactctgagctacgggaggacattcaaaccaaaggcaaagaagttgaaaactttgaaaaaaatttagaagaatgtataactagaataaccaatacagagaagtgcttaaaggagctgatggagctgaaaaccaaggctcgagaactacgtgaagaatgcagaagcctcaggagccgatgcgatcaactggaagaaagggtatcagcaatggaagatgaaatgaatgaaatgaagcgagaagggaagtttagagaaaaaagaataaaaagaaatgagcaaaacctccaagaaatatgggactatgtgaaaagaccaaatctacgtctgattggtgtacctgaaagtgatgtggagaatggaaccaagttggaaaacactctgcaggatattatccaggagaacttccccaatctagcaaggcaggccaacgttcagattcaggaaatacagagaacgccacaaagatactcctcgagaagagcaactccaagacacataattgtcagattcaccaaagttgaaatgaaggaaaaaatgttaagggcagccagagagaaaggtcgggttaccctcaaaggaaagcccatcagactaacagcggatctctcggcagaaaccctacaagccagaagagagtgggggccaatattcaacattgttaaagaaaagaattttcaacccagaatttcatatccagccaaactaagcttcataagtgaaggagaaataaaatactttatagacaagcaaatgttgagagattttgtcaccaccaggcctgccctaaaagagctcctgaaggaagcgctaaacatggaaaggaacaaccggtaccagccgctgcaaaatcatgccaaaatgtaaagaccatcgagactaggaagaaactgcatcaactaatgagcaaaatcaccagctaacatcataatgacaggatcaaattcacacataacaatattaactttaaatataaatggactaaattctgcaattaaaagacacagactggcaagttggataaagagtcaagacccatcagtgtgctgtattcaggaaacccatctcacgtgcagagacacacataggctcaaaataaaaggatggaggaagatctaccaagccaatggaaaacaaaaaaaggcaggggttgcaatcctagtctctgataaaacagactttaaaccaacaaagatcaaaagagacaaagaaggccattacataatggtaaagggatcaattcaacaagaggagctaactatcctaaatatttatgcacccaatacaggagcacccagattcataaagcaagtcctcagtgacctacaaagagacttagactcccacacattaataatgggagactttaacaccccactgtcaacattagacagatcaacgagacagaaagtcaacaaggatacccaggaattgaactcagctctgcaccaagcagacctaatagacatctacagaactctccaccccaaatcaacagaatatacatttttttcagcaccacaccacacctattccaaaattgaccacatagttggaagtaaagctctcctcagcaaatgtaaaagaacagaaattataacaaactatctctcagaccacagtgcaatcaaactagaactcaggattaagaatctcactcaaagctgctcaactacatggaaactgaacaacctgctcctgaatgactactgggtacataacgaaatgaaggcagaaataaagatgttctttgaaaccaacgagaacaaagacaccacataccagaatctctgggacgcattcaaagcagtgtgtagagggaaatttatagcactaaatgcctacaagagaaagcaggaaagatccaaaattgacaccctaacatcacaattaaaagaactagaaaagcaagagcaaacacattcaaaagctagcagaaggcaagaaataactaaaatcagagcagaactgaaggaaatagagacacaaaaaacccttcaaaaaatcaatgaatccaggagctggttttttgaaaggatcaacaaaattgatagaccgctagcaagactaataaagaaaaagagagagaagaatcaaatagacacaataaaaaatgataaaggggatatcaccaccgatcccacagaaatacaaactaccatcagagaatactacaaacacctctacgcaaataaactagaaaatctagaagaaatggatacattcctcgacacatacactctcccaagactaaaccaggaagaagttgaatctctgaatagaccaataacaggctctgaaattgtggcaataatcaatagtttaccaaccaaaaagagtccaggaccagatggattcacagccgaattctaccagaggtacatggaggaactggtaccattccttctgaaactattccaatcaatagaaaaagagggaatcctccctaactcattttatgaggccagcatcattctgataccaaagccgggcagagacacaaccaaaaaagagaattttagaccaatatccttgatgaacattgatgcaaaaatcctcaataaaatactggcaaaccgaatccagcagcacatcaaaaagcttatccaccatgatcaagtgggcttcatccctgggatgcaaggctggttcaatatacgcaaatcaataaatgtaatccagcatataaacagagccaaagacaaaaaccacatgattatctcaatagatgcagaaaaagcctttgacaaaattcaacaacccttcatgctaaaaactctcaataaattaggtattgatgggacgtatttcaaaataataagagctatctatgacaaacccacagccaatatcatactgaatgggcaaaaactggaagcattccctttgaaaaccggcacaagacagggatgccctctctcaccgctcctattcaacatagtgttggaagttctggccagggcaatcaggcaggagaaggaaataaagggtattcaattaggaaaagaggaagtcaaattgtccctgtttgcagacgacatgattgtttatctagaaaaccccatcgtctcagcccaaaatctccttaagctgataagcaacttcagcaaagtctcaggatacaaaatcaatgtacaaaaatcacaagcattcttatacatcaacaacagacaaacagagagccagatcatgggtgaactcccattcacaattgcttcaaagagaataaaatacctaggaatccaacttacaagggatgtgaaggacctcttcaaggagaactacaaaccactgctcaaggaaataaaagaggagacaaacaaatggaagaacattccatgctcatgggtaggaagaatcaatatcgtgaaaatggccatactgcccaaggtaatttacagattcaatgccatccccatcaagctaccaatgactttcttcacagaattggaaaaaactactttaaagttcatatggaaccaaaaaagagcccgcattgccaagtcaatcctaagccaaaagaacaaagctggaggcatcacactacctgacttcaaactatactacaaggctacagtaaccaaaacagcatggtactggtaccaaaacagagatgtagatcaatggaacagaacagagccctcagaaataatgccgcatatctacaactatctgatctttgacaaacctgagaaaaacaagcaatggggaaaggattccctatttaataaatggtgctgggaaaactggctagccatatgtagaaagctgaaactggatcccttccttacaccttatacaaaaatcaattcaagatggattaaagatttaaacgttaaacctaaaaccataaaaaccctagaagaaaacctaggcattaccattcaggacataggcgtgggcaaggacttcatgtccaaaacaccaaaagcaatggcaacaaaagacaaaattgacaaatgggatctaattaaactaaagagcttctgcacagcaaaagaaactaccatcagagtgaacaggcaacctacaacatgggagaaaatttttgcaacctactcatctgacaaagggctaatatccagaatctacaatgaactcaaacaaatttacaagaaaaaaacaaacaaccccatcaaaaagtgggcgaaggacatgaacagacacttctcaaaagaagacatttatgcagccaaaaaacacatgaagaaatgctcatcatcactggccatcagagaaatgcaaatcaaaaccactatgagatatcatctcacaccagttagaatggcaatcattaaaaagtcaggaaacaacaggtgctggagaggatgcggagaaataggaacacttttacactgttggtgggactgtaaactagttcaaccattgtggaagtcagtgtggcgattcctcagggatctagaactagaaataccatttgacccagccatcccattactgggtatatacccaaatgagtataaatcatgctgctataaagacacatgcacacgtatgtttattgcggcactattcacaatagcaaagacttggaaccaacccaaatgtccaacaatgatagactggattaagaaaatgtggcacatatacaccatggaatactatgcagccataaaaaatgatgagttcatatcctttgtagggacatggatgaaattggaaaccatcattctcagtaaactatcgcaagaacaaaaaaccaaacaccgcatattctcactcataggtgggaattgaacaatgagatcacatggacacaggaaggggaatatcacactctggggactgtggtggggtcgggggaggggggagggatagcattgggagatatacctaatgctagatgacacattagtgggtgcagcgcaccagcatggcacatgtatacatatgtaactaacctgcacaatgtgcacatgtaccctaaaacttagagtataataaaaaaaaaaaaaaaaaaaaaaaaaaaaaaaaa

SEQ ID NO: 439 - DNA, 6180 bp, Homo sapiens
  source 1..6180: mol_type = other DNA
ggggtggttccaagatggccgaataggaggagctccagtctatagctcccagcgtgagtgacgcagaagatgggtgatttctgcatttccaactgaggtagtgggttcatctcactggggctcgtcaagacagtgggtacaggacagtgggtgcagcccactgagtgtgagacgaagtagggcgaggcatcgcctcacctgggaagcacaaggggtcagggaattccctttcctagccaacggaaggggtgacagacggcacctggaaaactggatcactcccaccctaatactgtgcttttccaatggtcttagcaaacggcacaccaggagattatatcccgcgcctggctcggagggtcccacgcccatggagcctcgctcattgctagcacagcagtctgagatcgaactgcaaggcggcagcgaggctgggggagcctgccattgctgaggcttgagtaggtaaacaaagtggccaggaagctcgaactgggtggagtccaccacagctcaaggaggcctgcctgcctctgtagactccacctctggggacagagcatagccgaacaaaaggcagcagaaacctctgcagacttaaatgtccctgtctcacagctttgaaaagagtagtggttctcccagcacggagtttgagatctaagaatggatagactgcctcctcaagtgggtccctgacccccgagtagcctaactgggaggcactccccagtaggggcagactgacacctcacacggctgggtactcctctgagacgaagcttccagaggaacaatcaggcagcaacatttggtgttcagcagtattcgctgttctgcagcctctgctgctgatacccaggcaaacagggtctggagtggacctccagcaaactccaacagacctgcagctgagggtcctgactgttagaaggaaaactaacaaacagaaaggacatccacaccaaaactccatctatacgtcaccatcatcaaagaccaaaggtagataaaaccacaaagatggggaaaaaacagcagaaaagcagaaaattctaaaactcagagcacctctccccatccaaaggaacgcagccactcgccagcaatggaacaaagctggacggagaatgactttgacaagttgagagaggaaggcttcagacaatcaaacttctccgagctaaaggaggaagttcgaacccaaagcaaagaagctaaaaaccttgaaaaaagattagacgaatggctaactagaataaccagtgtagagaagtccttaaatgacatgatggagcagaaaaccatggcacaagaactacgtgacaaatgcacaagcttcagtagccgatttgatcaactggaagaaaggatatcggtgattgaagatcaaatgaatgaaatgaagtgagaagagaagttcagagaaaaaagagtaaaaacaaacgaacaaagcctccaagaaatatgggactatgtgaaaagaccaaatctacatctgactggtgtacatgaaaatgacagggagaatggaaccaagttggaaaacactcttcaggatattatccaggagaacttccccaacctagcaaggcaggatattatccaggagaacttccccaacctagcaaggcaggccaacattcaaattcaggaaatacagagaatgccacaaagatactcctcaagaagagcaactccaagacacataattgtcagattcaccaaagttgaaatgaaggaaaaaatgttaagggcagccagagagaaaggttgggttacccacaaagggaaacccatcagactaacggcggatctctcagcagaaactctacaagccagaagagagtgggggccaatattcaacattcttaaagaaaagaattttcaacccagaatttcatatccagccaaactaagcttcataagtgaaggagaaataaaatcctttatagacaagcaaatgctgagagatgttataaccaccaggcctgccctacaagagctcctgaaggaagcactaaacatggaaaggaacaattggtaccagccactgcaaaaacatgacaaattgtaaagaccatagatgctaggaagaaactgcatcaactaacgagcaaaataaccagctaacatcataatggatcaaattcacacataacaatattaaccttaaatgtaaataggctaaaggctccaattaaaagacacagactggcaaattggataaagagtcaagacccatcagtgtgctgtattcaggagacccatctcacgtgcagagacacacataggctcaaaataaagggatggaggaagatctaccaagcaaatggaaaataaaaaaaggcaggggttgcaatcctagtctctgataaaacagactttaaaccaataaagatcaaaagagacaaggtcattacataatggtaaagggatcaattcaacaagaagagctaactatcttaaatatatatgcacccaatacaggagcacccagattcataaagcaagtccttagagatctacaaagagacagactcccacacaataataatgggagactttaacaccccactgttaacattagacaaatcaacaagaccggaagttaacaaggatatccaggaattgaactcagctctgcaccaagtggacctaatagacatctacagaacattccaacccaaatcaacagaatatacattcttctcagcatcacatcgcacttattccaaaattgaccacataattggaagtaaagcactcctcagcaaatgtaaaagaacagaaactataacaaactgtctctcagaccacagtgcaatcaaactagaactcaggattaagaaactcactcaaaaccgctcaacgacatggaaactgaaccacctgctcctgaatgactactgggtacataacgaaatgaaggcagagaaataaagatgttctttgaaaccaatgagaacaaagacacaacataccagaatctctgggacacatttaaagcagtgtgtagagggaaatttatagcactaaatgcccacaagagaaagcaggaaaaatctaaaattgatgccctaacatcacaattaaaagaactagagaagcaagagcaaacacattcaaaagctagcagaaggcaagaaataactaagatcagagaagaattgaaggagatagagacacaaaaaacccttcaaaaaatcaatgaatccaggaggtggtttttttgaaaagatcaacaaaattgataggcctctagcaagactaataaagaagagagaagaatcaaatagatgcaataaaaaatgataaaggggatatcaccaccgatcccacagaaatacaaactaccatcagagaatactataaacacctctatgcaaataaactagaaaatctagaagaaatggataaattcctggagacatacacccttccaagactaaaccaggaagaagttgaatccctgaaaagaccaataacaggctctgaaatttaggcaataattaatagtctaccaaccaaaaaaagtccaggaccagacggattcacagccgaattctaccagaggtacaaggaggagctggtactatgccttctgaaactattccaaacaatagaaaaagagggaatcctccctaactcattttatgaggccagcatcatcctgataccaaagcctggcagagacacaacaaaaaaagagaattttagaccaatatccctgatgaacattgatgcaaaaatcctcaataaaatactggcaaaccgaatccagcagcacatcaaaaagcttatccaccatgatcaagtgggcttcatccctgggatgcaaggctggttcaacatatgcaaatcaataaacattatccagcatataaacagaaccaaagacaaaaaccacatgattatctcaatagatgcagaaaaggcctttgacaaaattcaacagcccttcatgctaaaaactctcaataaattaggtattgatgggatgtatctcaaaataataagagctatttatgacaaacccacagccaatatcatactgaatgagcaaaaactggaagcattccctttgaaaactggcacaagacagggatgccctctctcaccactcctattcaacatagtgttggaagttctggccaaggcaatcaggcgggagaaagaaagaaaggatattcaattaggaaaagaggaagtcaaattgtccctgtttgcagatgacatgattgtatatttagaaaaccccatcatctcagcccaaaatctccttaagctgataagcaacttcaacaaagtctcaggatacaaaatcaatgtgcaaaacatcacaagcattcttatacaccaataacagacaaacagagagccaaatcatgagtgaactcccattcacaattgcttcaaagagaataaaatacctaggaatccaacttacaagggatgtgaaggacctcttcaaggagaagtacaaaccactgctgaacaaaataaaagaggatacaaacaaatggaagaacattccatgctcatggatagggagaatcagtatcatgaaaatggccatactgcccaaggtaatttataaattcaatgccatccccatcaagctaccaatgactttcttcacagaattggaaaaaaactactttaaagttcatatggaaccaaaaaagagcccgcattgccaagacaatcctaagccaaaagaacaaagctggaggcatcacgctacctgacttcaaactatactacaaggctacagtcaccaaaacagcatggtactggtaccaaaacagagatatagaccaatggaacagaacagagccctcagaaataataccacacatctacaatcatctgatctttgacaaagctgacagaaacaagaaatggggaaaggattccctatttaataaatggtgctgggaaaactggctagccatatgtagaaagctgaaactggatcccttccttacaccttatacaaaaattaattcaagatggattaaagacttacatgttagacctaaaaccgtaaaaaccctagaagaaaacctaggcaataccattcaggacataggcatgggcaaggacttcatgtctaaaacaccaaaagcaatggcaacaaaagccaaaattgacaaatgggatctaattaaactaaagagcttctgcacagcaaaagaaactaccgtcagagtgaataggcaacctacagaatgggagaaattttttgcaatctactcatctgataaaaggctaatatccagaatctacaaagaactcaaacaaatttacaagaaaaaacaaacaaccctatcaaaaagtgggcaaaggttatgaacagacacttctcaaaagaagacatttatgcagccaaaagacacatgaaaaaatgctcatcatcactggccatcagagaaaggcaaatcaaaaaaccacaatgagataccatctcacaccagttagaatggcaatcattaaaaattcaggaaacaacaggtgctggagaagatgtggagaaataggaacgcttttacactgttggtgggactgtaaactagttcaaccattgtagaagacagtgtggtgattcctcaaggatctagaactagaaataccatttgatccagccatccccttactgggtatatacccaaaggactataagtcatgctgctataaagacacatgcacacgtatgtttattgcagcactattcacgatagcaaagacttggaaccaacccaaatgtccatcaatgatagactggattaagaaaatgtggcacatacacaccatggaatactatgcagccataaaaaaaggatgagttcacgtcctttgtagggacatggatgaagctggaaaccatcattctcagcaaactatagcaagaatgaaaaaccaaacaccgcatgttctcactcgtaggtgggaactgaacaatgagaacacttggacgtaggaaggggaacatcacccaccagggcctgttgtggggtggggggggaggggggaggggggagggaaagcattaggagatatacctaaggtaaatgacaaggtaatcagtgcagcacaccaacatggcacatgtatacatatgtaacaaacctgcacgttgtgcacatgtaccctagaacttaaagtataataaaaaaa

SEQ ID NO: 440 - DNA, 5720 bp, Homo sapiens
  source 1..5720: mol_type = other DNA
ttccaagatggccaaatatgaacagctccagtctacagcccccagcgtgagtgatgcagaagacgggtgatttctgcatttccaactgaggtaccgggttcatctcactggggcttgtcagacagtgggtacaacccacggagcatgagccaaagcagggtggggcatcacctcacccaggaagcacaaggggttggggaattccctttcctagccaagggaagccatgactgacggtacctggaaaatcaggacactccccaccctaatactgtgcttttccaatggtcttagcaaacggcacaccaggagattatgtcccaggcctggctcggagggtcccatgcccacggagcctggctcactgctagcacagcagtctgagatcgaactgcaaagcagcagcgaggctgggggaggggtgtccaccattgctgagacttgagtaggtaaacaaagcagccaggaagctcgaaatgggtggagcccaccgcagctcaaggaggcctgcctgcctctgtagactccacctctaggggcagggcacagctgaacaaaagacagcagaaacttctgcagacttaaatgtccctgtctgacagctttgaaaagagtaggggtcctcccagcatggaatatgatatctgagaatggacagtctgcctcttcaagtgggttcctgacccctgagtagcctaactgggaggcacctcccagtaggggccgactgacacctcatacggccaggtgcccctctgagacgaagcttccagaggaacaatcagggagcaacatttgccgttctgcaatatttgctgttctgcagcctctgctggtgatacccaagcaaacagggtctggagtggacctccagcaaactccaacagacctgcagctgagggtcctgactgttagaaggaaaactaacaaagagaaagaacatccacaccaaaaccccatctgtacgtcaccatcatcaaagaccaaaggtagataaaaccaataagatggggagaaaccagagcagagaagctgaaaattctaaaaatcagagcacgtcttctcctccaaaggaatgcagctcctcgccagcaatggaacaaagctggacagagaatgactttcacaagttgagagaagaaggcttcagatgatcagtaataacaaactcctccgagctaaaggaggatgtttgaaccttttagcaaagaagctaaaaaccttgaaaaaacattagacgaatggctaactagaaaaaacagcatagagaagaccttaaatgacctgatggagctgaaaaccatggcacgagaactatgtgacacatgcacaagcttcagtagctgattcaatcaagtggaagaaagggattgaagatcaaatgaatgaaatgaagcaagaagagaagtttagagaaaaaagagtaaaaagaaatgaacaaagcctccaagaaatatgggactatgtgaaaagaccaaatctacatctgattggtgtacctgaaagtgatggggagaatggaaccaagttggaaaacgctctgcaggatattatccaggagaacttccccaatctagtgaggcaggccagcattcaaattcaggaaatacagagaatgccgcaaagatactcctcaagaagagtaactcaaagacacataattgtcagattcaccaaagttgaaatgaaggaaaaaacattaagtgcagcgagagagaaagggcaggttacccacaaagggaagtccatcagactaacagcatctttcggcagaaactctacaagccagaagagagtgggggccaatattcaacattcttaaagaaaagaattttcaacccagaatttcatatccagccaaactaagcttcataagtgaaggagaaataaaatcctttacagacaagcaaatgctgagagattttgtcaccaccaggcctgccttacaagagctcctgaaggaagcactaaacatggaaaggaacaaccagtaccagccactgcaaaaacatgccaaattgtaaagatcattgaggctaggaagaaactgcatcaactaacgagcaaaataaccagctaacatcataatgacaggatcaaattcacacataacaatattaaccttaaatgtaaatgggctaaatgctccagttaaaagacatggactggcaaattggataaagagtcaagacccatcagtgtgctgtattcagcagacccatctcatgtgcagagacgcacataggctcaaaataaagggatggaggaagatctaccaaggaaatggaaagcaaaaaaaagcaggagttgcaatcctagtctctgataaaacagactttaaaccaacaaagatcaaaagagacaaagaaggccattacataatgataaagggatcaattcaacaagaagagctaactatcctaaaaatatatgcacctaatacaggagcaccagattcacaaagcaagtccttagagacctacaaagagacttagactcccacacaataataatgggagactttatcaccccacggtcaatattagacagatcaacaagacagaaaattaacaaagatatccagaaattgaactcagctctgcaccaagcggacctaatagacatctacagaactctccactccaaatcaacagaatatacattcttctcggcaccacatcacacttattccaaaaattgactacatagttggaagtaaagcactcctcagcaaatgtaaaagaacagaaattataacaaactgcctctcagactacagtgctttcaaactagaactcaggattaagaaactcactcagaaccactcaactacatggaaactgagcaacctgctcctgagtgactactgggtacttaacgaagtgaaggcagaaataaagatgttctttgaaaccaatgagaacaaagacacaacataccagaatctctgggacacatttaaagcagtgtgtagagggaaatttatagcactaaatgcccacaagagaaagcaggaaagatctaaaattgacaccctaacatcacaatttagagaagcaagagcaaacacattcaaaagctagcagaagacaagaaataactaagatcagagtagaactgaaggagatagagacagaaaaactccttcaaaaaatcaatgaacccaggagctggttttttaaaaagatcaacaaaattgatagatcactagcaagactaataaagaagaaaagagaaaagaatcaaatagatgcaataaaaggtgataaaggggatatcaccaccaatcccacagaaatacaaactaccatcagagaacactataaacacttctatgcaaataaactagaaaacctaaaagaaatttataaattcctggacacacacaccctcccaggactaaaccaggaagaagttgaatctcttaatagaccaataacaggctctgaaattgaggcaataattaatagcctaccaaccaaaaaaatccatcaggaccagatggattcacagctgaattctaccagaggtataaggaggagctggtaccattctgaaactattctaatcaatagaaaaagagggaatcctccctaactcattttatgaggccagcatcatcctgataccacagcctgacagagacacaacaaaaaaagagaatttcaggccaatatccctgatgaagatcgatggaaaaatcctcagtaaaatactggcaaaccgaatccagcagaacatcaaaaagcttatccaccatgatcaagttggcttcatccctgggatgcaaggctggttcaacatatgcaaatcaataaatataatccatcatataaacagaatcaaagacaaaaaccatgattatctcaatagatgcagaaaaggcctttgacaaaattcaacagcctttgtgctaaaaactctaaataaactaggtattgatgggacatatctcaaaataataagagctattcacgacaaacccacagccaatgtcatactgaatgggcaaaagctggaagcattccctttgaaaactggcacaaaacaaggatgtcctctgtcaccactcctattcaacatagtattggacgttctagccagggcaatcaggcaatagaaagaaataaaggatattcaaataggaagagaggaagtcaaattgtctctgtttgcagatgacatgattgtatatttagaaaaccccatcatctcagcccaaaatctccttaagctgataagcaacttcagcaaagtctcaggatacaaaatcaatgtgcaaaaatcacaagcattcctatacaccaataacagacaaacagagagccaaatcatgagtgaactcccattcacaattgtttcaaagagaataaaatacttaggaatccaacttacaagggatgtggaagacctcttcaaggagaactacaaaccactgctcaaggaaataaaagaggacgcaaacaaatggaagaacattccattctcatgggtaggaagaatcaatatcatgaaaatggccatactacccaaggtaatttatagattcaatgccatccccatcaagctaccaatgactttctccacagaattggaaaaaaactactttaaagttcatatggaaccaaaaaagagcccgcatcgccaagacaatcctaaaccaaaagaacaaagctggaggcatcacgctacctgacttcaaactatattacaaggctacagtaaccaaaacagcatggtactggtaccaaaacagagatatagaccaatggaacagaacagagccctcagaaacaataccacacatctacaaccatctgatctttgacaaacctgacaaaaacaagaaatggggaaaggattctctatttaataaatggtgctgggaaaactggctagccatatgtagaaagctgaaactggatcccttctttacaccttatacaaaaattaattcaagatgaattaaagacttacacgttagacctaaaaccataaaaaccctagaagaaaacctaggcaataccattcaggacataggcatggacaaggacttcatgactaaaacaccaaaagcaatggcaacaaaagccaaaattgacaaatgggatctaattaaactaaagagcttctgcacagcaaaagaaactaccatcagagtgaataggaaacctacggaatgggagaaaatttttacaatctacccatctgacaaagggctaatatccagaatctaaaagaacttaaacaaatttacaagaaaaaatcaaatgaccccatcaaaaagtgggtgaaggatatgaacagacacttctcaaaagaagacatttatgtagccaaaagacacatgaaaaaatgctcatcatcactggccatcagagaaatgcaaatcaaaaccacaatgagataccatctcacaccagttagaatggcgatcattaaagtccggaaacaacaggtgctggaaaggatgtagagaaataggaacacttttacactgttgatgggactgtaaactagttcaaacattgtggaagacagtgtggcgattcctctaggatctagaactagaaataccatttgagccagccatcccattactgggtatatacccagaggattataaatcatgctactataaagacacatgcacacgtatgtttattgcggcactatttacaatagcaaatacttggagccaaccaaatgtccatcagtga

SEQ ID NO: 441 - DNA, 3123 bp, Homo sapiens
  source 1..3123: mol_type = other DNA
agcatgactaattcctgccagttaggacccctcccatttcatggatagaggtcatgctagcatccatggcacagacaaggtctagggaactcaaaggttactgacagcagaggaaaggcagcatgtgggtaaatgcggataattcccacctcctaggccccctgttaacaagggtgaaaagccacattggcacccatggtctgcaccatcccaaggttacagggactcagggatgtgaggacagctcttctctctctccctcacataacccggttattccctgggagaaaaaaggaactagggatgacttgttcccctctttctagttgagtaaccaatcatcttcagtctgtatttctctcaaatgcctcctgaatcactgggattcctttgagggaaaaaaaaatccttactctgtcctctcttcacagatgggtaattgtgtccccataccacaggacactcccctcagatatatcccccaaagtaggaaaagttagtttccccaaaccttaaactgcttggcttaaaagtgagctcaggggaaggaaacccagaagtctgacatgctggtaaaagagtaaaagttcttaacagctggacttcgggcctccctctccctgtgcagaccggttgaataaatgataaaattactgtttgtgtcctctgtgaagtctggattaatggaaaaaaggatttgtgaggctagtcttaggctgtagccaatctggtgtgctttttgtgtcttcctgtatggttccatgataaggaggaataccttaggatagaatgcaagcctaggaccccataagcctgttgttcaagccaaccagcaaactgggcagtaacaaacattgctgcaggtttccattttgttttacgtccttgggagcttgaccttgtaaccacgtggcagtaccttcttttggcctctgccattttaaaatggtggcccgggttcaattttggcatagggaatgagtactttccggttagtatctgtgtgacttttagaatttgctgattctcttcccgtctgtgaacaaattctagctttctttcttaaatctttctttctctgagccacctttaaagattctagattttgtaggaagtgcttaccacttctttgaaaataccttgtacactcacagttaagccataaccttgattgaggcttgttggtttcacctgtgaggttacttttggtaatgttcaaaagttagaaatattggccacttggcatggctaaagtagggtaatgagggatttaaaaggattttcttaaaaagcactcagcttaatttaaagtggatatccaagctagaggtatatttaaaaggcctttatgttttacacttcatggatcttgtttttctggaaaaaggactttctctcagtcaaatgaattatttttctccatttcattttgctactcttaatgcacacatgagaggccctaagataacttctgatagcctaggacacctggcgagaaacagagaaggtgccacaaaccccattttggaaaaaaaaaaaatcccttgttttccacatggaactccagcaattaaaattggatagattcctctcaaaatctgtttttgtcttccagctatacctgtttactggtccctagaaactgcatgctttcctagccctgctcttgaagggtaccaccctgaggccaatgatctgactaggagattagaaaatgaagaatcttacaattactggatcttcttctgtctgtgtctgtataatcatacatgtgttatgtgtgtgatggttttataaaaaatagctctaattgattggcctaaagaaaaataagtgcttagatccaatattttttgaaaaaaaaaaaataaaagctgtaatgcctgttagttcaagtgactttaatctttgagaaatagaaatatttttgaagacaaatggtaaaatacaaatgtcttcaaaatgtaaatatgtgatctgaattatgctggtcagatactaggtttgctacatgttcgaaggttacaaactgcttctttggcttttgagaactgtttgacttgcctgctttacaatttgataaggcttgaggacatatggaattaaccacgcccttaactatgttggaaagagtcagactttatctgcacctagcacataattaaaacaacttgccagcctttacactaaaattaaaaattgctaacagttactgttataacatataattgagattattgacaacagattcacccgcaaggtgcataaagaaagtaaaatgtgtttttagtaaaagattatcagaaggcatgggagtgtaaatttcagactagggttaaaggattgtttataagataaagctgaaggtttaaacaaagagtggaaggtttataaaaattaatcttccaaaagaaattctatatgagaacatattgattaacttcaaaaaggtattatacggtctttccataaattgcgcattgaaatagaagtacaacaaggttttattaacacactgatctgctacttaacagaaatttgtaaagtgtgataaaaggtttaccaaaatctcacctcatggtcaaactggctaagattggataaaaattatctataaagttccactaaaacaaaaaattggggttgacattaatagcagactaacgtaagggtgaaatctggctttttctctcttaaacaggattttcatgtaacagtaaaagataatgaaaggttttaccttttttttttttaagtcatcattttggcaaaagaacttacggtaatctggaattctattccataatatcacatgcttttgaacctctaacatatatatttaacatatttcccaaaatcaaacttcagcttcaaaaattgtctttcctgacccctagcttttggatgctagaggacccctagagcatccaagagagaggtaaacaggattatttgacatgtttagttacagaggattgccaaagtgatgtttaatcttccataggttatattttaatgaataatattaatatgtgttttaaaatcatataggatgtctaccattctaatgtctgagtatatgctatcaatcataattaaggttattatgttattgtaaaccac

SEQ ID NO: 442 - DNA, 1044 bp, Homo sapiens
  source 1..1044: mol_type = other DNA
ggcagtcctctatttgcatgtttcccatgggcacaaatttcagtgacctagatttagtttaaataccagtttccttaccaggaaggaaagaaaactggtaaggaaactgttgttgttaaaatctaggttaaaattttagttagcacattgtaactgagtaattacatgaagtacaaacctctctgctagctcttcagtctacaaatcgctatgtaaataacagatatgcttcatgattgtgaccagtcatgttatttctttcaaattcttccagtggtttgtccctgtgcatctgttaattcagttcacgtacagcagagcatgtagttatgctgtctctctgtcatctacttgacattctatagaagtgaacactcgaaagaactggtcaacaaagatgaaagtgcagcaaagcaatgaaaaatgataacactggaagtgaaattttaatcaaacataaatgaatttgtagaagaagtcactgaccatgggaatgttgttcttgctgctgtgtattcataggagcttagtgaaggcaaacttaccaacacaaataagcaaagtggttgcaataaagacagatacgtcccagaggaagtgatggttaaaaaaaaaaaactttacattaaaagatatttaatgtgaatatagaaatatttcacaacattgaaagcacaagcaataaaagggtggaagctgacccaaacttagaaggagtatggcagtttgccgtgaacataaaagatgcttactcagtatggtaagttacttgccagaaaaaaaggcaagccctattcaaactactttgtttttacaatgaaataaaacactttaattctatttctaatgttttaaattacagtgtactaaatatttttaaacatttttgcatttttttctacatttataactggtcttaagagtttttaatatttgagcagaaccttaaaggtcatggaacaatcatcattttccctattgattattaagattgcaggaccatttttatggtcccacagtaccatgtgaaatgaggatcgcttg

SEQ ID NO: 443 - DNA, 545 bp, Homo sapiens
  source 1..545: mol_type = other DNA
atgtggagaaaaggaaactcttatacgctgttggtgggaatgtaaattagtacaatctctaggaagaacagtatggagatttgtcagagaactaaaattagaactaccattcaatccagcaatcccactactgggtatccatccaaaggaaaagaaataattagatacctgcacttgtatgtttatcgtagcactagtcacaatagcaaagatgtggaatcaacctaagtgtccatcaatggatgattggatttaaaactgtggtgtatatatatgcaatggaatattattcagccataaaaaagaatgaaatcatgtctctcgcagccacatgggtagaactggaagctgttatcttaagttaaaaaagtcagacactgaaagacaaatatcacactgttcactcataagtgggagctaaataatgtgaacacatggcattagggtatggaataatatacactggagactcagaagggtggggggaggatgatgagaaattaattaataggtacaatgtggtgatatcaatctggtgatagata

SEQ ID NO: 444 - DNA, 6138 bp, Homo sapiens
  source 1..6138: mol_type = other DNA
ggaagtggagccaagatggccgaataggaacagttccagtctacagctcccagcatgagtgacgcagaagacgagtgatttctgcatttccaactgaggtaccgggttcatctcactggggagtgtcagaaagtgggtgcaggacactgggttcagtgcaccaagcatgagcttaagcagggcgaggcatcgcctcacctgggaagcgcaaggggtcagggaattccctttcctagtcaaagaaaggggtgacagatggcacctgtaacatcaggtcactcccaccctaatactgcacttttccaacggtcttagcaaatggcacaacaggagattttatatcccatgcctggctcggagggtcctacgcccacggagcctcgctgattgctagcacagcagtctgagaccaaactgcaaggtggcagtgaggctgggggaggggcacctgccattaccgaggcttgagtaggtaaacaaagcggccaggaagcttgaactaggtggagcccaccacagctcaaggaggcctgcctgcctctgtaggctccacctctgagggcagggcataagcaaacaaaacgcagcagaaacctctgcagacttatatgtccctgtttgacagctttgaagagagtagtggttctcccagcatgcagctggagatctgagaacagacagactgcctcaagtgggtccctgaaccccgagtagcctaactgggagacagcccccagtaagggcagactgacacctcacacggctgggtactcctctgagacaaaacttccagaggaatgatcaggcagcaacatttgctgttcaccaatatatgctgttctgcaggctccgctgctgatacccaggcaaacagggtctggagtggacctccaggaaactccaacagacctgcagctgagggtcctgactgttagaaggaaaactaacagaaaggacatccacaccaaaaccccatctgtacgtcaccatcatcaaagaccaaaagtagataaaaccacaaagatggggaaaaaacagagcagaaaaactggaaactttaaaaatcagagcgcctctcatcctccaaaggaatgcagctacttaccagcaacggaacaaagctggacagagaatgactttgacgagttgagagaagaaggcttcagatgatcaaactactctgagctaaaggaagaagttcgaacccaaggcaaagaagttaaaaaccttgaaaaaaaattagacgaatggctaactagaataaccaatgcagagaggtccttaaaggacctgatggagctgaaaaccatggcatgtgaactacgtgacgaatgcacaagcctcagtagccgatttgatcaactggtagaaagggtatcagtgatggaagatcaaatgaatgaaatgaagcgagaagagaagtttagagaaaaaagaataaaaagaaaccaacaaagcctccaagaaatatgggactatgtgaaaagaccaaatctgtgtctcactggtgtacctgaaagtgacggggagaatggaaccaagttggaaaacactctgcaggatattatccaggagaacttccccaatctagcaaggcaggccaacattcaaattcaggaaatacagagaatgccacaaagatactccttgagaagagcaactccaagacacataactgtcaggttcaccaaagttgaaatgaaggaaaaaacgttaagggcagccagagagaaaggttgggttacccacaaagggaagcccatcagactaacggctgatgtcttggcagaaactctacaagccagaagagagtgggggccaatactcaacattcttaaagaaaagaattttcaacccagaatttcatatccagccaaactaagcttcataagtgaaggagaaataaaatactttacagacaaacaaatgctgagagattttgtcaccaacaagcctgccctaaaagagctcctgaaggaagcactaaacatggaaaggaaaaaccagtaccagccactgcaaaaacatgccaaatcgtaaagaccattgaggctgggaagaaactgcatcaactaacgagcaaaataaccagctaacatcataaagacaggatcaaattcacacataacaatattaatcttaaatgtaaatgggctaaatgctccaattaaaagacacagactggcaaactggataaagagtcaagacccatcagtgtactgtattcaggaaacccatctcacatgcagagacacacataggctcaaaataaagggatggaggaagatctactaagcaaatggaaaacaaaaaaaggcaggggttgcaatcctagtctctgatgaaacaaactttaaaccaacaaagatcaaaagagacaaagaaggccattacataatggcaaagggatcaattcaacaataagagctaactatcctaaatatacgtgcacccaatacaggagcacccagattcacaaagcaagtccttagagaactacaaagagacttagactcccacacaataataatgggagactttaacaccccactgtcaacattagacagatcaacgagacagaaagttagcaagcatacccaggaattgaactcagctctgcaccaagcggacctaatagacatctacagaactctccaccccaaatcaacagaatatacattcttttcagcaccacatcacacctattccaaaattgaccgcatagtgggaagtaaagtactcctcagcaaatgtaaaagaacagaaattataacaaattgtctctgagaccacagtgcaatcaaactagaactcaagattaagaaactcactaaaaaccgctcaactacatggaaactgaacaacctgctcctgaatgactactgggtacataacgaaatgaaagcagaaagaaagatgttctttgaaaccaatgagaacaaagacacagcataccagaatctctgggacacattcaaagcagtgtgtagaggaaaatttatagcactaaatgcccacaagagaaagcagaaaagatccaaaattgacaccctaacatcacaattaaaagaactagagaagcaagagcaaacacattcaaaagttagcagaaggcaagaaataactaagatcagaacagaactgaaggaaatacagacataaaaaacccttcaaaaatcaatgaatccaggagctggttttttgaaaaaatcaacaaaattgatagactgctagcaagactaatgaagaaaagagagaagaatcaaatagacgcaataaaaaatgataaaggggatatcaccacagatcccacagaaatacaaactaccatcagagaatactataaacacctctacgcaaataaattagaaaatctagaagaaatggataaattcctcaacacatacgccctcccaagactaaaccaggaagaagctgaatctctgaatagaccaataacaagctctaaaattgaggcaataattaatagcttaccaactgaaaaagtccagaaccagatggattcacagctgaattctaccagaggtacaaggagctggtaccattccttctgaaactattccaatcaacagaaaaagagggaatcctccctaactcattttatgaggccagcatcatcctgataccaaagcctggcagagacacaacaaaaaaagagaatttcagaccaatatccctgatgaacatcgacgccaaaatcctcaataaaatactggcaaaccgaatccagcagcacatcaaaaagcttatccaccatgatcaagtgggcttcatccctgggatgcaaggctggttccacatacgcacatcaataaacgtaatccagcatataaacagaaccaacgacaaaaaccacatgattatctcaatagatgcagaaaaggcctttgacaaaattcaacaacccttcatgctaaaaactctcaataaattaggtattgatgggatgtatcttgaaataataagagctatctatgacaaacccacagccaatatcatactgaatgggcaaaaactggaagcattccctttgaaaactggcacaagacagggatgccctctctcaccactcctattcaacatagtgttggaagttctggccagggcaatcaggcaggagaagtaaataaagggcatttaattaggaaaagaggaagtcaaattgtccctgtttgcagatgacatgattatatatctagaaaaccccatcgtctcagcccaaaatctccttaagctgataggcaacttcagcaaagtctcaggatacaaaatcaatgtgcaaaaatcacaagcattcttatacaccaataacagacaaacagagagccaaatcatgagtgaactcccattcacaattgcttcaaagagaatacaatacctaggaatccaacttacaagggatgtgaaggacctcttcaaggagaactacaaaccactgctcaatgaaataaaagaggatacaaacaaatggaagaacattccatgctcatgcgtaggaagaatcaatattgtgaaaatggccatactgcccaaggtaatttatagattcaatgtcatccccatgaagctaccaatgactttcttcacagaattggaaaaaactactttaaagttcatatggaaccaaaaaagagcccacattgccaagtcaatcctaagccaaaagaacaaagctggaggcatcacgctacctgacttcaaactatactacaaggctacagtaaccaaaacagcatggtactggtaccaaaacagagatatagaccaatggaacagaacagaaccctcagaaataacgccgcatatctacaactatctgatctttgacaaacctgagaaaaacaagcaatggggaaaggattccctatttaataaatggtgctgggaaaactggatagccatatgtagaaagctgaaactggatcccttccttacaccttatacaaaaattaattcaagatagattaaagacttacatgttagacctaaaaccataaaaaccctagaagaaaacctaggcattaccattcaggatataggcatgggcaaggacttcatgtctaaaacaccaaaagcaatggcaacaaaagccaaaattgacaaatgggatctaattaaactaaagagcttctgcacagcaaaagaaactaccctcagagtgaacaggcaacctacagaatgggagataatttttgcaatctactcatctgacaaagggctaatatccagaatctacaatgaactcaaacaaatttacagaaaaaaacaaacaaccccattaacaagtgggcaaaagatatgaacagacacttctcaaaagaagacatttatgcagccaacagacacatgaaaaaatgctcatcattactggccattggagaaatgcaaatcaaaaccacaatgagatatcatctcacaccagtaagactggtgatcattaaaaagtcaggaaacaacaggtgctggagaggatgtggagaaataggaacacttttacactgttggtgggagtgtaaactagtccaaccactgtggaagtcagtgtggtgattcctcagggatctagaactagaaataccatttgacccagccatcccattactgggtatatacccaaaggattataaaacatgctgctataaagacacatgcacatgtatgtttattgcagcactattcacaatagcaaagacttggaaccaatccaaatgtccaacaacgatagactggattaagaaaatgtggcacatatacaccatggaatactatgcagccataaaaaaggatgagttcatgtcctttgtagggacatggatgaagctggaaaccatcattctcagcaaactattgcaagaacaaaaaaccaaacaccgcatgttctcactcataggtgggaattgaacaatgcgaactcatggacacaggaaggggaccatcacacaccggggcctgctgtggggtggggggagggggagggatagcattaggagatatacctaatgttaaatgatgagttactgggtgcagcacaccaacatggcacatgtatacacatgtaactaatctgcatgttgtgcacatgtaccctaaaacttaaagtataataaaaaaaataaa

SEQ ID NO: 445 - DNA, 6091 bp, Homo sapiens
  source 1..6091: mol_type = other DNA
gatggctgaataggaacagctccagtctacagctcccagcgtgagcaatagaagacgggtgatttctgcatttccaactgaggtaccaggttcatctcactggggcttgtcggacagtgggtgcagctcacggagtgtgagctgaagcagggtggggcattgcctcacccagggagcacaaggggtcagggaattccctttcctagccaagggaagacatgacagatggtacctggaaaatcgggacacttgcaccctaatactgcgcttttccaacggtcttagcaaatggcacaccaggagataatatcccgtgcctggctcagagggtcccatgcccacagagcctcgctcactgctagcaagcacagcagtcagagatcgaattgcaaggtggcagcaaggctgggggagggcatccacttgctgaggcttgagtggcaaacaaagcagctgggaagctcgaactgggtagagcccactgcagctcaaggaggcctgcctgcctctgtagactccacctctgggggcagggcatagctgaacaaaaggcagcagaaacaagcagacttaagtgtccctgtctgacagctttgaagagagtagtggttctcccacaacggcgtttgagatctgagaatggacagactgcctcctcaagtgggtctctgacccctgagcagcctaactggtagagaactcccaatagggggctgaccgacacctcatacagccaggtgcccctctgagatgaagcttccaaaggaaggatcaggcagcaacatttgccattctgcagcctccactggtgatacccaggcaaacagggactggagtggacctccagcaaattccaacagacctgcagctgagggtcctgactgttagaaggagaactaacaaacagaaaggacatccacaacaaaaccccatctgtacgtcaccatcatcaaagactacaggtagataaaaccacaaagatggggagaaaccagagcagaaaatcgaaaaattctaaaaattagagcacctcttctcctctaaaggaacgcagctacttgccagcaacagaacaaagctggatggagaatgactttgacgacttgagagaagaaggcttcagacgattggtaataacaaacttctctgagctaaaggaggatgtttgaacccatcgcaaagaagctaaaaaccttgaaacaaggttagatgaatgactaactgaataaatagtgtagagaacaccttaaatgacctgatggagctgaaaaccacggcacgaaaactacgtgacaaatgcaccaggttcagtagctgatttgatcaagtggaagaaagggtatcagtgatcgaggatgaaatgaatgaaatgaagccagaagagaagtttagagaaaaaagagtaaaaagaaacgaacaaagcctccaagaaatatgggactatgtgaaaagaccaaatctacatctgattggtgtacctcaaagtgatggggagaatggaaccaagttggaaaacactcttcaggattttatccaggagaacttccccagcctagcaaggcaggccaacattcaaactcaggaaatacagagaatgccacaaagatactccttgagaacagcaactccaagacacataattgtcagactcaccaaagctgaaatgaaggaaaaaatgttaagggcagccagagagaaaggtcgggttacccacaaagggaagcccatcagactaacagtggatctctgggcagaaaccctacaagccagaagagagtgggggccaatattcaaaattctaaaagaaaagaattttcaacccagaatttcatatccagccaaactaagcttcataagtgaaggagaaataaaatcctttacagagaagcaaatgctgagagattttgtcaccaccaggcctgccttacaagagctcctgaaggaagcattaaacatggaaaggaacaacctatggtaccagccactgcaaaaacatgccaaattgtaaagaccatcgatgctaggaagaaatgcatcaactaacgagcaaaataaccagctaacatcataatgacaggatcaaattcacacataacaatattaaccttaaatgtaaatgggctaaatgttccaattaaaagacacagactggcaaactggatagagtcaagacccatcagtgtgctgtattcaggagacccatctcacatgcagagacacacataggctcaaaataaagggatggaggaagatctactaagcaaacggaaaacaaaaaaaagcaggggttgcaatcctagtctctgataaaacagactttaaaccaacaaagatcaaaagagacaaagaaggccactacataatggtaaagggatcaattcaacaagaagagctaactatcccaaatatatatgcacccaatacaggagcacccagattcataaagcaagtccttagagacctacaaagagacttagactccctcacaataataatgggagactttaacaccccactgtcaacattagacagatcaacgagacagaaggttaacaaggatatccaggacttgaactcagctctgcaccaagcagacctaatagatatctacagaactctccaccccaaatcaacagaatatacattcttctcagcaccacatcgcacttattccaaaattgaccacataggtggaagtaaagcattcctcagcaaatgtaaaagaacagaaattgtaacaaactgtctctcagaccacagtgcaatcaaactagaactcaggattaagaaactcactcaaaaccactcaactatatggaaactgaacaacctgctcctgaatgactactgggtgcacaacgaaatgaaggcagaaagctgttctttgaaaccaatgagaacaaagacacaacataccagaatctctgggacacatttaaagcagtgtgtagagggaaatttatagcactaaatgcccacaagagaaagcaggaaagatctaaaattgacaccctaacatcacaattaaaagaagtaaagaagcaagagcaagcacattcaaaagctagcagaaggcaagaaataactaagatcagaacagaactgaaggagatagagacacaaaaaacccttcaaaaaaatcaatgaatccaggagctggttttttgaaaacatcaacaaaattgatagaccgctagaaagactaatacagaagaaaacagaagaatcaaatagacacaataaaaaatgatgaagaggatatcaccactgatcccacagaaatacaaactaccatcagagaatactataaacaactccacgcaaataactagaaaatctagaagaaatgcataaattcctggacacatacaccctcccaagactagaagttgaatccctgaatagaccaataacaggctctgaaattgaggcaataattaagagcctaccaaccaaaaaaagtccaggaccagatggattaacaaccaaaatctaccagaggtacaaaggggagctgtaccagtccttctgaaactattccaatcaataaaaagagagggaatcctctctaactcattttatgaggccagcatcatcctgataccaaagcctggcagagacacaacaaaaaaagagaattttagaccaatatccttgatgaacatcgatgcaaaaatcctcaataaaatactggcaaaccgaatccagcagcacatcaaaaagcttatccaccatgatcaagtgggcttcatccctgggatgtgaggctggttcaacatacgcaaatcaataaacataatccagcatataaacagcaccaaagacaaaaaccaaatgattatctcaatagatgcagaaaaggcctttgacaaaattcaacagcactttatgctaaaaactctccataaactaggtactgatgggatgtatctcaaaatggtaagagctatttatcacaaacccacagccaatatcatactgaatgggcaaaaactggaagcattcccttcgaaaactggcacaagacagggatgccctctctcaccactcctattcaacatagtgctggaagttctggccagggcaattaggcaggagaaagaaataaagagtattcaattagcaaaagaggaagtcaaattgtccctgtttgcagataatatgattgtatatttagaaaatcccattgtttcagcccaaaatctccttaagctgataagcaacttcagcaaagtctcaggatacaaaatcaatgtgtaaaaatcacaagcatccctatacaccaataacagacaaacagagagccaaatcatgagtgaactcccattcacaattgcttcaaagagaataaaatacctaggaatccaacttacaagggatgtgagggacctcttcaaggagaactacaaaccactgctcaatgaaataaaagaggacacaaacaaatggaagaacattccatgctcatgcataggaagaatcaatatcatgaaaatggccatactgcccaaggtaatttatagattcaatgccatccccaatcaagctaccaatgactttcttcacagaagtggaaaaaactactttaaagttcatatggaaccaaaaaagagcccacattgccaagacaatcctaagccaaaagaacgaagatggaggcatcacgctacctgacttcaaactatactacaaagctccagtaagcaaaacagcatggtactggtaccaaaacagagatatagaccaatggaacagaacagaaccctaagaaataataccacacatctacaaccatctgatctttgacaaccctgacaaaaacaagcaatggggaaaggattccctatttaataaatggtgctgggaaaactagctagccatatgtaggaagctgaagctggatcccttccttacaccttatacaaaaattaattcaagatggattaaagacttacatgttagacctaaaaccaaaaaaccctagaagaaaacctaggtaataccattcaggacataggcaggggcaaggacttcatgattaaaacaccaaaagcaatggcaacaaaagccaaaattgacaaatgggatctaactaaactaaagagcttctgcacagcaaaagaaactaccatcagagtgaacaggcaacctacagaatgggagaaaatttttacaatctacccatctgacaaggtgctaatatctagaatctacaaagaagttaaacaaatttacaagaaaaaaatcaaccccatcaaaaagtgggtgaaggatatgacagacacttttcagaagaagacatttatgcagccaacagacacgtgaaaaaatgctcatcatcaccggctatgagagaaatgcaaatcaaatctacaatgagataccatctcacaccagttagaatggcaattattaaaaagtcaggaaacaacacgtgctggagaggatgtggagaaataggaacacttttacactgttggtgggactgtaaactagttcaaccattgtggaagacagtttggcgattcctcaaggatttagaactagaaataccatttgacccagccatcccattactgggtatatacccaaaggattataaatcatgctgccataaagacacatgcacgcatatgtttattgtggcactattcacaatagcaaagacttggaaccaacccaaatgtccatcaatgatagactgaataaagaaaatgtggcacatatacaccacgggatactatgcagccataaaaaaggatgagttcttgtcctttgtagggacatggatgaagctggaaaccatcattctgagcaaactatcgcaaggacagaaaaccaaacaccgcacgttctcactcataggtaggaactgaacaatgagaatgcttggacacagggtggggaacaccacacaccggggcctgttgtggggtagggggagaggggagggatagcactgggagatatatctaatgtaaatgacgagttaatgggtgcagcacaccaacatggcacatgtatatatatgtaacaaacctgtaccttatgcacatgtaccctagaacttaaagtataataattaaaaaag

SEQ ID NO: 446 - DNA, 6029 bp, Homo sapiens
  source 1..6029: mol_type = other DNA
gaggaggagccaagatggccgaataggaacagctccggtctacagctcccagcgtgagcgacgcagaagacgggtgatttctgcatttccatctgaggtaccgggttcctgtcactagggagtgccagacagtgggcgcaggccagtgtgtgcgcgcaccgtgcgcgagccgaagcagggcgaggcattgcctcacctgggaagcgcaaggggtcagggagttccctttccgagtcaaagaaaggggtgacggacgcacctggaaaatcgggtcactcccacccgaatattgcgcttttcagaccggcttaagaaacggcgcaccacgagactatatcccacacctggctcagagggtcctacgcccacggaatctcgctgattgctagcacagcagtctgagatcaaactgcaaggcggcaacgaggctgggggaggggcgcccgccattgcccaggcttgcttaggtaaacaaagcagccaggaagctcgaactgggtggagcccaccacagctcaaggaggcctgcctgcctctgtaggctccacctctgggggcagggcacagacaaacaaaaagacagcagtaacctctgcagacttaagtgtccctgtctgacagctttgaagagagcagtggttctcccagcacgcagctggagatctgagaacgggcagactgcctcctcaagtgggtccctgacccctgaaccccgagcagcctaactgggaggcaccccccagcaggggcacactgacacctcacacggcagggtattccaacagacctgcagctgagggtcctgtctgttagaaggaaaactaacaaccagaaaggacatctacaccgaaaacccatctgtacatcaccatcatcaaagaccaaaagtagataaaaccacaaagatggggaaaaaacagaacagaaaaactggaaactctaaaacgcagagcgcctctcctcctccaaaggaacgcagttcctcaccagcaacagaacaaagctggatggagaatgattttgacgagctgagagaagaaggcttcagacgatcaaattactctgagctatgggaggacattcaaaccaaaggcaaagaagttgaaaactttgaaaaaaatttagaagaatgtataactagaataaccaatacagagaagtgcttaaaggagctgatggagctgaaaaccaaggctcgagaactacgtgaagaatgcagaagcctcaggagccgatgcgatcaactggaagaaagggtatcagcaatggaagatgaaatgaatgaaatgaagcgagaagggaagtttagagaaaaaagaataaaaagaaatgagcaaagcctccaagaaatatgggactatgtgaaaagaccaaatctacgtctgattggtgtacctgaaagtgatgtggagaatggaaccaagttggaaaacactctgcaggatattatccaggagaacttccccaatctagcaaggcaggccaacgttcagattcaggaaatacagagaacgccacaaagatactcctcgagaagagcaactccaagacacataattgtcagattcaccaaagttgaaatgaaggaaaaaatgttaagggcagccagagagaaaggtcgggttaccctcaaaggaaagcccatcagactaacagcggatctctcggcagaaaccctacaagccagaagagagtgggggccaatattcaacattcttaaagaaaagaattttcaacccagaatttcatatccagccaaactaagcttcataagtgaaggagaaataaaatactttatagacaagcaaatgctgagagattttgtcaccaccaggcctgccctaaaagagctcctgaaggaagcgctaaacatggaaaggaacaaccggtaccagccgctgcaaaatcatgccaaaatgtaaagaccatcgagactaggaagaaactgcatcaactaatgagcaaaatcaccagctaacatcataatgacaggatcaaattcacacataacaatattaactttaaatataaatggactaaattctgcaattaaaagacacagactggcaagttggataaagagtcaagacccatcagtgtgctgtattcaggaaacccatctcacgtgcagagacacacataggctcaaaataaaaggatggaggaagatctaccaagccaatggaaaacaaaaaaaggcaggggttgcaatcctagtctctgataaaacagactttaaaccaacaaagatcaaaagagacaaagaaggccattacataatggtaaagggatcaattcaacaagaggagctaactatcctaaatatttatgcacccaatacaggagcacccagattcataaagcaagtcctcagtgacctacaaagagacttagactcccacacattaataatgggagactttaacaccccactgtcaacattagacagatcaacgagacagaaagtcaacaaggatacccaggaattgaactcagctctgcaccaagcagacctaatagacatctacagaactctccaccccaaatcaacagaatatacatttttttcagcaccacaccacacctattccaaaattgaccacatagttggaagtaaagctctcctcagcaaatgtaaaagaacagaaattataacaaactatctctcagaccacactgcaatcaaactagaactcaggattaagaatctcactcaaagccgctcaactacatggaaactgaacaacctgctcctgaatgactactgggtacataacgaaatgaaggcagaaataaagatgttctttgaaaccaacgagaacaaagacaccacataccagaatctctgggacgcattcaaagcagtgtgtagagggaaatttatagcactaaatgcctacaagagaaagcaggaaagatccaaaattgacaccctaacatcacaattaaaagaactagaaaagcaagagcaaacacattcaaaagctagcagaaggcaagaaataactaaaatcagagcagaactgaaggaaatagagacacaaaaaacccttcaaaaaatcaatgaatccaggagctggttttttgaaaggatcaacaaaattgatagaccgctagcaagactaataaagaaaaaaagagagaagaatcaaatagacacaataaaaaatgataaaggggatatcaccaccgatcccacagaaatacaaactaccatcagagaatactacaaacacctctacgcaaataaactagaaaatctagaagaaatggatacattcctcgacacatacactctcccaagactaaaccaggaagaagttgaatctctgaatagaccaataacaggctctgaaattgtggcaataatcaatagtttaccaaccaaaaagagtccaggaccagatggattcacagccgaattctaccaggggtacaaggaggaactggtaccattccttctgaaactattccaatcaatagaaaaagagggaatcctccccaacttattttatgaggccagcatcattctgataccaaagccgggcagagacacaaccaaaaaagagaattttagaccaatatccttgatgaacattgatgcaaaaatcctcaataaaatactggcaaaccgaatccagcagcacatcaaaaagcttatccaccatgatcaagtgggcttcatccctgggatgcaaggctggttcaatatacgcaaatcaataaatgtaatccagcatataaacagagccaaagacaaaaaccacatgattatctcaatagatgcagaaaaagcctttgacaaaattcaacaacccttcatgctaaaaactctcaataaattaggtattgatgggacgtatttcaaaataataagagctatctatgacaaacccacagccaatatcatactgaatgggcaaaaactggaagcattccctttgaaaactggcacaagacagggatgccctctctcaccgctcctattcaacatagtgttggaagttctggccagggcaatcaggcaggagaaggaaataaagggtattcaattaggaaaagaggaagtcaaattgtccctgtttgcagacgacatgattgtttatctagaaaaccccatcgtctcagcccaaaatctccttaagctgataagcaacttcagcaaagtctcaggatacaaaatcaatgtacaaaaatcacaagcattcttatacaccaacaacagacaaacagagagccaaatcatgggtgaactcccattcacaattgcttcaaagagaataaaatacctaggaatccaacttacaagagatgtgaaggacctcttcaaggagaactacaaaccactgctcaaggaaataaaagaggacacaaacaaatggaagaacattccatgctcatgggtaggaagaatcaatatcgtgaaaatggccatactgcccaaggtaatttacagattcaatgccatccccatcaagctaccaatgactttcttcacagaattggaaaaaactactttaaagtacatatggaaccaaaaaagagcccgcatcgccaagtcaatcctaagccaaaagaacaaagctggaggcatcacactacctgacttcaaactatactacaaggctacagtaaccaaaacagcatggtactggtaccaaaacagagatatagatcaatggaacagaacagagccctcagaaataatgccgcatatctacaactatctgatctttgacaaacctgagaaaaacaagcaatggggaaaggattccctatttaataaatggtgctgggaaaactggctagccatatgtagaaagctgaaactggatcccttccttacaccttatacaaaaatcaattcaagatggattaaagatttaaacgttaaacctaaaaccataaaaaccctagaagaaaacctaggcattaccattcaggacataggcgtgggcaaggacttcatgtctgaaacaccaaaagcaatggcaacaaaagacaaaattgacaaatgggatctaattaaactaaagagcttctgcacagcaaaagaaactaccatcagagtgaacaggcaacctacaacatgggagaaaattttcgcaacctactcatctgacaaagggctaatatccagaatctacaatgaactcaaacaaatttacaagaaaaaaacaaacaaccccatcaaaaagtgggcgaaggacatgaacagacacttctcaaaagaagacatttatgcagccaaaaaacacatgaagaaatgctcatcatcactggccatcagagaaatgcaaatcaaaaccactatgagatatcatctcacaccagttagaatggcaatcattaaaaagtcaggaaacaacaggtgctggagaggatgcggagaaataggaacacttttacactgttggtgggactgtaaactagttcaaccattgtggaagtcagtgtggcgattcctcagggatctagaactagaaataccatttgacccagccatcccattactgggtatatacccaaatgagtataaatcatgctgctataaagacacatgcacacgtatgtttattgcggcactattcacaatagcaaagacttggaaccaacccaaatgtccaacaatgatagactggattaagaaaatgtggcacatatacaccatggaatactatgcagccataaaaaatgatgagttcatatcctttgtagggacatggatgaaattggaaaccatcattctcagtaaactatcgcaagaacaaaaaacaaacaccgcatattctcactcataggtgggaattgaacaatgagatcacatggacacaggaaggggaatatcacactctggggactgtggtggggtcaggggaggggggagggatagcattgggagatatacctaatgctagatgacacattagtgggtgcagtgcaccagcatggcacatgtatacatatgtaactaacctgcacaatgtgcacatgtaccctaaaacttagagtataataaaaaaaaaaaa

SEQ ID NO: 447 - DNA, 430 bp, Homo sapiens
  source 1..430: mol_type = other DNA
acgcagacgaaaatggaaagattaattgggagtggtaggatgaaacaatttggagaagatagaagtttgaagtggaaaactggaagacagaagtacgggaaggcgaagaaaagaatagagaagatagggaaattagaagataaaaacatacttttagaagaaaaaagataaatttaaacctgaaaagtaggaagcagaagaaaaaagacaagctaggaaacaaaaagctaagggcaaaatgtacaaacttagaagaaaattggaagatagaaacaagatagaaaatgaaaatattgtcaagagtttcagatagaaaatgaaaaacaagctaagacaagtattggagaagtatagaagatagaaaaatataaagccaaaaattggataaaatagcactgaaaaaatgaggaaattattggtaaccaattta

SEQ ID NO: 448 - DNA, 306 bp, Homo sapiens
  source 1..306: mol_type = other DNA
ggggaagaattagcaatcagtccatcagaaaacaaagtaaatgagaaactcagggcaactcattaactccattaaaaagaaagtacaaggaaggtaatttaattatagtccaactcttggctccgcagttaactttcacatagtaatagaaatagtaatctgagtattttttaacctaataactagggatgggggagggttgctgacaaaagagagctaaagcctcatgtatgacaacagggagtcaacaggtaatgtctaagattgatatatcaagcaagagtcatataagcacattttaaaaat

SEQ ID NO: 449 - DNA, 921 bp, Homo sapiens
  source 1..921: mol_type = other DNA
aaggtaaaaataaaatcctaagccccccattgaccaaagggaccttctcctgaccaaggggacaccagaaaaacctcaacactgaattcccagacatgatgggatgggaggtcagatgcgcctggtaatagccccctgtttcagagtttggacaccacaactggccggcattcatgttaaaacagagatcgtaagactgacagaacggactctgtggcaataagataccaaattataaacaggacccaaagccatgctaggcgagggtaagtcaggcaacccacacttagagaataaactatattctaagagccacaaggctttctgtttctctattagccaaacacacactagccttgggatagggaatattaaaacaattgcagctccactaggtgccaactaactgactctgtttcaccagccatagcagctgtgattggacaagagactgatttcagtgactttctcctaataagagaccaccgaccagctgaccatgccgaccagctgacccgttaatagagagagatgatgcacctgcatgcctttgtgtcctgaaaagacgttttgccataaaggccctaattgtaagatgtgtaaatgttaagtctccaccccaaagtgaacatgggtcatatattacatgctttgctcaataagagggcatgtgtcaggaccaccttcatgaatattcatagctcctcctgttacctgttgaatatgtatgtttagccaatcccttcagcatagcgctcctgccccaacccctcctccttggacgtgcctgtctctggccttggctggagacagattcccagcctcagacagatggccgccaccttgcaggctacgaccgtttacaagaaataaagccttctctttttccaaatttgtgaattgtgtgtttttaaactaaca

SEQ ID NO: 450 - DNA, 2024 bp, Homo sapiens
  source 1..2024: mol_type = other DNA
aaaacctgtacatcaaaacttactgaatgtaatgaaagcagcgctcagagggaaatttatagctgtaaaagcctacattataaaagatctaagactaaacacacagagtagactaaacacagaaaacaaaaggaaagaaataataaagattacatttaagattaacagagaataggaaaacagtagaatgaatgaaacccaaaagttgggtcctttggtaagatcaacaaaattgacaaatttttaacgactggtcaagaaaaaaagagaagactcaaattaccaaaattaggaagaaaaatgatgacattactgttattacagaattaagaaggattatagacaaatactatgaacaattttaatgccaacagattagataatttagatgaaatgtaccagttcctagagtgaatgtaatgaaatgcaccaattcctagaaactcgtaaagtacctgaggaagttgaaaatctgaattgacctatatcaagtaaagaggttgaacccataataaaaaaaaaaaaatccaacaataaaagccgagggccagtggcttcactggtgattctatcaaacaactaaagaagaattaatgtgaatcctcacactctcccaaaaattaaaagaataaatattctatgaggtaagcattaccctgataccaaagtcagacacatatttcataagaaaagtagaggccaagatctcttcggaatatagataaaaattcttcagcaaaaatactagccaacaaaatccagcagcatttttttaaaagaattatataccatgaccaagcaggatttattccaagaatgcaaaggtgtttcagcatacgaagatcaatgtaatgtaccattttagtagaatgaaggggaaaaaagctcagtagacacgcacaaaaagtgacaaaatcttataccctttcatgagaaaaatgctcaacatgtaggaaaataagagaacttcagtcttataaaaggaatctataaaaaacccacagcaacatcatactcagtggtgaaagagaaaactttcctcccagtagcaggaacaagataaatgatgtctactgttgccacttctgttcaacattgtactggaaattctagccagaagaattgggcaagaaaaataaaaggcatccagatggcaaaggaagaagtaagactatctctgtttacacatgacatgttaatcacaaaaaatcctaaaaaatccatgaaataattgttaaagctaatagacaaattttagcaaagttgcaagatacaagctcaccacacaaaaatcagttgcatttctatacactagcagtgaacaacccaaaaaggtaactatgaaaacaattcagtttacaatagcatcaaaaaatagaatacttatgaataaatttaaccgcagtagtgcaagacttgtatgctgaaaactacaaaacgttgctgaaagaaattaaagaagatctaactaagcaaaagacttcctgtgctcatggattagaagacataatattgttaagatggcaatactcttgaagtcgttttacagatttagtgtaacatctattaaaattccaatgatcttttttgcagaaatggacaaacataccaaaacacatatatgaattttcagaggatcccaaatagttaaaacaatcttgaaaaaaaaaaaaaaagaacaaaggtggaagactcacaactcctgatttcaaaacttactgcaaagtatagcaatcaaaacaatgtggtactggaataagggtagacatgtaaatccatggaatagagttgagagtccagaaataaacccatacatccatggtcaactgatttccaacaagggtgccaagaccattcagtggggaaagaacagccactttacatatggtgctggtataactggatatctacatgcaaaagaatgaagttgggccccaacctcataccacatacaaaaatgaactccagatggatcagagacctaaatgtaagtgcttaaactataaaactcttagaagaaaaca

SEQ ID NO: 451 - DNA, 6029 bp, Homo sapiens
  source 1..6029: mol_type = other DNA
gggaggagccaagatggccgaataggaacagctccggtctacagctcccagcgtgagcgacgcagaagatgggtgatttctgcatttccatctgaggtaccgggttcatctcactagggagtgccagacagtgggcgcaggccagtgtgtgcgcgcaccgtgcgcgagccgaagcagggcgaggcattgcctcacctgggaagcgcaaggggtcagggagttccctttccgagtcaaagaaaggggtgacggacgcacctggaaaatcgggtcactcccacccgaatattgcgcttttcagaccggcttaagaaacggcgcaccacgagactatatcccacacctggctcagagggtcctacgcccacggaatctcgctgattgctagcacagcagtctgagatcaaactgcaaggcggcaacgaggctgggggaggggcgcccgccatagcccaggctcgcttaggtaaacaaagcagccgcgaagctcgaactgggtggagcccaccacagctcaaggaggcctgcctgcctctgtaggctccacctctgggggcagggcacagacaaacaaaaagacagcagtaacctctgcagacttaagtgtccctgtctgacagctttgaagagagcagtggttctcccagcacgcagctggagatctgagaacgggcagactgcctcctcaagtgggtccctgacccctgacccccgagcagcctaactgggaggcaccccccagcaggggcacactgacacctcacacggcagggtattccaacagacctgcagctgagggtcctgtctgttagaaggaaaactaacaaccagaaaggacgtctacaccgaaaacccatctgtacatcaccatcatcaaagaccaaaagtagataaaaccacaaagatggggaaaaaacagaacagaaaaactggaaactctaaaacgcagagcgcctctcctcctccaaaggaacgcagttcctcaccagcaacagaacaaagctggatggagaatgattttgacgagctgagagaagaaggcttcagacgatcaaattactctgagctacgggaggacattcaaaccaaaggcaaagaagttgaaaactttgaaaaaaatttagaagaatgtataactagaataaccaatacagagaagtgcttaaaggagctgatggagctgaaaaccaaggctcgagaactacgtgaagaatgcagaagcctcaggagccgatgcgatcaactggaagaaagggtatcagcaatggaagatgaaatgaatgaaatgaagcgagaagggaagtttagagaaaaaagaataaaaagaaatgagcaaagcctccaagaaatatgggactatgtgaaaagaccaaatctacgtctgattggtgtacctgaaagtgatgtggagaatggaaccaagttggaaaacactctgcaggatattatccaggagaacttccccaatctagcaaggcaggccaacgttcagattcaggaaatacagagaacgccacaaagatactcctcgagaagagcaactccaagacacataattgtcagattcaccaaagttgaaatgaaggaaaaaatgttaagggcagccagagagaaaggtcgggttaccctcaaaggaaagcccatcagactaacagcggatctctcggcagaaaccctacaagccagaagagagtgggggccaatattcaacattcttaaagaaaagaattttcaacccagaatttcatatccagccaaactaagcttcataagtgaaggagaaataaaatactttatagacaagcaaatgctgagagattttgtcaccaccaggcctgccctaaaagagctcctgaaggaagcggtaaacatggaaaggaacaaccggtaccagccgctgcaaaatcatgccaaaatgtaaagaccatcgagactaggaagaaactgcatcaactaacgagcaaaatcgccagctaacatcataatgacaggatcaaattcacacataacaatattaactttaaatataaatggactaaattctgcaattaaaagacacagactggcaagttggataaagagtcaagacccatcagtgtgctgtattcaggaaatccatctcacgtgcagagacacacataggctcaaaataaaaggatggaggaagatctaccaagccaatggaaaacaaaaaaaggcaggggttgcaatcctagtctctgataaaacagactttaaaccaacaaagatcaaaagagacaaagaaggccattacataatggtaaagggatcaattcaacaagaggagctaactatcctaaatatttatgcacccaatacaggagcacccagattcataaagcaagtcctcagtgacctacaaagagacttagactcccacacattaataatgggagactttaacaccccactgtcaacattagacagatcaacgagacagaaagtcaacaaggatacccaggaattgaactcagctctgcaccaagcagacctaatagacatctacagaactctccaccccaaatcaacagaatatacatttttttcagcaccacaccacacctattccaaaattgaccacatagttggaagtaaagctctcctcagcaaatgtaaaagaacagaaattataacaaactatctctcagaccacagtgcaatcaaactagaactcaggattaagaatctcactcaaagccgctcaactacatggaaactgaacaacctgctcctgaatgactactgggtacataacgaaatgaaggcagaaataaagatgttctttgaaaccaacgagaacaaagacaccacataccagaatctctgggacgcattcaaagcagtgtgtagagggaaatttatagcactaaatgcctacaagagaaagcaggaaagatccaaaattgacaccctaacatcacaattaaaagaactagaaaagcaagagcaaacacattcaaaagctagcagaaggcaagaaataactaaaatcagagcagaactgaaggaaatagagacacaaaaaacccttcaaaaaatcaatgaatccaggagctggtttttcgaaaggatcaacaaaattgatagaccgctagcaagactaataaagaaaaaaagagagaagaatcaaatagacacaataaaaaatgataaaggggatatcaccaccgatcccacagaaatacaaactaccatcagagaatactacaaacacctctacgcaaataaactagaaaatctagaagaaatggatacattcctcgacacatacactctcccaagactaaaccaggaagaagttgaatctctgaatagaccaataacaggctctgaaattgtggcaataatcaatagtttaccaaccaaaaagagtccaggaccagatggattcacagccgaattctaccagaggtacaaggaggaactggtaccattccttctgaaactattccaatcaatagaaaaagagggaatcctccctaactcattttatgaggccagcatcattctgataccaaagccgggcagagacacaaccaaaaaagagaattttagaccaatatccttgatgaacattgatgcaaaaatcctcaataaaatactggcaaaccgaatccagcagcacatcaaaaagcttatccaccatgatcaagtgggcttcatccctgggatgcaaggctggttcaatatacgcaaatcaataaatgtaatccagcatataaacagagccaaagacaaaaaccacatgattatctcaatagatgtagaaaaggcctttgacaaaattcaacaacccttcatgctaaaaactctcaataaattaggtattgatgggacgtatttcaaaataataagagctatctatgacaaacccacagccaatatcatactgaatgggcaaaaactggaagcattccctttgaaaactggcacaagacagggatgccctctctcaccgctcctattcaacatagtgttggaagttctggccagggcaatcaggcaggagaaggaaataaagggtattcaattaggaaaagaggaagtcaaattgtccctgtttgcagacgacatgattgtttatctagaaaaccccatcgtctcagcccaaaatctccttaagctgataagcaacttcagcaaagtctcaggatacaaaatcaatgtacaaaaatcacaagcattcttatacaccaacaacagacaaacagagagccaaatcatgggtgaactcccattcacaattgcttcaaagagaataaaatacctaggaatccaacttacaagggatgtgaaggacctcttcaaggagaactacaaaccactgctcaaggaaataaaagaggacacaaacaaatggaagaacattccatgctcatgggtaggaagaatcaatatcgtgaaaatggccatactgcccaaggtaatttacagattcaatgccatccccatcaagctaccaatgactttcttcacagaattggaaaaaactactttaaagttcatatggaaccaaaaaagagcccgcatcgccaagtcaatcctaagccaaaagaacaaagctggaggcatcacactacctgacttcaaactatactacaaggctacagtaaccaaaacagcatggtactggtaccaaaacagagatatagatcaatggaacagaacagagccctcagaaataatgccgcatatctacaactatctgatctttgacaaacctgagaaaaacaagcaatggggaaaggattccctatttaataaatggtgctgggaaaactggctagccatatgtagaaagctgaaactggatcccttccttacaccttatacaaaaatcaattcaagatggattaaagatttaaacgttaaacctaaaaccataaaaaccctagaagaaaacctaggcattaccattcaggacataggcgtgggcaaggacttcatgtccaaaacaccaaaagcaatggcaacaaaagacaaaattgacaaatgggatctaattaaactaaagagcttctgcacagcaaaagaaactaccatcagagtgaacaggcaacctacaacatgggagaaaattttcgcaacctactcatctgacaaagggctaatatccagaatctacaatgaactcaaacaaatttacaagaaaaaaacaaacaaccccatcaaaaagtgggcgaaggacatgaacagacacttctcaaaagaagacatttatgcagccaaaaaacacatgaagaaatgctcatcatcactggccatcagagaaatgcaaatcaaaaccactatgagatatcatctcacaccagttagaatggcaatcattaaaaagtcaggaaacagcaggtgctggagaggatgcggagaaataggaacacttttacactgttggtgggactgtaaactagttcaaccattgtggaagtcagtgtggcgattcctcagggatctagaactagaaataccatttgacccagccatcccattactgggtatatacccaaatgagtataaatcatgctgctataaagacacatgcacacgtatgtttattgcagcactattcacaatagcaaagacttggaaccaacccaaatgtccaacaatgatagactggattaagaaaatgtggcacatatacaccatggaatactatgcagccataaaaaatgatgagttcatatcctttgtagggacatggatgaaattggaaaccatcattctcagtaaactatcgcaagaacaaaaaaccaaacaccgcatattctcactcataggtgggaattgaacaatgagatcacatggacacaggaaggggaatatcacactctggggactgtggtggggtcgggggaggggggagggatagcattgggagatatacctaatgctagatgacacattagtgggtgcagcgcaccagcatggcacatgtatacatatgtaactaacctgcacaatgtgcacatgtaccctaaaacttagagtataataaaaaaaaaaag

SEQ ID NO: 452 - DNA, 307 bp, Homo sapiens
  source 1..307: mol_type = other DNA
gccgagagcagtggctcacgcctgtaatcccagcagtttgggaggccgaggcaggtgcatcgcttgaggacaggagttcgagactaggctggccaacatggtgaaaccccatctctactaaaaatacaaaaaaaaaaaaaaaattaaccggctgtggtggcgagttcctgtggtcccagctactcgggaggctgaggcaggagaatcgcttgaacctgggagacagaggttgcagtgagccaagatcgtgtcactgcactccagcctgggcaacagagtgagactctgtcaaaaaagaaaaaaaaaa

SEQ ID NO: 453 - DNA, 6122 bp, Homo sapiens
  source 1..6122: mol_type = other DNA
gggggtggagccaagatggccaaataggaagagctccagtctacagctcctagcctgagcgacacagaagacaggtgatttctgcatttccaaaggaggtaccgggttcatctcattggggagtgctggacagtgggtacagcgcactgtgcatgagacaaagcagggcgaggcatcacctcacccgggaagtgcaaggggtcagggaattccctttcctagtcaaagaaaggggtgacagagagcacctggaaaatcgggtcactcccaccgtaatactgcgctcttccagtgggctcaacaaacggcacaccaggagactatatcccgcacctggctcggagggtcctacgtccacggagcctcgctcattgctagcacagcagtctgagctcaaactgcaaggtggcagtgaggctgggggaggggcgcctgccattgctcaggcttgagtaggtaaacaaagcggctgggaagctcgaactgggtggagcctaccacagctcaaggaggccttcctgcctctctaggctccacctctgggggcagggcacagacaaacaaaaggcagcaataacctctgcagacttaaatgtccctgtctgacagctttgaagagagtagtggttttcccagcatgcagcttgagatctgagaacaggcagactgcctcctcaagtgggtccctgacccccgagtggcctaactgggaggcgccccccagtaggggtggactgacacctcacatggccgggtactcctctgagacaaaacttccagaggaacgatcaggcagcagcatttgcggttcaccaatatccgctgttctgcaaccaccactgctgatacccaggcaaacagggtctggagtggacctccagtaaactccaacagaccagcagctgagggtcctgactgttagaaggaaaactaacaaacagaaaggacatccacgccaaaaacccatctgtacatcaccatcatcaaagactaaaggtagataaaaccacaaagatggggaaaaaacagagcagaaaaaccggaaactcaaaaaatcagagcgcctctcctcctccaaaggagcgcagttcctcaccagcaatggaacaaagctggacagaaaatgactttgatgagttgggagaggaaggcttcagaagatcaaactactccgagctaaaggaggaagttcgaaccaatggcaaagaagttaaaaactatgaaaaaaaattagacgagtggctaactagaataaccaatgcagagaagtccttaaaggatctgatggagctgaaaaccatggcatgagaactatgtgacaaatgcacaagcctcagtgaccaatgcgatcaactggaagaaagggtatcagcgatggaagacgaaatgaatgaaatgaagcatcaagagaagtttagagaaaaaagaataaaaagaaatgaacaaagcctccaagaaatatgggactatgtgaaaagaccaaatctacatctcattggtgtacctgaaagtgatggggagaatggaaccaagttggaaaacactctgcaggatattatccaggagaacttccccaatctagcaaggcaggccaacattcaaattcaggaaatacagagaacaccacaaagatactcctcaagaagagcaactccaagacacataattgtcagattcaccaaagttaaaatgaaggaaaaaatgttaacgggagccagagaggaaggttgggttacccacaaagggaagcccatcagactaacagcagatctctcagcagaaactctacaagccagaagagagtgggtgccaatattcaacattcttaaagaaagaattttcaacccagaatttcatatccagccaaactaagcttcataagtgaaggagaaataaaatcctttacagacaagcaaatgctgagagattttgtcacaccaggcctgccctaaaagagctcctgaaggaagcattaaacatggaaaggaacaaccggtaccagccactacaaaaacatgccaaattgtaaagactgtcaaggctaggaagaaactgcatcaactaacgagcaaaataaccagctaacatcataatgacaggatcaaattcacacataacaatactaaccttaaatgtaaatgggctaaatgttccaattaaaaggcacagactggcaaattggataaagagtcaagacccatcagtgtgctgtattcaggaaacccatatcacgtgcagagacacacataggctcaaaataaagggatggaagaagatctaccaagcaaatggaaaacaaaaaaaggcatgggttgcaatcctagtctcggataaaacagactttaaaccaacaaagatcaaaagaggcaaagaaggtcattacataatggtaaagggatcaattcaacaagaagaactaactatcctaagtatatatgcacccaatacaggagcacccagattcatagagcaagtccttagtgaactacaaagagacttagactcccacacaataataatgggagactttaacaccccactgtcaacattggacagatcaacgagacagaaagttaacaaggatatccaggaattgaactcagctctgcaccaagcagacctaatagacatctacagaactctccaccccaaatcaacagaatatacattcttttcagtaccacaccacacctattccaaaattgaccacatagttggaagtaaagcactcctcagcaaatgtaaaagaacagaaattataacaaactgtctctcagaccacagtgcaatcaaactagaactcaggattaagaaactcactcacaaccgctcaactacatggaaactgaacaacctgctcctgaatgactactggctacataacgaaatgaaggcagaaataaagatgttctttgaaaccaacgagaacaaagacacaacataccagaatctctgggacacattcaaagcagtgtgtagagggaaatttatagcactaaacgcccacaagagaaagcaggaaagatctaaaattgacaccctaacatcacaattaaaagaactagagaagcaagagcaaacacatttgaaagctagcagaaggcaagaaataactaagatcagagtagaactgaaggaaatagagacacaaaaaacccttcaaaaaatcaatgaatccaggagctggtttttttgagtagatcagcaaaattgatagaccactagcaagactaataaagaagaaaagagagaagaatcaaatagacgcaataaaaaatgataaaggggatatcaccaccgatcccacagaaatacaaactaccatcagagaatactataaacacttctacacaaataaactagaaaatctagaagaaatggataaattcctcgacacatacactctcccaagactaaaccaggaagaagttgaatctctgaatagaccaataacaggctctgaaactgaagcaataattaatagcttaccaaccaaaaaaagtccaggaccagatggactcacagccgaattctaccagaggtacaaggaggagctggtaccattccttctgaaatttttccaatcaatagaaaaagagggaatcctccctaactcattttatgaggccagcatcatcctgatatcaaagcctggcagagacacaacaaaaaaagagaattttagaccaatatccttgatgagcattgatgcaaaaattctcaatgaaatactggcaaactgaatccagcaacacatcaaaaagcttatccaccatgatcaagtgggcttcatccctgagatgcaaggctggttcaacatacacaaatcaataaacgtaatccagcatataaacagaaccaaagacaaaaaccacgattatctgaatagatgcagaaaaggcctttgacaaaattcaacaaccttcatgctaaaaactctcaataaattaggtattgatgggacgtatctcaaaataataagagctatctatgacaaacccacagccagtatcatcctgaatgggcaaaaactggaagcattccctttgaaaactggcaaaagacaggggtgccctctctcaccactcctattcaacatagtgttggaagttctggccagggcaatcaggcaggagaaggaaataaaaggcattcaattaggaaaagaggaagtcaaattgtccctgtttgcagatgacatgattgtatatctagaaaaccccatcgtctcagcccaaaatctccttaagctgataagcaacttcagcaaagtctcaggatacaaaatcaatgtgcaaaaatcgcaggcattcttatacaccaataacagacaaacagagagccaaatcatgagtgaactcccattcacaattgcttcaaagagaataaaatacctaggaatccaacttacaggggatgtgaaggacctcttcaaggagaactacaaaccactgctcagtgaaataagaggacacaaacaaatggaagaacattccatgctcatcagtaggaataatcaatattgtgtaaatggccatactgcgcaaggtaatttatagattcaatgccatccccatcaagctaccaatgactttcttcacagaattggaaaaaactactttaaagttcatatggaaccaaaaaagagctcccattgccaagtcaatcctaagccaaaagaacaaagctggagacatcaggctacctgacttcaaactatactacaaggctgcagtaaccaaaacagcatggtactggtaccaaaacagagatatagaccaatagaacagaacagagccctcagaaataatgccgcatatctacaactatctgatctttgacaaacctgacaaaaacaaacaatggggaaaggattccctatttaataaatggtactgcgaaaactggctagccatatgtagaaagctgaaactggatcccttccttacaccttacacaaaaatcaattcatgatggattaaagacttacatgttagacctaaaaccataagaaccctagaagaaaacctaggcattcccattcaggacataggcatgggcagggacttcatgtctaaaacaccataagcaatggcaacaaaagccaaaattgacaaatgggatctaattaaactcaagagcttctgcacagcaaaagaaaccaccatcagagtgaacaggcaacctacagaatgggagaaaatttttgcaacctactcatctgacaaagggctaatatccagaatctacaatgaactcaaacaaatttacaagaaaaaaataaccccatcaaaaagtgggcgaaggatatgaacagacacttttcaaaagaagacatttatgcagccaaaagacacatgaaaaaatgctcatgatcactggccatcagagaaatgcaaatcaaaaccacaatgagataccatctcacaccagttagaatggcgatcattaaaaagtcaggaaacaacaggtgctggagaggatgtggagaaataggaacacttctacactgttggtgggactgtaaactagttcaaccattgtggaagtcggtgtggcgattcctcagggatctagaactagaaataccatttgacccagccatcccattactaggtatatacccaaaggattataaatcatgctgctataaagacccatgcacatgtatgtttattgtggcactattcactatagcaaagacttggaaccaacccaaatgtccaacaatgatagactggattaagaaaatgtggcacatatacaccatggaatactatgcagccataaaaaatgatgagttcatgtcctttttagggacatggatgaagctggaaaccatcattcttggcaaactatcgcaaggacaaaaaaaccaaacaccgcatattctcactcataagtgggaattgaacaacgagaacacatggacacaggaaggggaacatgacacaccggggactgttgtggggttgggggaggggggagggatagcatgaggagatatacctaatgctaaatgacgagttaatgggtgcagcacaccagcatggcacatgtatacctatgtaacaaacctgcatgttttgcacacataccctacaacttaaagtataataata

SEQ ID NO: 454 - DNA, 6025 bp, Homo sapiens
  source 1..6025: mol_type = other DNA
agccaagatggccgaataggaacagctccggtctacagctcccagcgtgagcgacgcagaagacgggtgatttctgcatttccatctgaagtaccgggttcatctcactagggagtgccagacagtgggcgcaggccagtgtgtgtgcgcaccgtgcgcgagccgaagcagggcgaggcattgcctcacctgggaagcgcaaggggtcagggagttccctttccgagtcaaagaaaggggtgacggacgcacctggaaaatcgggtcactcccatccgaatattgcgcttttcagaccggcttaagaaacggtgcaccacgagactatatcccacacctggctcagagggtcctacgcccacggaatctcgctgattgctagcacagcagtctgagatcaaactgcaaggcggcaacgaggctgggggaggggcgcccgccattgcccaggcttgcttaggtaaacaaagcagccgggaagctcgaactgggtggagcccaccacagctcaaggaggcctgcctgcctctgtaggctccacctctgggggcagggcacagacaaacaaaaagacagcagtaacctctgcagacttaagtgtccctgtctgacagctttgaagagagcagtggttctcccagcatgcagctggagatctgagaacgggcagactgcctcctcaagtgggtccctgacccctgacccccgagcagcctaactgggaggcaccccccagcaggggcacactgacacctcacacgacagggtattccaacagacctgcagctgagggtcctgtctgttagaaggaaaactaacaaccagaaaggacatctacaccgaaaacccatctgtacatcaccatcatcaaagaccaaaagtagataaaaccacaaagatggggaaaaaacagaacagaaaaactggaaaccctaaaacgcagagcgcctctcctcctccaaaggaacgcagttcctcaccagcaacagaacaaagctggatggagaatgattttgacgagctgagagaagaaggcttcagacgatcaaattactctgagctacgggaggacattcaaaccaaaggcaaagaagttgaaaactttgaaaaaaatttagaagaatgtataactagaataaccaatacagagaagtgcttaaaggagctgatggagctgaaaaccagggctcgagaactacgtgaagaatgcagaagcctcaggagccgatgcgatcaactggaagaaagggtatcagcaatggaagatgaaatgaatgaaatgaagcgagaagggaagtttagagaaaaaagaataaaaagaaatgagcaaagcctccaagaaatatgggactatgtgaaaagaccaaatctacgtctgattggtgtacctgaaagtgatgtggagaatggaaccaagttggaaaacactctgcaggatattatccaggagaacttccccaatctagcaaggcaggccaacgttcagatccaggaaatacagagaacgccacaaagatactcctcgagaagagcaactccaagacacataattgtcagattcaccaaagttgaaatgaaggaaaaaatgttaagggcagccagagggaaaggtcgggttaccctcaaaggaaagcccatcagactaacagcggatctctcggcagaaaccctacaagccagaagagagtgggggccaatattcaacattcttaaagaaaagaattttcaacccagaatttcatatccagccaaactaagcttcataagtgaaggagaaataaaatactttatagacaagcaaatgctgagagattttgtcaccaccaggcctgccctaaaagagctcctgaaggaagcgctaaacatggaaaggaacaaccggtaccagccgctgcaaaatcatgccaaaatgtaaagaccatcgagactaggaagaaactgcatcaactaatgagcaaaatcaccagctaacatcataatgacaggatcaaattcacacataacaatattaactttaaatataaatggactaaattctgcaattaaaagacacagactggcaagttggataaagagtcaagacccatcagtgtgctgtattcaggaaacccatctcacgtgcagagacacacataggctcaaaataaaaggatggaggaagatctaccaagccaatggaaaacaaaaaaaggcaggggttgcaatcctagtctctgataaaacagactttaaaccaacaaagatcaaaagagagaaagaaggccattacataatggtaaagggatcaattcaacaagaggagctaactatcctaaatatttatgcacccaatacaggagcacccagattcataaagcaagtcctcagtgacctacaaagagacttagactcccacacattaataatgggagactttaacaccccactgtctacattagacagatcaacgagacagaaagtcaacaaggatacccaggaattgaactcagctctgcaccaagcagacctaatagacatctacagaactctccaccccaaatcaacagaatatacatttttttcagcaccacaccacacctattccaaaattgaccacatagttggaagtaaagctctcctcagcaaatgtaaaagaacagaaattataacaaactatctctcagaccacagtgcaatcaaactagaactcaggattaagaatctcactcaaagccgctcaactacatggaaactgaacaacctgctcctgaatgactactgggtacataacgaaatgaaggcagaaataaagatgttctttgaaaccaacgagaacaaagacaccacataccagaatctctgggacgcattcaaagcagtgtgtagagggaaatttatagcactaaatgcctacaagagaaagcaggaaagatccaaaattgacaccctaacatcacaattaaaagaactagaaaagcaagagcaaacacattcaaaagctagcagaaggcaagaaataactaaaatcagagcagaactgaaggaaatagagacacaaaaaacccttcaaaaaaatcaatgaatccaggagctggttttttgaaaggatcaacaaaattgatagaccgctagcaagactaataaagaaaaaaagagagaagaatctaatagacacaataaaaaatgataaaggggatatcaccaccgatcccacagaaatacaaactaccatcagagaatactacaaacacctctacgcaaataaactagaaaatctagaagaaatggatacattcctcgacacatacactctcccaagactaaaccaggaagaagttgaatctctgaatagaccaataacaggctctgaaattgtggcaataatcaatagtttaccaaccaaaaagagtccaggaccagatggattcacagccgaattctaccagaggtacaaggaggagctggtaccattccttctgaaactattccaatcaatagaaaaagagggaatcctccctaactcattttatgaggccagcatcattctgataccaaagccgggcagagacacaaccaaaaaagagaattttagaccaatatccttgatgaacattgatgcaaaaatcctcaataaaatactggcaaaccgaatccagcagcacatcaaaaaccttatccaccatgatcaagtgggcttcatccctgggatgcaaggctggttcgatatacgcaaatcaataaatgtaatccagcatataaacagagccaaagacaaaaaccacatgattatctcaatagatgcagaaaaagcctttgacaaaattcaacaacccttcatgctaaaaactctcaataaattaggtatggatgggacgtatttcaaaataataagagctatctatgacaaacccacagccaatatcatactgaatgggcaaaaactggaagcattccctttgaaaactggcacaagacagggatgccctctctcaccgctcctattcaacatagtgttggaagttctggccagggcaatcaggcaggagaaggaaataaagggtattcaattaggaaaagaggaagtcaaattgtccctgtttgcagacgacatgattgtttatctagaaaaccccatcgtctcagcccaaaatctccttaagctgataagcaacttcagcaaagtctcaggatacaaaatcaatgtacaaaaatcacaagcattcttatacaccaacaacagacaaacagagagccaaatcatgggtgaactcccattcacaattgcttcaaagagaataaaatacctaggaatccaacttacaagggatgtgaaggacctcttcaaggagaactacaaaccactgctcaaggaaataaaagaggacacaaacaaatggaagaacattccatgctcatgggtaggaagaatcaatatcgtgaaaatggccatactgcccaaggtaatttacagattcagtgccatccccatcaagctaccaatgactttcttcacagaattggaaaaaactactttaaagttcatatggaaccaaaaaagagtccgcattgccaagtcaatcctaagccaaaagaacaaagctggaggcatcacactacctgacttcaaactatactacaaggctacagtaaccaaaacagcatggtactggtaccaaaacagagatatagatccatggaacagaacagagccctcagaaataatgccgcatatctacaactaactgatctttgacaaacctgagaaaaacaagcaatggggaaaggattccctatttaataaatggtgctgggaaaactggctagccatatgtagaaagctgaaactggatcccttccttacaccttatacaaaaatcaattcaagatggattaaagatttaaatgttaaacctaaaaccataaaaaccctagaagaaaacctagtcattaccattcaggacataggcgtgggcaaggacttcatgtccaaaacaccaaaagcaatggcaacaaaagacaaaattgacaaatgggatctaattaaactcaagagcttctgcacagcaaaagaaactaccatcagagtgaacaggcaacctacaacatgggagaaaattttcgcaacctactcatctgacaaagggctaatatccagaatctacaatgaactcaaacaaatttacaagaaaaaaacaaacaaccccatcaaaaagtgggcgaaggacatgaacagacacttctcaaaagaagacatttatgcagccaaaaaacacatgaagaaatgctcatcatcactggccatcagagaaatgcaaatcaaaaccactatgagatatcatctcacaccagttagaatggcaatcattaaaaagtcaggaaacaacaggtgctggagaggatgcggagaaataggaacacttttacactgttggtgggactgtaacctagttcaaccattttggaagtcagtgtggcgattcctcagggatctagaactagaaataccatttgacccagccatcccattactgggtatatacccaaatgagtataaatcatgctgctataaagacacatgcacacgtatgtttattgcggcactattcacaatagcaaagacttggaaccaacccaaatgtccaacaatgatagactggattaagaaaatgtggcacatatacaccatggaatactatgcagccataaaaaatgttgagttcatatcctttgtagggacatggatgaaattggaaaccatcattctcagtaaactatctcaagaacaaaaaaccaaacaccgcatattctcactcataggtgggaattgaacaatgagatcacatggacacatgaaggggaatatcacactctggggactgcggtggggtagggggaggggggagggatagcattggaagatatacctaaggctagatgacaagttagtgggtgcagcgcaccagcatggcacatgtatacatatgtaactaacctgcacaatgtgcacatgtaccctaaaacttaaagtataataaaaaaaaataaa

SEQ ID NO: 455 - DNA, 6486 bp, Homo sapiens
  source 1..6486: mol_type = other DNA
ccaagatggctattagtagctagtgtgcacctctctcacagagagaagaaagtggtgattaactactgtatcttcaactggaacatctagatggaaacattagggttcatcaaggaaacaacttgacccatggagaatggagcaaagtgagacaggacaactgcccacccaggagtggcatggagccagagtaggctcccacactgccaggaaattgtgagtgagtgagagtccccagggacccacagttctgccatggacctttgcaaccctgggctcaggtgatccatgcataagcctaccccaccagagcttccagactgacaatgagagctgtgtggagtctgggcagagctgctgcccaggcacacatggaatcctgggagccatgaattcctaggtatcccagcattagtgactggagctccagcagtaggagaggtcgggctcccttcattcccccaggaaagtggctgaatccagagggctgagcagcagtggactccaggcttcacctccactgcatttcacaggatgaggcccagtggtctgggtctccagccaccccctgtctgtgctcttgggctggtagcagctctgcacttccctgggatggagctcccagaaagagaggctggttacctttgtcgtctgtcagcccctgccaatatagccttcaggctctgcagagtacttaatgtttagggagtggtacagatctcctgtacagcacagccatcccatggaaaagtggccagagtgttctacacatgagtcctggaccttacttgtttcttactaggcagggcctctcagcctggaattccagcacagctaacttgcttcaacctgaacatttcagttgcaggtggttcagcattactctgaggaggaaatcccagagacagcccacaacccctctggaattgcagctgcagtggtatcaccctaaccactcttggtgtgaaagcaacaaagggccagtcactacatgggcatctccagcacactacagccactatatggaaaggagtgatctgtcttccctgggagctcccaccccttactctttaccaggcagggccccggctttgcaccacataatagccacccatccacagctaagcatacccacggaatgtctctgagtttccctggggtggggctccctgagacaactggcagaccctctgccactgccacagcaatggttctgcccctgctacccttggtctggggaagaaaccaagagcctgagggcttcacctgagcttccaatacaccacagtcaccatatggagagaagcctggtcgctcatccctgtgagcactcgaacccccactcctcaacaagcagagccagtagaacaactgtctcacctcctggctgaattttcccagtagcagtggctctacatttttctgaggtagagctcctgaagtcaaccaaaaggccctctgctactgccactgcagtggtagtgaccttgctgtccttgaattggagaagcagcgaagaccctgagtgctttaaccacacctccagcaagctgctcttgcactagggagaagaggccagtctgtctccctgttacctgtccctgacaccctctcatcaccaggcgggccttcctagcttgagcccaaagcacaggtgccccatccagggccaattgcactgattaataatgggtccacatctctctgggttggaaccccaagaggcaagtgaaaggctctctgccataaccactgctaagatcccttccccttctgcccaagagtcccaagccaagatttgcagtcagcactcaagtgggagaggaacccatactttcaaagcactgagaagaagcatggctgcaatcatgaggaaataaagaggagccacactgttgattaagtggctgcctacaggccactatgtgtaagtgccacctactggatcacagcccaaaattcaataccaaaaatactttactaatatttgaaaccaagaaaaagaattcaactacaaataagaccttgcacaaagcctcagccctctgaaaacacccagaaaagaagtgtactaactgtactgaaactacacgtcagttatcagaacacaagccaacacagatgaaaaagaaccagtgcgagaactctggcaactcaaaaagccagtgtctccaaatgacctcactagttccccagcaggtattcttaaccagactgaaatggctgaaatgacagaaatagaattcagaatatggataggaatgaagatcattgaggttgaaaacaatgtcaaagtccagtgcaagaaagctaaggatcattaaaaaaatacagaggctgatagataaaaatggccattataaggaataaccaaacagatttgatagagctgaaaaacatactgcaagaattttataatgcaatcacaagtgttaacaggagaataggccaatctgaggaaaaaatgtcaaagcttagagactgtcttgttgaaataattgtcagacaaaaatgaagaagaaagaatataaaagaatgaacaaaacctccaagaaatatgggattatgtaaagaaaccaaatctatgactcactgttgtccctgaaagagatggagagaaagcaagcaacttggaaaacatattttagaatatcacctgtgaaagcttccccaacctcactaaagatgtcaacattcaaattcaggaaatgcagagaacttcagcaagatactaaataaggggaccatccccgagacacataatcatcagattcttcaacattgaaatgaaagaaaaaatgttaaaggcagctagagagaagggacgttcatctagaaaggaaatcccatcaggtcaacagtggacctttcagcagaaaccctacaagccagaggagaataagggcctatattaagcattcttaaggaaaataattttcaactcagaattttatatccagacaaactaaacttcataaatgagaaataaaatccctttcagacaagcaaatgagggaattcattaccaccagacttgctgctttacaataggtcctgaaaggagtgctaaatatggaaaagaaagaccattaccagccactacaaaaacatgcttaagcatatagacaagtgacactataaagcaacaacacaagcaagtctgcataataaccagctaacgatatgatgacaggatcaaattggcatatatcaatattagccttgaatatgaatgggctaaattcccccagttaaaaggcacagagtggcaagctggataaagaagcaagacctaatggtatgctgtcttcaggagacccatctcacatgcagcaacattcataggcccaaaacaaagggatggagaaaaacctaccaagcaaatggaaaactaccaagcaaatggaaaagcaggggttgacgtcctaatttcagacaaaagagactttaagcccaacaaagataaaaaaaaaaaaaaaagacaaagaagggcattacataatgcaaaagttttaattcaactggaagacttaagtatcctaaatatatatgcacctaacacaggagtgcctggattcataaagcaatttctcagagacctagattcccacacaattagagtacaggacttcaacaccccactgacagtattagacagatcattgaggcaaacaattaacagatattcaggacctgaactcaacacttaaccaaatgggcctaataaaaccctgcagtactctctgttcaaaaacattcttctcatcaccacatggcacaactctaaagttgtaatccttggcaaattcaaaacaattgatatcataccaaccacactttcagatcacagtacaataaaatagaaaccaataccaagaaaattgctcaaaaccgtaaaattacatggaaatgaaacaacctactcttgaatgatttttggataaatagggaaactatggcagaaatcaagaaattctttgaccaaatgaaaacaaagacagaacatacaagaatctctgggacacagctaaggcagtgttaagagggaagtttatagcactaaatgcccacgtcgaaaggcttgaaagatctaaaattaacaacctaacatcacaccttgagaaactagagacacaagagcaaaccaatctcaaagctagcagaagacaagaaataaccaaaattagagctgaactgaaggaatttgagatgtgaaaacaccatacaaaagatcaataaatccaggagtttgttttttgaaagaataagtaagatagatagactgctatgtagactaataaagaagaaaatatagaaaatccaaataaacacaatcagaaatgacaaaggggacattaccaccaaccccacagaaatacaaataaccatcagaactactatgagcacctctatgcacacaaaccagaaaacctaaaagaaatggataaattcctggacacatacaacctcccaagagtgaaccaggaatccctgaacagactaatagtgaattccaaaattgaatcagtaataaaaagcctacctaccaaaaaaagcccaggaccagacagattcacagttgaattcaactagttgtataaagaagagctagtaccactcctagtgaaactaattctaaaagttgaggagcaggtatcatcctgataccaaaacctggcagagacacaataaaaagctgaacatcttgatgaaaatagatgcaaaaatcctcaacaaaatagtagcaaactgaactcagcagcacatcaaaaatctaatccaccataaccaagtaggcttcatccctgggatgcaagcttggctcaacatatgcaaatcaataagactcaacacataaacagaacttaaaaacaaaaaccacatgattatctcaatagatgcaaaaaagctttcaataaaatttaacatccctttatgtaaaaaccctcaagaaactaggcactgaaggagcatacttcaaaataataagagccatctgtgacaaacccacagcctacatcatactgaataggcaaaagctggaagtggtccccttgataaccagaatgagaccagtacaccctctctcaccactcttattcagcatagtactggtagtcctggcccaaggagtcaggcaagagaaagaaataaaaggcatccaaataggagaagaggaagtcaaactatccctgcttgcagatgacatgattcaatatctagcaaactctatagtctctgcctaaaagcttcttgatctgataaacaacttcagcaaagttttgggatacaaaatcaatgtacagaaatttgtagcattcctatatacaaacaacatctaagtggagagccaaatcaggaacacaatcccgtttacaattgccagaaaaagaataaaatacctaggaatgtagctaactagggaggtgtaaaatctctgcaaggacaattacaaaacgctactccaagaaatcagagatgacatacacaaatggaaaaacattccatgctcatggatagggagaatcaatattataaaaatgaccatattgcccaaagtaatttacagattcaatgctattcctatcaaactatcaatgacattctttacagaattagaaagaaactattctaaaatttatgtagagccaaaaaagaatccaaataccccaaacaattataagcaaaaagaacaaagctggaggtatcatgttacctgacttcaaagtatactacaaggctgtagtaatgaaaacactgatacgaaaacagacacatagaccaatgaaacggaatcgaggcccagaagtaaaactgcacacctaaaactatctgatcttccacaaaactaacaaaaacaaacaatggggaaaggacttgctattcaataaatagtggtgggataactggctagcaatattcagaagattgaaactggacccctttcttacaccgtatataaaatcaactgaagatgtattaaagacttaaacgtaaaacctaaaactataaaaactctagaagaaaacctaggaaataccattctggacataggacctggcaaagatttcatgacaatgatgccaaaagcaattgcaacaaaaataataattgataaattggatctaattaaactaaacagcttttgcacagcacgagaaactataatatcaataaagatacaacctaaagaatgggagaaaatatttgcaaactatgtatctgacaaaggtgcaatatgcaaaatcgatacagaacatgatcaaatttacaagcaaaaaccaaacaatactattaaaaagtgggcaaaggacatacatgtcaaaagacatacatgtggtcaacaagaataagaaatgctcaacatcagtaatttttagggaaatgcaaatcaaaaccacaatgagataccatctcataccagtcagactggccattattaaaactcaaaaagtaacagatgatggtgaggttgaggagaaaggg

SEQ ID NO: 456 - DNA, 6034 bp, Homo sapiens
  source 1..6034: mol_type = other DNA
ggggaggagccaagatggccgaataggaacagctccggtctacagctcccagcgtgagcgacgcagaagacggtgatttctgcatttccatctgaggtaccgggttcatctcactagggagtgccagacagtgggcgcaggccagtgtgtgtgcgcaccgtgcgcgagccgaagcagggcgaggcattgcctcacctgggaagcgcaaggggtcagggagttccctttctgagtcaaagaaaggggtgacggtcgcacctggaaaatcgggtcactcccacccgaatattgcgcttttcagaccggcttaagaaacggcgcaccacgagactatatcccacacctggctcggagggtcctacgcccacggaatctcgctgattgctagcacagcagtctgagatcaaactgcaaggcggcaacgaggctgggggaggggcgcccgccattgcccaggcttgcttaggtaaacaaagcagccgggaagctcgaactgggtggagcccaccacagctcaaggaggcctgcctgcctctgtaggctccacctctgggggcagggcacagacaaacaaaaagacagcagtaacctctgcagacttaagtgtccctgtctgacagctttgaagagagcagtggttctcccagcacgcagctggagatctgagaacgggcagacagactgcctcctcaagtgggtccctgactcctgacccccgagcagcctaactgggaggcaccccccagcaggggcacactgacacctcacatggcagggtattccaacagacctgcagctgagggtcctgtctgttagaaggaaaactaacaaccagaaaggacatctacaccgaaaacccatctgtacatcaccatcatcaaagaccaaaagtagataaaaccacaaagatggggaaaaaacagaacagaaaaactggaaactctaaaacgcagagcgcctctcctcctccaaaggaacgcagttcctcaccagcaacagaacaaagctggatggagaatgattttgacgagctgagagaagaaggcttcagacgatcaaattactctgagctacgggaggacattcaaaccaaaggcaaagaagttgaaaactttgaaaaaaatttagaagaatgtataactagaataaccaatacagagaagtgcttaaaggagctgatggagctgaaaaccaaggctcgagaactacgtgaagaatgcagaagcctcaggagccgatgcgatcaactggaagaaagggtatcagcaatggaagatgaaatgaatgaaatgaagcgagaagggaagtttagagaaaaaagaataaaaagaaatgagcaaagcctccaagaaatatgggactatgtgaaaagaccaaatctacgtctgactggtgtacctgaaagtgatgtggagaatggaaccaagttggaaaacactctgcaggatattatccaggagaacttccccaatctagcaaggcaggccaacgttcagattcaggaaatacagagaacgccacaaagatactcctcgagaagagcaactccaagacacataattgtcagattcaccaaagttgaaatgaaggaaaaaatgttaagggcagccagagagaaaggtcgggttaccctcaaaggaaagcccatcagactaacagtggatctctcggcagaaaccctacaagccagaagagagtgggggccaatattcaacattcttaaagaaaagaattttcaacccagaatttcatatccagccaaactaagcttcataagtgaaggagaaataaaatactttatagacaagcaaatgttgagagattttgtcaccaccaggcctgccctaaaagagctcctgaaggaagcgctaaacatggaaaggaacaaccggtaccagccgctgcaaaatcatgccaaaatgtaaagaccatcgagactaggaagaaactgcatcaactaatgagcaaaatcaccagctaacatcataatgacaggatcaaattcacacataacaatattaactttaaatataaatggactaaattctgcaattaaaagacacagactggcaagttggataaagagtcaagacccatcagtgtgctgtattcaggaaacccatctcacgtgcagagacacacataggctcaaaataaaaggatggaggaagatctaccaagccaatggaaaacaaaaaaaggcaggggttgcaatcctagtctctgataaaacagactttaaaccaacaaagatcaaaagagacaaagaaggccattacataatggtaaagggatcaattcaacaagaggagctaactatcctaaatatttatgcacccaatacaggagcacccagattcataaagcaagtcctcagtgacctacaaagagacttagactcccacacattaataatgggagactttaacaccccactgtcaacattagacagatcaacgagacagaaagtcaacaaggatacccaggaattgaactcagctctgcaccaagcagacctaatagacatctacagaactctccaccccaaatcaacagaatatacctttttttcagcaccacaccacacctattccaaaattgaccacatagttggaagtaaagctctcctcagcaaatgtaaaagaacagaaattataacaaactatctctcagaccacagtgcaatcaaactagaactcaggattaagaatctcactcaaagccgctcaactacatggaaactgaacaacctgctcctgaatgactactgggtacataacgaaatgaaggcagaaataaagatgttctttgaaaccaacgagaacaaagacaccacataccagaatctctgggacgcattcaaagcagtgtgtagagggaaatttatagcactaaatgcctacaagagaaagcaggaaagatccaaaattgacaccctaacatcacaattaaaagaactagaaaagcaagagcaaacacattcaaaagctagcagaaggcaagaaataactaaaatcagagcagaactgaaggaaatagagacacaaaaaacccttcaaaaaatcaatgaatccaggagctggttttttgaaaggatcaacaaaattgatagaccgctagcaagactaataaagaaaaaaagagagaagaatcaaatagacacaataaaaaatgataaaggggatatcaccaccgatcccacagaaatacaaactaccatcagagaatactacaaacacctctacgcaaataaactagaaaatctagaagaaatggatacattcctcgacacatacactctcccaggactaaaccaggaagaagttgaatctctgaatagaccaataacaggctctgaaattgtggcaataatcaatagtttaccaaccaaaaagagtccaggaccagatggattcacagccgaattctaccagaggtacatggaggaactggtaccattccttctgaaactattccaatcaatagaaaaagagggaatcctccctaactcattttatgaggccagcatcattctgataccaaagccgggcagagacacaaccaaaaaagagaattttagaccaatatccttgatgaacattgatgcaaaaatcctcaataaaatactggcaaaccgaatccagcagcacatcaaaaagcttatccaccatgatcaagtgggcttcatccctgggatgcaaggctggttcaatatacgcaaatcaataaatgtaatccagcatataaacagagccaaagacaaaaaccacatgattatctcaatagatgcagaaaaagcctttgacaaaattcaacaacccttcatgctaaaaactctcaataaattaggtattgatgggacgtatttcaaaataataagagctatctatgacaaacccacagccaatatcatactgaatgggcaaaaactggaagcattccctttgaaaaccggcacaagacagggatgccctctctcaccgctcctattcaacatagtgttggaagttctggccagggcaatcaggcaggagaaggaaataaagggtattcaattaggaaaagaggaagtcaaattgtccctgtttgcagacgacatgattgtatatctagaaaaccccatcgtctcagcccaaaatctccttaagctgataagcaacttcagcaaagtctcaggatacaaaatcaatgtacaaaaatcacaagcattcttatacaccaacaacagacaaacagagagccaaatcatgggtgaactcccattcgtaattgcttcaaagagaataaaatacctaggaatccaacttacaagggatgtgaaggacctcttcaaggagaactacaaaccactgctcaaggaaataaaagaggacacaaacaaatggaagaacattccatgctcatgggtaggaagaatcaatatcgtgaaaatggccatactgcccaaggtaatttacagattcaatgccatccccatcaagctaccaatgactttcttcacagaattggaaaaaactactttaaagttcatatggaaccaaaaaagagcccgcattgccaagtcaatcctaagccaaaagaacaaagctggaggcatcacactacctgacttcaaactatactacaaggctacagtaaccaaaacagcatggtactggtaccaaaacagagatatagatcaatggaacagaacagagccctcagaaataatgccgcatatctacaactatctgatctttgacaaacctgagaaaaacaagcaatggggaaaggattccctatttaataaatggtgctgggaaaactggctagccatatgtagaaagctgaaactggatcccttccttacaccttatacaaaaatcaattcaagatggattaaagatttaaacgttaaacctaaaaccataaaaaccctagaagaaaacctaggcattaccattcaggacataggcgtgggcaaggacttcatgtccaaaacaccaaaagcaatggcaacaaaagacaaaattgacaaatgggatctaattaaactaaagagcttctgcacagcaaaagaaactaccatcagagtgaacaggcaacctacaacatgggagaaaattttcgcaacctactcatctgacaaagggctaatatccagaatctacaatgaactcaaacaaatttacaagaaaaaaacaaacaaccccatcaaaaagtgggcaaaggacatgaacagacacttctcaaaagaagacatttatgcagccaaaaaacacatgaagaaatgctcatcatcactggccatcagagaaatgcaaatcaaaaccactatgagatatcatctcacaccagttagaatggcaatcattaaaaagtcaggaaacaacaggtgctggagaggatgcggagaaataggaacacttttacactgttggtgggactgtaaactagttcaaccattgtggaagtcagtgtggagattcctcagggatctagaactagaaataccatttgacccagccatcccattactgggtatatacccaaatgagtataaatcatgctgctataaagacacatgcacacgtatgtttattgcggcactattcacaatagcaaagacttggaaccaacccaaatgtccaacaatgatagactggattaagaaaatgtggcacatatacaccatggaatactatgcagccataaaaaatgatgagttcatatcctttgtagggacatggatgaaattggaaaccatcattctcagtaaactatcgcaagaacaaaaaaccaaacaccgcatattctcactcataggtgggaattgaacaatgagatcacatggacacaggaaggggaatatcacactctggggactgtggtggggtcgggggaggggggagggatagcattgggagatatacctaatgctagatgacacattagtgggtgcagcgcaccagcatggcacatgtatacatatgtaactaacctgcacaatgtgcacatgtaccctaaaacttagagtataataaaaaaaaaaaaa

SEQ ID NO: 457 - DNA, 3062 bp, Homo sapiens
  source 1..3062: mol_type = other DNA
gagcaaacacttgcaaaagctagcagaaggcaagaaataaccaaaatcagagcagaactgaaggaaatagagacacaaaaaactcttcaaaaaattaatgaatccaggagcttgttttttgaaaggatcaacaaaattgatagactgctaacaagactaataaagaaaaaaagagagaagaatcaaatagatgcaataaaaaatgataaaggggatatcaccaccgatcccacagaaatacaaactaccatcagagaatactacaaacacctctacgcaaataaactagaaaatccagaaatggataaattcctcgacacatacactctcccaagactaaaccaggaagaagttgaatctctgaatagaccaataacaggatctgaaattgtggcaataatcaatagcttaccaaccaaaaagagtccaggaccagatggattcacagccaaattctaccagaggtacaaggaggaactggtaccattccttctgaaactattccaatcaatagaaaaagagggaatcctccctaactcattttatgaggccagcatcatcctgataccaaagcctggcagagacacaaccaaataagagaattttagaccaatatccttgataaacattgatgcaaaaatcctcaataaaatactggcaaaccaaatccagcagcacatcaaaaagcttatccaccatgatcgagtgggcttcatccctgggatgcaaggctggttcaatatacgcaaatcaataaatgtaatccagcatacaaatgggaccaaagacaaaaaccacatgattatctcaatagattcagaaaaagcatttgacaaaattcaacaacacttcatgctaaaaactctcaataaattaggtatacatgggacgtatctcaaaataataagagctatctatgacaaacccatagccaatatcatactgaatgggcaaaaactggaagcattccctttgaaaactggcacaagacagggatgccctctctcaccactcctattcaacatagtgttggaagttctggccagggcaattaggcaggagaaggaaataaagggtattcaattaggaaaagaggaagtcaaattgtccctgtttgcagatgacatgattgtatatcgagaaaaccccattgtctctgcccaaaatctccttaagttgataagcaacttcagcaaactctcaggatacaaaatcaatgtgcaaaaatcacaagcattcttatacaccaataacagacaaacagagagccaaatcatgagtgaactcccattcacaattgcttcaaagataataaaatacctaggaatccaacttacaagggaagtgaaggacctcttcagggagaactacaaaccactgctcaatgaaataaaagaggatacaaacaaatggaagaacattccatgctcatgggtaggaagaatcaatatcatgaaaatggccatactgcccaaggtaatttatagattcagtgccatccccatcaagctaccaatgactttcttcacagaattgtaaaaaactactttaaagttcatatggaaccaaaaaagagccctcatcgccaagtcaatcctaagccaaaagaacaaagctggaggcatcatgctacctgacttcaaactatactacaaggctacagtaaccaaaacagcatggtactggtaccaaaacagaaatatagatcaatggaacataacagagccctcagaaataataccgcatatctacaactatctgatctttgacaaacctgagaaaaacaagcaatggggaaaggattccctatttaataaatggtgctgggaaaactggctagccatatgtagaaagctgaaactggatcccttccttataccttatacaaaaatcaattcaagatggattaaagacttaaacggtagacctaaaaccataaaaactgtagaagaaaacctaggcattaccattcaggacataggcacgggcaaggacttcatgtctaaaacaccaaaagcaatggcaacaaaagccaaaattgacaaatgggatctaattaaactaaagagcttctgcacagcaaaagaaactaccatcagagcgaacaggcaacctacaaaatgggagaaaattttcgcaacctactcatctgacaaagggctaatatccagaatctacaatcaactcaaacaaatttacaagaaaaaaacaaacaaccccatcaaaaagtgggcgaaggacatgaacagacacttctcaaaagaagacatttatgcagccaaaaaacacatgaaaaaatgctcactatcactggccatcagagaaatgcaaatcaaaaccacaatgcgatatcatctcacaccagttagaatggcaatcattaaaaagtcaggaaacaacaggtgctggagaggatatggagaaatagtaacacttttacactgttggtgggactgtaaactagttcaaccattgtggaagtcagtgtggcgattcctcagggatctagaactagaaataccatttgacccagccatcccattcctgggtatatacccaaaggactataaatcatgctgctataaagacacatgcacacgtatgtttattgcggcactattcacaatagcaaagacttggaaccaacccaaatgtccaacaatgatagactggattaagaaaatgtggcacatatacatcatggaatgctatgcagccataaaaaatgatgagttcatgtcctttgtagggatatggatgaagttggaaatcatcattctcagtaaactatcgcaagaacaaaaaaccaaacactgcatattctcactcataggtgggaattgaacaatgagaacacatggacacaggaaggggaacatcacactctggggactgttgtggggtggcgggaggggggagggatagcattgggagatatacctaatgctagatgacgagttagtgggtgcagtgcaccagcatgtcacatgtatacatatgtaactaacctgcacattgtgcacatgtaccctaaaacttaaagtataataataaaaaaaaaa

SEQ ID NO: 458 - DNA, 6044 bp, Homo sapiens
  source 1..6044: mol_type = other DNA
atggccgaataggaacagctccggtctacagctcccagcgtgagcgacgcagaagacggtgatttctgcatttccatctgaggtaccgggttcatctcactagggagtgccagacagtgggcgcaggccagtgtgtgtgcgcaccgtgcgcgagccgaagcagggcgaggcattgcctcacctgggaagcgcaaggggtcagggagttccctttccgagtcaaagaaaggggtgacggtcgcacctggaaaatcgggtcactcccacccgaatattgcgcttttcagaccggcttaagaaacggcgcaccacgagactatatcccacacctggctcggagggtcctacgcccacggaatctcgctgattgctagcacagcagtctgagatcaaactgcaaggcggcaacgaggctgggggaggggcgcccgccattgcccaggcttgcttaggtaaacaaagcagccgggaagctcgaactgggtggagcccaccacagctcaaggaggcctgcctgcctctgaaggctccacctctgggggcagggcacagacaaacaaaaagacagcagtaacctctgcagacttaagtgtccctgtctgacagctttgaagagagcagtggttctcccagcacgcagctggagatctgagaacgggcagacagactgcctcctcaagtgggtccctgactcctgacccccgagcagcctaactgggaggcaccccccagcaggggcacactgacacctcacacggcagggtattccaacagacctgcagctgagggtcctgtctgttagaaggaaaactaacaaccagaaaggacatctacaccgaaaacccatctgtacatcaccatcatcaaagaccaaaagtagataaaaccacaaagatggggaaaaaacagaacagaaaaactggaaactctaaaacgcagagcgcctctcctcctccaaaggaacgcagttcctcaccagcaacagaacaaagctggatggagaatgattttgacgagctgagagaagaaggcttcagacgatcaaattactctgagctacgggaggacattcaaaacaaaggcaaagaagttgaaaactttgaaaaaaatttagaagaatgtataactagaataaccaatacagagaagtgcttaaaggagctgatggagctgaaaaccaaggctcgagaactacgtgaagaatgcagaagcctcaggagccgatgcgatcaactggaagaaagggtatcagcaatggaagatgaaatgaatgaaatgaagcgagaagggaagtttagagaaaaaagaataaaaagaaatgagcaaagcctccaagaaatatgggactatgtgaaaagaccaaatctacgtctgactggtgtacctgaaagtgatgtggagaatggaaccaagttggaaaacactctgcaggatattatccaggagaacttccccaatctagcaaggcaggccaacgttcagattcaggaaatacagagaacgccacaaagatactcctcgagaagagcaactccaagacacataattgtcagattcaccaaagttgaaatgaaggaaaaaatgttaagggcagccagagagaaaggtcgggttaccctcaaaggaaagcccatcagactaacagcggatctctcggcagaaaccctacaagccagaagagagtgggggccaatattcaacattcttaaagaaaagaattttcaacccagaatttcatatccagccaaactaagcttcataagtgaaggagaaataaaatactttatagacaagcaaatgttgagagattttgtcaccaccaggcctgccctaaaagagctcctgaaggaagcgctaaacatggaaaggaacaaccggtaccagccgctgcaaaatcatgccaaaatgtaaagaccatcgagactaggaagaaactgcatcaactaatgagcaaaatcaccagctaacatcataatgacaggatcaaattcacacataacaatattaactttaaatataaatggactaaattctgcaattaaaagacacagactggcaagttggataaagagtcaagacccatcagtgtgctgtattcaggaaacccatctcacgtgcagagacacacataggctcaaaataaaaggatggaggaagatctaccaagccaatggaaaacaaaaaaaggcaggggttgcaatcctagtctctgataaaacagactttaaaccaacaaagatcaaaagagacaaagaaggccattacataatggtaaagggatcaattcaacaagaggagctaactatcctaaatatttatgcacccaatacaggagcacccagattcataaagcaagtcctcagtgacctacaaagagacttagactcccacacattaataatgggagactttaacaccccactgtcaacattagacagatcaacgagacagaaagtcaacaaggatacccaggaattgaactcagctctgcaccaagcagacctaatagacatctacagaactctccaccccaaatcaacagaatatacctttttttcagcaccacaccacacctattccaaaattgaccacatagttggaagtaaagctctcctcagcaaatgtaaaagaacagaaattataacaaactatctctcagaccacagtgcaatcaaactacaactcaggattaagaatctcactcaaagccgctcaactacatggaaactgaacaacctgctcctgaatgactactgggtacataacgaaatgaaggcagaaataaagatgttctttgaaaccaacgagaataaagacaccacataccagaatctctgggacgcattcaaagcagtgtgtagagggaaatttatagcactaaatgcctacaagagaaagcaggaaagatccaaaattgacaccctaacatcacaattaaaagaactagaaaagcaagagcaaacacattcaaaagctagcagaaggcaagaaataactaaaatcagagcagaactgaaggaaatagagacacaaaaaacccttcaaaaaatcaatgaatccaggagctggttttttgaaaggatcaacaaaattgatagaccgctagcaagactaataaagaaaaaaagagagaagaatcaaatagacacaataaaaaatgataaaggggatatcaccaccgatcccacagaaatacaaactaccatcagagaatactacaaacacctctacgcaaataaactagaaaatctagaagaaatggatacattcctcgacacatacactctcccaagactaaaccaggaagaagttgaatctctgaatagaccaataacaggctctgaaattgtggcaataatcaatagtttaccaaccaaaaagagtccaggaccagatggattcacagccgaattctaccagaggtacatggaggaactggtaccattccttctgaaactattccaatcaatagaaaaagagggaatcctccctaactcattttatgaggccagcatcattctgataccaaagccgggcagagacacaaccaaaaaagagaattttagaccaatatccttgatgaacattgatgcaaaaatcctcaataaaatactggcaaaccgaatccagcagcacatcaaaaagcttatccaccatgatcaagtgggcttcatccctgggatgcaaggctggttcaatatacgcaaatcaataaatgtaatccagcatataaacagagccaaagacaaaaaccacatgattatctcaatagatgcagaaaaagcctttgacaaaattcaacaacgcttcatgctaaaaactctcaataaattaggtattgatgggacgtatttcaaaataataagagctatctatgacaaacccacagccaatatcatactgaatgggcaaaaactggaagcattccctttgaaaaccggcacaagacagggatgccctctctcaccgctcctattcaacatagtgttggaagttctggccagggcaatcaggcaggagaaggaaataaagggtattcaattaggaaaagaggaagtcaaattgtccctgtttgcagacgacatgattgtatatctagaaaaccccatcgtctcagcccaaaatctccttaagctgataagcaacttcagcaaagtctcaggatacaaaatcaatgtacaaaaatcacaagcattcttatacaccaacaacagacaaacagagagccaaatcatgggtgaactcccattcacaattgcttcaaagagaataaaatacctaggaatccaacttacaagggatgtgaaggacctcttcaaggagaactacaaaccactgctcaaggaaataaaagaggagacaaacaaatggaagaacattccatgctcatgggtaggaagaatcaatatcgtgaaaatggccatactgcccaaggtaatttacagattcaatgccatccccatcaagctaccaatgactttcttcacagaattggaaaaaactactttaaagttcatatggaaccaaaaaagagcccgcattgccaagtcaatcctaagccaaaagaacaaagctggaggcatcacactacctgacttcaaactatactacaaggctacagtaaccaaaacagcatggtactggtaccaaaacagagatatagatcaatggaacagaacagagccctcagaaataatgccacatatctacaactatctgatctttgacaaacctgagaaaaacaagcaatggggaaaggattccctatttaataaatggtgctgggaaaactggctagccatatgtagaaagctgaaactggatcccttccttacaccttatacaaaaatcaattcaagatggattaaagatttaaacgttaaacctaaaaccataaaaaccctagaagaaaacctaggcattaccattcaggacataggcgtgggcaaggacttcatgtccaaaacaccaaaagcaatggcaacaaaagacaaaattgacaaatgggatctaattaaactaaagagcttctgcacagcaaaagaaactaccatcagagtgaacaggcaacctacaacatgggagaaaattttcgcaacctactcatctgacaaagggctaatatccagaatctacaatgaactcaaacaaatttacaagaaaaaaacaaacaaccccatcaaaaagtgggcgaaggacatgaacagacacttctcaaaagaagacatttatgcagccaaaaaacacatgaagaaatgctcatcatcactggccatcagagaaatgcaaatcaaaaccactatgagatatcatctcacaccagttagaatggcaatcattaaaaagtcaggaaacaacaggtgctggagaggatgcggagaaataggaacacttttacactgttggtgggactgtaaactagttcaaccattgtggaagtcagtgtggcgattcctcagggatctagaactagaaataccatttgacccagccatcccattactgggtatatacccaaatgagtataaatcatgctgctataaagacacatgcacacgtatgtttattgcggcactattcacaatagcaaagacttggaaccaacccaaatgtccaacaatgatagactggattaagaaaatgtggcacatatacaccatggaatactatgcagccataaaaaatgatgagttcatatcctttgtagggacatggatgaaattggaaaccatcattctcagtaaactatcgcaagaacaaaaaaccaaacaccgcatattctcactcataggtgggaattgaacaatgagatcacatggacacaggaaggggaatatcacactctggggactgtggtggggtcgggggaggggggagggatagcattgggagatatacctaatgctagatgacacattagtgggtgcagcgcaccagcatggcacatgtatacatatgtaactaacctgcacaatgtgcacatgtaccctaaaacttagagtataataaaaaaaaaaaaaaaaagaaaaaaaaaaaaaaaaaaa

SEQ ID NO: 459 - DNA, 144 bp, Homo sapiens
  source 1..144: mol_type = other DNA
tagtaaaggtataagcagaaacaattgcaaaagaacacataacatctagtagggataatgatgaaagccaaaaatggattatttgaaaataattttggaagtaaaaaaaccataggtgtgaggaaaaaagagagaaactacaaa

SEQ ID NO: 460 - DNA, 6029 bp, Homo sapiens
  source 1..6029: mol_type = other DNA
gggaggagccaagatggccgaataggaacagctccggtctacagctcccagcgtgagcgacgcagaagacggtgatttctgcatttccatctgaggtaccgggttcatctcactagggagtgccagacagtgggcgcaggccagtgtgtgtgcgcaccgtgcgcgagccgaagcagggcgaggcattgcctcacctgggaagcgcaaggggtcagggagttccctttccgagtcaaagaaaggggtgacggacgcacctggaaaatcgggtcactcccacccgaatattgcgcttttcagaccggcttaagaaacggcgcaccacgagactatatcccacacctggctcggagggtcctacgcccacggaatctcgctgattgctagcacagcagtctgagatcaaactgcaaggcggcaacgaggctgggggaggggcgcccgccattgcccaggcttgcttaggtaaacaaagcagccgggaagctcgaactgggtggagcccaccacagctcaaggaggcctgcctgcctctgtaggctccacctctgggggcagggcacagacaaacaaaaagaaagcagtaacctctgcagacttaagtgtccctgtctgacagctttgaagagagcagtggttctcccagcacgcagctggagatctgagaatgggcagactgcctcctcaagtgggtccctgactcctgacccccgagcagcctaactgggaggcaccccccagcaggggcacactgacacctcacacggcagggtattccaacagacctgcagctgagggtcctgtctgttagaaggaaaactaacaaccagaaaggacatctacaccgaaaacccatctgtacatcaccatcatcaaagaccaaaagtagataaaaccacaaagatggggaaaaaacagaacagaaaaactggaaactctaaaacgcagagcgcctctcctcctccaaaggaacgcagttcctcaccagcaacagaacaaagctggatggagaatgattttgacgagctgagagaagaaggcttcagacgatcaaattactctgagctacgggaggacattcaaaccaaaggcaaagaagttgaaaactttgaaaaaaatttagaagaatgtataactagaataaccaatacagagaagtgcttaaaggagctgatggagctgaaaaccaaggctcgagaactacgtgaagaatgcagaagcctcaggagccgatgcgatcaactggaagaaagggtatcagcaatggaagatgaaatgaatgaaatgaagcgagaagggaagtttagagaaaaaagaataaaaagaaatgagcaaagcctccaagaaatatgggactatgtgaaaagaccaaatctacgtctgattggtgtacctgaaagtgatgtggagaatggaaccaagttggaaaacactctgcaggatattatccaggagaacttccccaatctagcaaggcaggccaacgttcagattcaggaaatacagagaacgccacaaagatactcctcgagaagagcaactccaagacacataattgtcagattcaccaaagttgaaatgaaggaaaaaatgttaagggcagccagagagaaaggtcgggttaccctcaaaggaaagcccatcagactaacagcggatctctcggcagaaaccctacaagccagaagagagtgggggccaatattcaacattcttaaagaaaagaattttcaacccagaatttcatatccagccaaactaagcttcataagtgaaggagaaataaaatactttatagacaagcaaatgttgagagattttgtcaccaccaggcctgccctaaaagagctcctgaaggaagcgctaaacatggaaaggaacaaccggtaccagccgctgcaaaatcatgccaaaatgtaaagaccatcgagactaggaagaaactgcatcaactaatgagcaaaatcaccagctaacatcataatgacaggatcaaattcacacataacaatattaactttaaatataaatggactaaattctgcaattaaaagacacagactggcaagttggataaagagtcaagacccatcagtgtgctgtattcaggaaacccatctcacgtgcagagacacacataggctcaaaataaaaggatggaggaagatctaccaagccaatggaaaacaaaaaaaggcaggggttgcaatcctagtctctgataaaacagactttaaaccaacaaagatcaaaagagacaaagaaggccattacataatggtaaagggatcaattcaacaagaggagctaactatcctaaatatttatgcacccaatacaggagcacccagattcataaagcaagtcctcagtgacctacaaagagacttagactcccacacattaataatgggagactttaacaccccactgtcaacattagacagatcaacgagacacaaagtcaacaaggatacccaggaattgaactcagctctgcaccaagcagacctaatagacatctacagaactctccaccccaaatcaacagaatatacatttttttcagcaccacaccacacctattccaaaattgaccacatagttggaagtaaagctctcctcagcaaatgtaaaagaacagaaattataacaaactatctctcagaccacagtgcaatcaaactagaactcaggattaagaatctcactcaaagccgctcaactacatggaaactgaacaacctgctcctgaatgactactgggtacataacgaaatgaaggcagaaataaagatgttctttgaaaccaacgagaacaaagacaccacataccagaatctctgggacgcactcaaagcagtgtgtagagggaaatttatagcactaaatgcctacaagagaaagcaggaaagatccaaaattgacaccctaacatcacaattaaaagaactagaaaagcaagagcaaacacattcaaaagctagcagaaggcaagaaataactaaaatcagagcagaactgaaggaaatagagacacaaaaaacccttcaaaaaatcaatgaatccaggagctggttttttgaaaggatcaacaaaattgatagaccgctagcaagactaataaagaaaaaaagagagaagaatcaaatagacacaataaaaaatgataaaggggatatcaccaccgatcccacagaaatacaaactaccatcagagaatactacaaacacctctacgcaaataaactagaaaatctagaagaaatggatacattcctcgacacatacactctcccaagactaaaccaggaagaagttgaatctctgaatcgaccaataacaggctctgaaattgtggcaataatcaatagtttaccaaccaaaaagagtccaggaccagatggattcacagccgaattctaccagaggtacaaggaggagctggcaccattccttcagaaactattccaatcaatagaaaaagagggaatcctccctaactcattttatgaggccagcatcatcctgataccaaagccgggcagacacacaaccaaaaaagagaattttagaccaatatccttgatgaacattgatgcaaaaatcctcaataaaatactggcaaaccgaatccagcagcacatcaaaaagcttatccaccatgatcaagtgggcttcatccctgggatgcaaggctggttcaatatacgcaaatcaataaatgtaatccagcatataaacagagccaaagacaaaaaccacatgattatctcaatagatgcagaaaaagcctttgacaaaattcaacaacccttcatgctaaaaactctcaataaattaggtattgatgggacgtatttcaaaataataagagctatctatgacaaacccacagccaatatcatactgaatgggcaaaaactggaagcattccctttgaaaaccggcacaagacagggatgccctctctcaccgctcctattcaacatagtgttggaagttctggccagggcaatcaggcaggagaaggaaataaagggtattcaattaggaaaagaggaagtcaaattgtccctgtttgcagacgacatgattgtttatctagaaaaccccatcgtctcagcccaaaatctccttaagctgataagcaacttcagcaaagtctcaggatacaaaatcaatgtacaaaaatcacaagcattcttatacaccaacaacagacaaacagagagccaaatcatgggtgaactcccattcacaattgcttcaaagagaataaaatacctaggaatccaacttacaagggatgtgaaggacctcttcaaggagaactacaaaccactgctcaaggaaataaaagaggagacaaacaaatggaagaacattccatgctcatgggtaggaagaatcaatatcgtgaaaatggccatactgcccaaggtaatttacagattcaatgccatccccatcaagctaccaatgactttcttcacagaattggaaaaaactactttaaagttcatatggaaccaaaaaagagcccgcattgccaagtcaatcctaagccaaaagaacaaagctggaggcatcacactacctgacttcaaactatactacaaggctacagtaaccaaaacagcatggtactggtaccaaaacagagatatagatcaatggaacagaacagagccctcagaaataatgccgcatatctacaactatctgatctttgacaaacctgagaaaaacaagcaatggggaaaggattccctatttaataaatggtgctgggaaaactggctagccatatgtagaaagctgaaactggatcccttccttacaccttatacaaaaatcaattcaagatggattaaagatttaaacgttaaacctaaaaccataaaaaccctagaagaaaacctaggcattaccattcaggacataggcgtgggcaaggacttcatgtccaaaacaccaaaagcaatggcaacaaaagacaaaattgacaaatgggatctaattaaactaaagagcttctgcacagcaaaagaaactaccatcagagtgaacaggcaacctacaacatgggagaaaatttttgcaacctactcatctgacaaagggctaatatccagaatctacaatgaactcaaacaaatttacaagaaaaaaacaaacaaccccatcaaaaagtgggcgaaggacatgaacagacacttctcaaaagaagacatttatgcagccaaaaaacacatgaagaaatgctcatcatcactggccatcagagaaatgcaaatcaaaaccactatgagatatcatctcacaccagttagaatggcaatcattaaaaagtcaggaaacaacaggtgctggagaggatgcggagaaataggaacacttttacactgttggtgggactgtaaactagttcaaccattgtggaagtcagtgtggcgattcctcagggatctagaactagaaataccatttgacccagccatcccattactgggtatatacccaaatgagtataaatcatgctgctataaagacacatgcacacgtatgtttattgcggcactattcacaatagcaaagacttggaaccaacccaaatgcccaacaatgatagactggattaagaaaatgtggcacatatacaccatggaatactatgcagccataaaaaatgatgagttcatatcctttgtagggacatggatgaaattggaaaccatcattctcagtaaactatcgcaagaacaaaaaaccaaacaccgcatattctcactcataggtgggaattgaacaatgagatcacatggacacaggaaggggaatatcacactctggggactgtggtggggtcgggggaggggggagggatagcattgggagatatacctaatgctagatgacacattagtgggtgcagtgcaccagcatggcacatgtatacatatgtaactaacctgcacaatgtgcacatgtaccctaaaacttagagtataataaaaaaaaaaaaa

SEQ ID NO: 461 - DNA, 964 bp, Homo sapiens
  source 1..964: mol_type = other DNA
gcctctgcccggccgcccctactgggaagtgaggagcccctctgcccggccagccgccccgtccgggagggaggtgggggtgtcagccccccgcccggccagccgccccgtccgggagggaggtgggggggtcagcccccctgcccggccagccgccccgtctgggagggaggtgggggtgtcagccccccgcccggccagccgccccgtccgggagggaggtgggggtgtcagccccccgcccggccagccgccccgtccgggaggtgaggggcgcctctgcccggccgcccctactgggaagtgaggagcccctctgcccggccagccgccccgtccgggagggaggtggggggtcagccccccgcccggccagccgccccggccgcccctactgggaagtgaggagcccctctgcccggccaccaccccttctgggaggtgtgcccaacagctcattgagaacgggccaggatgacaatggcggctttgtggaatagaaaggcgggaaaggtggggaaaagattgagaaatcggatggttgccgtgtctgtgtagaaagaagtagacatgggagacttttcattttgttctgcactaagaaaaattcctctgccttgggatcctgttgatctgtgaccttacccccaaccctgtgctctctgaaacatgtgctgtgtccactcagggttaaatggattaagggcagtgcaagatgtgctttgttaaacagatgcttgaaggcagcatgctcgttaagagtcatcaccactccctaatctcaagtaatcagggacacaaacaccgcggaaggccgcagggtcctctgcctaggaaaaccagagacctttgttcacttgtttatctgctgaccttccctccactattgtcccatgaccctgccaaatccccctctgtgagaaacacccaagaattatcaataaaaaaataaattaaaaaaaaa

SEQ ID NO: 462 - DNA, 3799 bp, Homo sapiens
  source 1..3799: mol_type = other DNA
ggggttgcaatcctagtctctgataaaacagactttaaaccaaaaaagataaaaaaagacaaagaagggcattacacaatggtaaatggatcaatgtaacaagaagagcaaattatcttaaatatatatatgcacccaaaacaagagcacccagattcataaagcaagttctcggagacctacaaagagacttagactcccacacaataatagtgggagactttaacaccccactgtcaatattagatcaatgagacagaaaattaagaaggatattcaggacttgaactcaactccggaccaagcagacctagtagacatctacagaactctctaccccaaatcaacagaatatacattcttctcacaccacatagcacttattctaaaattgaccaataattggaagtaaaacactcctcagcaaatgcaaataacggaaatcataacaaacagtctctcagaccacagtgcaatcaaattcgaattcaggattaagaaactcactcaaaaccacacaactacatggaaactgaacaatctgctcctgagtgactactgggtaaataaagaaattaaggcagaagtaagtaagttctttgacaccaatgagaacaaagagataacataccagaatctctgggacacagctaaagcagtgttaagagggaaatttatagcactaaatgtccatatcagaaagcaagaaagatctaaaatcgacaccctaacatcacaattaaaagaactacagaagcaaaagcaaacaaattcaaaagctagcagaagacaagaaataactaagatcggagcaaaactgaaggagacagagacacgaaaaacccttcaaaaaaatcaatgaatccaggagctggttttttgaaaagattaacaaaattgatagactgctagacagactaataaataaaagagagaagaatcagatagacacaataaaaaatgataaagggatatcaccactgatccctcagaagtacaaactactatcagagaatactataaacacctctatgcaaataaactaaaaaatctagaagaaatggataaattcctggacacatacactctcccaagactaaaccaggaagaagtcacatccctgaatacaccaataacaagttctgaaattgaggcagtaattagtagcctaccaaccaaaaaaagcccaggactagatggattcacagccaaattctaccagaggtacaaagaggagctggtaccattccttctgaaattattccaaacaaaagaaaaagacggactgctccctaactcattttatatgaggccaacatcattctgataccaaaacctggcagacacaacaaaaaaagaaaatttcaggtcaatatccccaatgaacatcaatatgaaaatactcaataaaatactggcaaaccgaatctagcagcacatcaaaaagcttatccacacgatcaaggcagcttcatccctgggatgtaaggctggttcaccatatgcaaatcaataaatgtaatccatcatataaacagaaccaatgacaaaaaccacacaattatctcaatagatgcagaaaaggccttggacaaaattcaacaccgcttcatgctaaaaactctcaataaactaggtattgatggaacgttactcagaataataagagctatttatgacaaacccatagccaatatcatactgaatgggcaaaagctggaagcattcccattgaaaactggcacaaaacaaggatgccctctctcaccactcctattcaacatagtattggaaattctggccagggcaatcaggcaagagaaagaaataaagggtattcaaatagaaagaaagtcaaattgtctttgtttgcagatgacatgattgtatatttagaaaattccattgcctcagccccaaaactccttaagctgataagcaacttcagcaaagtctcgggatacaaaatcaatcagcaaaaatcacaagcattcctatacaccaataatagagagtcaagtcacgaatgaactcccattcacaactgctacaaagaaaataaaatacctaggaatccaacttacaagggatgtgaaggacctcttcaaggagaactacaaaccactgctcaaagaaataagagaggacacaaacaaatggaaaaacattccatgctcatggataggaagaatcagcatcatgaaaatggccatactgcccaaagtaattaatagattcaatgctattcccatcaagttaccattgactttcttcacagaactagaaacaactactttaaatttcatatggaaccaaaaaaagagcctgtatagccaagacaatcctaagcaaaaagaacaaagctggaagcatcatgctacctgacttcaaactatactacaaggctacagtaaccaaaatagcatggtactggtaccaaaacagatacatagaccagtggaacagaacagaggcctcagaaataacaccacacacctacaaccatctgatcttgacaaaaacaagaaatggggaaaggattccctatttaataaatggtgctgggaaaactggctagccatatgcagaaaactgaaactggaccccttccttacactgtatacaaaaattcactcaagacgaattaaagacttacatgtaaaacctaaaaccataaaaaccctagaagaaaacctaggcaataccattcaggacataggcatgggcaaagacttcatgactaaaacaccaaaagcaatggcaacaaaagccaaacttgacaaatgggatctaattaaactaaagagtttctgcacagtgaaagaaaccatcatcagagtgaacagacaacctatagaatgggagaaaatttttgcaatctatccatctgacaaaggtctaatatctaaaatctacaaggaacttaaacaaatttacaaaaaaaaaaaaacccatcaaaaagtgggtgaaggatatgaacagacacttctcaaaagacatttatgtggccaaaaaacatgaaaaaaaagctcatcatcactggtcattagagaaatgcaaatcaaaaccacaatgagataccatttcatgccagttagaacagcgattattaaaagtcaggaaacaacagatgctggagaggatgtgaagaaataggaacgcttttacactgttggtgggagtgtaaattaggtcaaccattatggaagacagtgtggtgattcctcaaggatctacaaacagaaatatcatttgacccagcaatcccattactgggtatatacccaaaggattataaatcattctactataatgacacaggcacatgtatgtttattgtggcactgttcacaatagcaaagacttggaaccaacccaaatgcccatcaatgatagactggataaagaaaatctggcacatatacactgtggaatatgaagcagccataaaaaagaatgagttcatgtcctttgcagggacatggatgaagctggaaagcatcattctcagcaaactaacataggaacagaaaaccaaacatcgcatgttctccataagtaggagttgaacaatgagaacacatggacacggggaggggaacagcacataccggggcctgccaggggttgaggggcaaggggatggagaccattaggacaaatacctaatgcatgtggggcttaaaacctagatgacaggttgatgggtgcagcaaaaccaccatggcacatgtatacctacgtaacaaacctgcaggttctgtacatgtatcccagaacttaaagtattaaaaaaaaa

SEQ ID NO: 463 - DNA, 1240 bp, Homo sapiens
  source 1..1240: mol_type = other DNA
agtatgagtttttgaagatcagatggtacatagagctttggcccatgtccaacccaaaggggttctaatgagttcatcgtagttaccccttcctgaaagtgtaattgaagttgacaggttcaacagctgtcaggactcttacatttcttcctgacctgtataccaagggacattattgtaagcaggaccaaggggaggcttctgaaattctactttcctggcaataaaatgaataaaacataataactgcattctccaggaaacagaattggtcgctgccacaacaaaaaactcaaaagttccagggggcggtcgtccattttatatctttattcagttaacctaactggcctctgtcaaaaccagatggattataggatgaatgcacattagcataaacttaagtcacacttgcacattcgctctaggatgtggtatcttcactgagcagaatgtggtttccagcactttgtatgcggcttttgatttagctaatgctttttaatctacacacattgtggaggaaaatcaaaacaatttgctttggtgtggtaaaaacaagaacactgcttcactgttttctgtcagggctgtcacttctgctttcagtttaattgacattttgcaaaacatcatgttaattcaatatattaataatattacataaagtggtacccataagcaggaagtggcaagttccttaagtatagtaaaatattataacattgaacagaagtaaaatactggaagaagagacataaacttcagcagattcaaagacctataacatagatgaagtttataggggtccaatgcttctggtccttttgtcaaaacatcctttttacagtaaatggcatgttgccctatatatatatacttcctatcactaaaagggaaatacagttttatgggggcttattggggttttgaattcaacatataccacatttaaggatatttctctgactcactaaaggagtttgcaagggctgcttgtctcaagtcaaacccgaaacaaaaacgggctctatagcagatatagagtctggcccaagttgcttggccattgtgccagatgatgtaacagaattcaaagttgctacaggcatgcatagtgggcattataggactctgtgcatgcctctcacaagcccataggagtggggagagcaaactcctagcgaattagtggaagactattccttctccagcagaggactaccttctgtctgaaaaa

SEQ ID NO: 464 - DNA, 6027 bp, Homo sapiens
  source 1..6027: mol_type = other DNA
ggaggagccaagatggccgaataggaacagctccggtctacagctcccagcgtgagcgacgcagaagacggtgatttctgcatttccatctgaggtaccgggttcatctcactagggagtgccagacagtgggcgcaggccagtgtgtgtgcgcaccgtgcgcgagccgaagcagggcgaggcattgcctcacctgggaagcgcaaggggtcagggagttccctttccgagtcaaagaaaggggtgacggacgcacctggaaaattgggtcactcccacccgaatattgcgcttttcagaccggcttaagaaacggcgcaccacgagactatatcccacacctggctcggagggtcctacgcccacggaatctcgctgattgctagcacagcagtctgagatcaaactgcaaggcggcaacgaggctgggggaggggcgcccgccattgcccaggcttgcttaggtaaacaaagcagcctggaagctcgaactgggtggagcccaccacagctcaaggaggcctgcctgcctctgtaggctccacctctgggggcagggcacagacaaacaaaaagacagcagtaacctctgcagacttaagtgtccctgtctgacagctttgaagagagcagtggttctcccagcacgcagctggagatctgagaacgggcagactgcctcctcaagtgggtccctgactcctgacccccgagcagcctaactgggaggcaccccccagcaggggcacactgacacctcacacggcagggtattccaacagacctgcagctgagggtcctgtctgttagaaggaaaactaacaaccagaaaggacatctacaccgaaaacccatctgtacatcaccatcatcaaagaccaaaagtagataaaaccacaaagatggggaaaaaacagaacagaaaaactggaaactctaaaacgcagagcgcctctcctcctccaaaggaacgcagttcctcaccagcaacagaacaaagctggatggagaatgattttgacgagctgagagaagaaggcttcagacgatcaaattactctgagctacgggaggacattcaaaccaaaggcaaagaagttgaaaactttgaaaaaaatttagaagaatgtataactagaataaccaatacagagaagtgcttaaaggagctgatggagctgaaaaccaaggctcgagaactacgtgaagaatgcagaagcctcaggagccgatgcgatcaactggaagaaagggtatcagcaatggaagatgaaatgaatgaaatgaagcgagaagggaagtttagagaaaaaagaataaaaagaaatgagcaaagcctccaagaaatatgggactatgtgaaaagaccaaatctacgtctgattggtgtacctgaaagtgatgtggagaatggaaccaagttggaaaacactctgcaggatattatccaggagaacttccccaatctagcaaggcaggccaacgttcagattcaggaaatacagagaacgccacaaagatactcctcgagaagagcaactccaagacacataattgtcagattcaccaaagttgaaatgaaggaaaaaatgttaagggcagccagagagaaaggtcgggttaccctcaaaggaaagcccatcagactaacagcggatctctcggcagaaaccctacaagccagaagagagtgggggccaatattcaacattcttaaagaaaagaattttcaacccagaatttcatatccagccaaactaagcttcataagtgaaggagaaataaaatactttatagacaagcaaatgttgagagattttgtcaccaccaggcctgccctaaaagagctcctgaaggaagcgctaaacatggaaaggaacaaccggtaccagccgctgcaaaatcatgccaaaatgtaaagaccatcgagactaggaagaaactgcatcaactaatgagcaaaatcaccagctaacatcataatgacaggatcaaattcacacataacaatattaactttaaatataaatggactaaattctgcaattaaaagacacagactggcaagttggataaagagtcaagacccatcagtgtgctgtattcaggaaacccatctcacgtgcagagacacacataggctcaaaataaaaggatggaggaagatctaccaagccaatggaaaacaaaaaaaggcaggggttgcaatcctagtctctgataaaacagactttaaaccaacaaagatcaaaagagacaaagaaggccattacataatggtaaagggatcaattcaacaagaggagctaactatcctaaatatttatgcacccaatacaggagcacccagattcataaagcaagtcctcagtgacctacaaagagacttagactcccacacattaataatgggagactttaacaccccactgtcaacattagacagatcaacgagacagaaagtcaacaaggatacccaggaattgaactcagctctgcaccaagcagacctaatagacatctacagaactctccaccccaaatcaacagaatatacatttttttcagcaccacaccacacctattccaaaattgaccacatactgggaagtaaagctctcctcagcaaatgtaaaagaacagaaactataacaaactatctctcagaccacagtgcaatcaaactagaactcaggattaagaatctcactcaaagccgctcaactacatggaaactgaacaacctgctcctgaatgactactgggtacataacgaaatgaaggcagaaataaagatgttctttgaaaccaacgagaacaaagacaccacataccagaatctctgggacgcattcaaagcagcgtgtagagggaaatttatagcactaaatgcctacaagagaaagcaggaaagatccaaaattgacaccctaacatcacaattaaaagaactagaaaagcaagagcaaacacattcaaaagctagcagaaggcaagaaataactaaaatcagagcagaactgaaggaaatagagacacaaaaaacccttcaaaaaatcaatgaatccaggagctggttttttgaaaggatcaacaaaattgatagaccgctagcaagactaataaagaaaaaaagagagaagaatcaaatagacacaataaaaaatgataaaggggatatcaccaccgatcccacagaaatacaaactaccatcagagaatactacaaacacctctacgcaaataaactagaaaatctagaagaaatggatacattcctcgacacatacactctcccaagactaaaccaggaagaagttgaatctctgaatcgaccaataacaggctctgaaattgtggcaataatcaatagtttaccaaccaaaaagagtccaggaccagatggattcacagccgaattctaccagaggtacaaggaggaactggtaccattccttctgaaactattccaatcaatagaaaaagagggaatcctccctaactcattttatgaggccagcatcattctgataccaaagcctggcagagacacaaccaaaaaagagaattttagaccaatatccttgatgaacattgatgcaaaaatcctcaataaaatactggcaaaccgaatccagcagcacatcaaaaagcttatccaccatgatcaagtgggcttcatccctgggatgcaaggctggttcaatatacgcaaatcaataaatgtaatccagcatataaacagagccaaagacaaaaaccacatgattatctcaatagatgcagaaaaagcctttgacaaaattcaacaacccttcatgctaaaaactctcaataaattaggtattgatgggacgtatttcaaaataataagagctatctatgacaaacccacagccaatatcatactgaatgggcaaaaactggaagcattccctttgaaaaccggcacaagacagggatgccctctctcaccgctcctattcaacatagtgttggaagttctggccagggcaatcaggcaggagaaggaaataaagggtattcaattaggaaaagaggaagtcaaattgtccctgtttgcagacgacatgattgtttatctagaaaaccccatcgtctcagcccaaaatctccttaagctgataagcaacttcagcaaagtctcaggatacaaaatcaatgtacaaaaatcacaagcattcttatacaccaacaacagacaaacagagagccaaatcatgggtgaactcccattcacaattgcttcaaagagaataaaatacctaggaatccaacttacaagggatgtgaaggacctcttcaaggagaactacaaaccactgctcaaggaaataaaagaggacacaaacaaatggaagaacattccatgctcatgggtaggaagaatcaatatcgtgaaaatggccatactgcccaaggtaatttacagattcaatgccatccccatcaagctaccaatgactttcttcacagaattggaaaaaactactttaaagttcatatggaaccaaaaaagagcccgcattgccaagtcaatcctaagccaaaagaacaaagctggaggcatcacactacctgacttcaaactatactacaaggctacagtaaccaaaacagcatggtactggtaccaaaacagagatatagatcaatggaacagaacagagccctcagaaataatgccgcatatctacaactatctgatctttgacaaacctgagaaaaacaagcaatggggaaaggattccctatttaataaatggtgctgggaaaactggctagccatatgtagaaagctgaaactggatcccttccttacaccttatacaaaaatcaattcaagatggattaaagatttaaacgttaaacctaaaaccataaaaaccctagaagaaaacctaggcattaccattcaggacataggcgtgggcaaggacttcatgtccaaaacaccaaaagcaatggcaacaaaagacaaaattgacaaatgggatctaattaaactaaagagcttctgcacagcaaaagaaactaccatcagagtgaacaggcaacctacaacatgggagaaaatttttgcaacctactcatctgacaaagggctaatatccagaatctacaatgaactcaaacaaatttacaagaaaaaaacaaacaaccccatcaaaaagtgggcgaaggacatgaacagacacttctcaaaagaagacatttatgcagccaaaaaacacatgaagaaatgctcatcatcactggccatcagagaaatgcaaatcaaaaccactatgagatatcatctcacaccagttagaatggcaatcattaaaaagtcaggaaacaacaggtgctggagaggatgcggagaaataggaacacttttacactgttggtgggactgtaaactagttcaaccattgtggaagtcagtgtggcgattcctcagggatctagaactagaaataccatttgacccagccatcccattactgggtatatacccaaatgagtataaatcatgctgctataaagacacatgcacacatatgtttattgcggcactattcacaatagcaaagacttggaaccaacccaaatgtccaacaatgatagactggattaagaaaatgtggcacatatacaccatggaatactatgcagccataaaaaatgatgagttcatatcctttgtagggacatggatgaaattggaaaccatcattctcagtaaactatcgcaagaacaaaaaaccaaacaccgcatattctcactcataggtgggaattgaacaatgagatcacatggacacaggaaggggaatatcacactctggggactgtggtggggtcgggggaggggggagggatagcattgggagatatacctaatgctagatgacacattagtgggtgcagcgcaccagcatggcacatgtatacatatgtaactaacctgcacaatgtgcacatgtaccctaaaacttagagtataataaaaaaaaaaaa

SEQ ID NO: 465 - DNA, 1372 bp, Homo sapiens
  source 1..1372: mol_type = other DNA
ctctccctccccctccccctctcgctctcgctctccccacggtctccctctccctctctttccacggtctccctctgatgccgagcggaagctggacggtactgctgccatctcggctcactgcaacctccctgcctgattctcctgcctcagcctgccgagtgcctgcgattgcaggcgcgcgccgccacgcctgactggttttcctatttttttggtggagatggggtttcgctgtgttggcggggctggtctccagctcctaaccgcgagtgatccgccagcctccgcctcccgaggcgccgggattgcagacgggagtctcgttcactcagtgctcaatggtgcccaggctggagtgcagtggcgtgatctcggctcgctacaacctccacctcccacccgcctgccttggcccccccaaagtgctgagattgcagcctctgcccggccgccaccccgtctgggaagtgaggagcttctctgcctggccgcccatcgtctgggatgtgaggagcccctctgcctggctgcccagtctggaaagtgaggagcgtctctgcccggccgcccatcgtctgagatgtggggagcacctctgccctgccgccccgtctgggatgcgaggagcgtctctgcccggctgccccgtctgagaagtgaggagcccctctgcctgccaaccgccccgtctgggaagtgaggagcgtctccgcccggcagccaccccgtcctggagggaggtgggggtcagcccccaccaggccagccaccccgtcagggaggtgaggggcgcctctgcccggccgcccctactgggaagtgaggagccccctctgcccggccaccaccccgtctgggaggtgtacccaacagctcattgagaacgggccatgatgacaatggcggttttgtggaatacaaaggggggaaggtggggaaaagattgagaaatcagatggttgccgtgtctgtgtagaaagaggtagacatgggagacttttcattttgttctgtactaagaaaaattcttctgccttgggatcctgttgatctgtgaccttacccccaaccctgtgctctctgaaacatgtgctgtgtccactcagggttaaatggattaagggcggtgcaagatgtgctttgttaaacagatgcttgaaggcagcatgctcgttaagagtcatcaccactccctaatctcaagtacccagggacacaaacactgcagaaggccgcagggtcctctgcctaggaaaaccagagacctttgttcacttgtttatccgctgaccttccctccactattgtcctgtgaccctgccaaatccccctctgtgagaaacacccaagaatgatcaataaaaaataa

SEQ ID NO: 466 - DNA, 6023 bp, Homo sapiens
  source 1..6023: mol_type = other DNA
ggggaggagccaagatggccgaacaggaacagctccggtctacagctcccagcgtggtggatgcagaagatggtgatttctgcatttccatctgaggtaccgggttcatctctctagggagtgcgagacagtgggcgcaggtcagtgggtgcgcgcaccgtgcgcgagccaaagcagggcgaggcattgcctcacttgggaaacgcaaggggtcagggagttccctttcccagtcaaagaaaggggtgacagatggcacctggaaaatcaggtcactcccacctgaatactgcgcttttccgacgggcttaaaaaacggcgcaccatgagattatatcccgcacctggcttggagggtcctacgcccacagagtctcgctgattgctagcacagcagtctgagatcaaactgcaaggcggcagtgaggctgggggaggggcgcccgccattgcccaggcttgattaggtaaacaaagcagccaggaagctcgaactgggtggagcccaccacagctcaaggaggcctgcctgcctctgtaggctccacctctgggggcagggcacagacaaacaaaaagacagcagtaacctctgcagacttaaatgtccctgtctgacagctttgaagagagcagtggttctcccagcatgcagctggagatctgagaacaggcagactgcctcctcaagtgggtccctgacccctgacccctgagcagcctaactgggaggcaccccccagtagaggaacactgacacctcacatggcagggtactccaacagacctgcagctgagggtcctgtctgttagaaggaaaactaacaaacagaaaggacatccacaccaaaaacccatctgtacatcaccatcatcaaagaccaaaagtagataaaaccacaaagatggggaaaaaacagaacagaaaaactggaaactctaaaaagcagagcaccaatcctcctccaaaggaacgcagttcctcaccagcaacggaacaaagctagatggagaatgactttgacgagctgagagaagaaggcttcagacgatcaaattactccgagctacgggaggacattcaaaccaaaggcaaagaagttgaaaactttgaaaaaaatttagaagaatgtataactagaataaccaatacagagaagtgcttaaaggagctgatggagctgaaaaccaaggctcgagaactacgtgaagaatgcagaagcctcaggagccgatgtgatcaactggaagaaacggtatcagcgatggaagatgaaatgaatgaaatgaagcgagaagggaagtgtagagaaaaaagaataaaaagaaacgagcaaagcctccaagaaatatgggactatgtgaaaagaccaaatctacgtctgattggtgtacctgaaagtgatggggagaatggaaccaagttggaaaacatgctgcaggatattatccaggagaacttccccaatctagcaaggcaggccaacgttcagattcaggaaatacagagaacaccacaaagatactcctcaagaagagcaactccaagacacataattgtcagattcaccaaagttgaaatgaaggaaaaaatgttaagggcagccagagagaaaggtcgggttaccctcaaagggaagcccatcagactaacagcagatctctcggcagaaaccctacaagccagaagagagtgggggccaatattcaacattcttaaagaaaagaatttccaacccagaatttcatatccagccaaactaagcttcataagcgaaggagaaataaaatactttacagacaagcaaatgctgagagattttgtcaccaccaggcctgccctaaaagagctcctgaaggaagcactaaacatggaaaggaacaaccagtaccagctgctgcaaaatcatgccaagatgtaaagaccatcgagactaggaagaaactacataaactaacgagcaaaataaccagctaacatcataatgacaggatcaaattcacacataacaatattaactttaaatgtaaatggactaaatgctccaattaaaagacacagactggcaaattggataaagagtcaagaccaatcagtgtgctgtattcaggaaacccatctcacgtgcagacacacataggctcaaaataaaaggatggaggcagatctaccaagcaaatggaaaacaaaaaaaggcagggattgcaatcctagtctctgataaaacagactttaaaccaacaaagatcaaaagagacaaagaaggccattacataatggtaaagggatcaattcaacaagaagagctaactatcctaaatatatatgcacccaataaaggagcaccaagattcataaagcaagtcctgagtgacctacaaagagacttagactcccacacattaataatgggagactttaacaccccactgtcaacattagacagatcaacgagacagaaagtcaacaaggatacccaggaattgaactcagctctgcaccaagcggacctaatagacatctacagaactctccaccccaaatcaatagaatatacatttttttcagcaccacaccacacctattccaaaattgaccacataattggaagtaaagctctcctcagcaaatgtaaaaggacagaaattataacaaactatctctcagaccacagtgcaatccagctagaactcaggattaagaatctcactcaaaactgctcaactgcatggaaactgaacaacctgctcctgaatgactactgggtacataacgaaatgaaggcagaaataaagatgttctttgaaaccaaggagaacaaagacacaacataccagaatctctgggacgcattcaaagcagtgtgtagagggaaatttatagcactaaatgcccacaagagaaagcaggaaagatccaaaattgacaccctaacatcacaattaaaagaactagaaaagcaagagcaaacacattcaaaagctagcagaaggcaagaaataactaagatcagagcagaactgaaggaaatagagacacaaaaaacccttcaaaaaattaatgaatccaggagctggttttttgaaaggatcaacaaaattgatagaccactagcaagactaataaagaaaaaaagagagaagaatcaaatagacgcaataaaatatgataaaggggatatcaccaccgatcccacagaaatacgcactaccatcagagaatactacaaacacctctacgcaaataaactagaaaatctagaagaaatggataaattcctcgacacatacactctcccaagactaaaccaggaagaagttgaatctctgaatagaccaataacaggatctgaaattgtggcaataatcaatagtttaccaacaaaaaagagtccaggaccagatggattcacagctgaattctaccagaggtacaaggaggaactggtaccattccttctgaaactattccaatcaatagaaaaacagggaatcctccctaactcattttatgaggctagcatcatcctgataccgaagccaggcagagacacaacaaaaaaagataattttagaccaatatccttgatgaacattgatgcaaaaatcctcaataaaatactggcaaactgaatccagcagcacatcaaaaagcttatccacaatgatcaagtgggcttcatccctgggatgcaaggctggttcaatatacgcaaatcaataaatgtaatccagcatataaacagagccaaagacaaaaaccaaatgattatctcaatagatgcagaaaaagcctttgacaaaattcaacaacccttcatgctaaaaactctcaataaattaggtattgatgggacatatttcaaaataataagagctatctatgacaaacccacagccaatatcatactgaatgggcaaaaactggaagcattccctttgaaaactggcacaagacagggatgccctctctcaccactcctattcaacatagtgttggaagttctggccaaggcaattaggcaggagaaggaaataaagggtattcaattaggaaaagaggaagtcaaattgtccctgtttgcagatgacatgattgtatatctagaaaaccccattgtctcagcccaaaatctccttaagctgataagcaacttcagcaaagtctcaggatacaaaatcaatgtacaaaaatcacaagcattcttatacaccaacagacaaatagagagccaaatcatgagtgaactcccattcacaattgcttcaaagagaataaaatacctaggaatccaacttacaagggatgtgaaggacctcttcaaggagaactacaaaccactgctcaaggaaataaaagaggataaaaacaaatggaagaacattccatgctcatgggtaggaagaatcaatatcgtgaaaatggccatactgcccaaggtaatttacagattcaatgccatccccatcaagctaccaatgcctttcttcacagaattggaaaaaactactttaaagttcatatggaaccaaaaaagagcccgcatcgccaagtcaatcctaagccaaaagaacaaaggctggaggcatcacactacctgacttcaaactatactacaaggctagagtaaccaaaacagcatggtactggtaccaaaacagagatatacaagaatggaacagaacagagccctcagaaataacgctgcatatctacaactatctgatctttgacaaacctgagaaaaacaagcaatggggaaaggattccctatttaataaatggtgctgggaaaactggctagccatatgtagaaagctgaaactggatcccttccttacaccttatacaaaaatcaattcaagatggattaaagacttaaacgttagacctaaaaccataaaaaccctagaagaaaacctaggcattaccattcaggacataggcatgggcaaggacttcatgtctaaaacaccaaaagcaatggcaacaaaagacaaaattgacaaatgggatctaattaaactaaagagcttctgcacagcaaaagaaactaccatcagagtgaacaggcaacctacaaaatgggagaaaattttcacaacctactcatctgacaaagggctaatatccagaatctacaatgaactcatacaaatttacaagaaaaaaacaaacaaccccatcaaaaagtgggcgaaggacatgaacagacacttttcaaaagaagacatttatgcagccaaaaaacacatgaaaaaatgctcatcatcactggccatcagagaaatgcaaatcaaaaccacaatgagacaccatctcacaccatttagaatggcaatcattaaaaagtcaggaaaccacaggtactggaaaggatgtggagaaataggaacacttttacactgttggtgggactgtaaactagttcaaccattgtggaagtcagtgtggcgattcctcagggatctagaactggaaataccatttgacccagccatcccattactgggtatatacccaaaggactataaatcatgctgctataaagacacatgcacacgtatgtttattgcggcattattcacaatagcaaagacttggaaccaacccaaatgtccaacaatgatagactggattaagaaaatgtggcacatatacaccatggaatactatgcagccataaaaaatgatgagttcatgtcctttgtagggacatggatgaaattggaaaacatcattctcagtaaactattgcaagaacaaaaaaccaaagaccgcatattctcactcataggtgggaattgaacaatgagaacacatggacacaggaaggggaatatcacactggggactgttgtggggtggggggaggggggagggatagcattgggagatatacctaatgctagatgacgagttagtgggtgcagtgcaccagcatggcacatgtatacatatgtaactaacctgcacaatgtgcacatgtaccctaaaacttaaagtataataaaaataaaaa

SEQ ID NO: 467 - DNA, 6138 bp, Homo sapiens
  source 1..6138: mol_type = other DNA
gggggaggagccaagatggccaaataggaacagctccagtctacagctcccattgtgagcaacgcagaagacgggtgatttctgtatttccaactgaggtaccgggttcatctcactggggagtgccagacagtaggtgcaggacagtgggtgcagcgcaccacgcgcaagccgaagcagggcgaggcatcacctcacccgggaagcgcaaggggtcagggaattccctttcctagtcaaagaaagcagtgacagagggcacctggaaaatcggctcactcccaccctaatattgtgcttttccaacgggcttaaaaaatggcacaccaggagattatatcccgcacctggctcggagggtcctactcccagggagtctcgctcattgctagcatagcagtccgagatcaaactgcaaggtggcagtgaggctgggggaggggcacctgtcattgccaagttagttgtttgattaggtaaacaaagcggccaggaagctcgaactgggtggagcccaccacagctcaaggaggcctgcctgcatctgtaggcgccacctctgggggcagggcacagacaaaaagacagcagtaacctctacagacttaaatgtccctctctgacagctttgaagagagtagtggttctcccagcatgcagcttgagatctgagaacgggcagactgcctcctcaagtgggtccctgacccccgagtagcctaactgggaggcaccccccagtaggggtggactgacacctcacacggccaggtactcctctgagacaaaacttccagaagaacgatcaggcagcagcatctgcggttcaccaatatccgctgttctgcagccactgctgctgatacccaggcaaacagggtctggagtggacctccagcaaactccaacagacctgcagctgagggtcctgtctgtaagaaggaaaactagcaaacagaaaggacatccacaccaaaaacccatctgtacgtcaccatcatcaaagtccaaaggtagataaaaccacaaagatgggaaaaaaacagcagaaaaactggaaactctaaaaatcagagtgcctctcctcctccaaaggaacgcagctcctcaccagcaacggaacaaagctggacaaagaatgactgacgagttgagagaagaaggcttcagatgatcaaactactctgagctacaggaggaagttcaaaccaatggcaaagaagttaaaagctttgaaaaaaaattagatgaatggataactagaataaccaatgcagagaagtccttaaaggacctgatggagctgaaaaccaaggcacgagagctacgtgacgaatgcagaagcctcagtagccaatgtgatcaactggcagaaagggtatcagtgatggaagacgaaatgaatgaagtgaagcgagaagagaagtttagagcaaaaagaataaaaagaagtgaacaaagcctccaagaaatatgggactatgtgaaaagaccaaatctacatctgattggtgtacctgaaagtgacggggagaatggaaccaagttggaaaacactctgcaggatataggaaaacttccccaatctagcaaggcaggccaacattcaaattcaggaaatacagaggacgcgacaaagatactcctcgagagagcaactccaagacacataattgtcagattcaccaaagttgaaatgaaggaaaaaatgttaagggcagccagagagaaaggtcgggttacccacaaagggaagcccatcagactaacagcagatctcttggcagaaattctacaagccagaagagagtgggggccaatattcaacattcttaaagaaaagaattttcaacccagaatatcatatccagccaaactaagcttcataagtgaaggagaaataaaatactttacagacaagtaaatgctgagagattttgtcaccaccaggcctgccctaaaagagctcctgaaggaagcactaaacatggaaaggaacaaccggtaccagccactgcaaaaacatgccaaattgtaaagaccatcaaggctaggaagaaactgcatcaactaacaagcaaaataaccatctaacatcataatgacaggatcaaattcacacataacaatattaactttaaatgtaaatgggctaaatgctccaattaaaagacacagactggcaaattggataaagagtcaagacccatcagtgtgctgtattcaggaaacccatctcacgtgcagagacatacataggctcaaaataaagggatggaggaagatctaccaagcaaatggaaaacaaaaaaaggcaggggttgcaatcctagtctctgataaaacaaactttaaaccaacaaagatcaaaagagacaaagaaggccattacataatggtaaagggatcaattcaacaagaagagttaactatcctaaatatatatgcacccaatacaggagcacccagattcataaagcaagtccttagtgacctacaaagtgacttagactcccacacaataataatgggagactttaacaccccactgtcaacattagacagatcaatgacacagaaagttaacaaggatacccaggaattgaactcagctctgcaccaagtggacctaatagacatctacagaactctccaccccaaatcaacagaatatacattctttgcagcaccacaccacacctactccaaaattgactacatagttggaagtaaagcactcctcaacaaatgtaaaagaacagaaattataacaaactgtctctcagaccacagtgcaatcaaactaggactcaggattaagagactcactcaaaaacactcaactacatggaaactgaacaacctgctcctgaatgactactgggtaaataatgaaatgaaggcagaaataaagatgttccttgaaaccaaggagaacaaagacacaacataccagaatctctgggacacattcaaagcagtgtgtacagggaaatttatagcactaaatgtccacaagagaaagcaggaaagatctaaaattgacaccctaacatcacaattaaaagaactagaaaagcaagagcaaacacattcaaaagctagcagaaggcaagaaataactaagatcagagcagaactggaggaaatagagaccaaaaaaacccttcaaaaaattaatgaatccaggacctggttttttgaaaagatcaacaaaattgacagaccgctagcaagactagtaaagaagaaaagaagaatcaaataggcgcaataaaaaatgataaaggggatatcaccaccgatcccacagaaatacaaactaccatcagagatactataaacacctctacgcaaataaactagaaaatctagaagaaacggataaattccttgacacatacatcctcccaagactaaaccaggaagaagttgaatctctgaatagaccaataacaggctctgaaattgaggcaataatcaatagcttactaaccaaaaaaagtccaggaccagatggattcacagccaaattctaccagaggtaggtacaaggaggagctggtaccattccttctgaaactattccaatcagtagaaaaagagggtatcctccctaactctttttatgaggccagcatcatcctgataccaaagcctggcagagacacaaccaaaaaaagagaattttagaccaatatccttgatgaacatcgatgcaaaaatcctcaataaaatactggcaaaccaaatccagcagcacgtcaaaaagcttatccactatgatcaagtgggcttcatccctgggatgcaaggctggttcaacatacacaaatcaataaatgtaatccaacataaacagaaccaaagacaaaaaccacatgattatctcaatagatgcagaaaaggcctttgacaaaattcagcagcccttcatgccaaaaactctctataaattaggtgttgatgggacgtatctcaaaataataagagctatctatgacaacccacagccaatatcatactgaatgggcaaaaactggaagcattccctttgaaaacaggcacaagacagggatgccctctctcacgactcctattcaacatagtgttggaagttctggccagggcaatcaggcaggagaaggaaataaagggtattcaattaggaaaagaggaagtcaaattgtccctgtttgcagacaacatgattgtctatctagaaaaccccatcgtctcagcccaaaatctccttaagctgataagcaacttcagcaaagtctcaggatacaaaatcgatgtgcaaaaatcacaagcattcttttacaccaataacagacaaacagaaagccaaatcatgagtgaactcccattcacaattgcttcaaagagaataaaatacctaggaatccaacttacaagggatgtgaagggcctcttcaaggagaactacaaaccactgctcaatgaaataaaagaagatacaaacaaatggaagaacattccatgctcatgggtaggaagaatcaatatcgtgaaaatggccatactgcccaaggtaatttatagattcaatgccatccccatcaagcaaccaatgactttcttcacagaattggaaaaaactactttaaagtttatatggaaccagaaaaagagcctgcatcgccgagtcaatcctaagccaaaagaacaaagctggaggcatcacgctacctgacttcaaactatactacaaggctacagtaaccaaagcagcatggtacgggtaccaaaacagagatatagatcaatggaacagagcagagccctcagaaataatgccgcatatctacaactatctgatctttgacaaacctgagaaaaacaagcaatggggaaaggattccctatttaataaatggtgctgggaaaactggctagccatatgtggaaagctgaaactggatcccttccttacaccttttacaaaaattaattcaagatggattaaagacttaaatgttagacctaaaaccataaaaaccctagaagaaaacctaggcaataccattcaggacataggcatgggcaaggacttcatgtctaaaacaccaaaagcaatggcaacaaaagccaaaattgacaaatgggatctaatgaaactaaagagcttctgtacagcaaaagaaactaccatcagagtgaacaggcaacctacaaaatgggagaaaatttttgcaacctactcatctgacaaagggctaatatccagaatctacaatgaactcaaacaaatttacaagaaaaaaacaaccccatcaacaagtgggcgaaggatatgaacagacacttctcaaaagaagacatttatgcagccaaaaaaacacatgaaaaaatgctcatcatcactggccatcagagaaatgcaaatcaaaaccgcaatgagataccatctcacaccagttggaatggcgatcattaaaaagtcaggaaacaacaggtgctggagaggatgtggagaaataggaacacttttacactgttcttgggactgtaaactagttcaaccattgtggaagtcagtgtggcaattcctcagggatctagaactagaaataccatttgacccagacatcccattactggctatatacccaaaggattataaatcatgctgctataaagacacatgcacacgtatgtttatagtggcactattcacaatagcaaagacttggaaccaacctaaatgtccaagaacgatagactgtattaagaaaatgtggcacatatacaccatggaatactatgcagccataaaaaatgatgagttcatgtcctttgtagggacatggatgaaactggaaaccatcgttctcagcaaactattgcaaggaccaaaaaccaaacaccacatgttctcactcataggtgggaattgaacaatgagaacacatggacacaggaaggggaacatcacacactggggactgttgtggggtggggggaggggggagggatagcattaggagatatacctaatgctaaatgatgagttaatgggtgcagcacaccagcatggcacatgtatacatatgtaagaaacttgcacattgtgcacatgtaccctaaaacttaaagtataataataataaa

SEQ ID NO: 468 - DNA, 6018 bp, Homo sapiens
  source 1..6018: mol_type = other DNA
gaggaggagccaagatggccgaataggaacagctccggtctacagctcccagcctgagcaacgcaggagacgggtgatttctgcatttccatctgaggtaccgggctcatctcactagggagtgccagacagtgggcgcaggtcagtgggtgcacgcaccgtgcgcgagccgaagcagggtgaggcattgcctcactcgggaagtgcaaggggtcagggagttccctttcctagtcaaagaaaggggtgacgaacggcacctggaaaatcgggtcactcccacccgaatactgcgcttttctgacgggcttaaaaaacggcgcaccacaagattatatcccgcacctggctcggagggtcctacgcccatggagtctcactgattgctagcacagcagtctgagatcaaactgcaaggcggcagcgaggctaggggaggggcgcccgccattgcccaggcttgcttaggtaaacaaagcagccaggaagctcgaacttggtggaccccaccacagctcaaggaggcctgcctgcctctgtaggctccacctctgggggcagggcacagacaaacaaaaagacagcagtaacctctgcagactgaaatgtccctgtctgacagctttgaagagagcagtggttctcccagcacgcagctggagatctgagaacaggcagactgcctcctcaagtgggtccctgacccctgacccccgagcagcctaactgggaggcaccccccagcaggggcacactgacacctcacacggcagggtactccaacagacctgcagctgagggtcctgtctgttagaaggaaaactaacaaacagaaaggacatccacaccaaaaacccatctgtacatcaccatcatcaaagatcaaaagtagataaaaccacaaagatgggggaaaaacagaacagaaaaactggaaactctaaaaagcagaacgcctctcctcctccaaaggaacgcagttcctcaccagcaacggaacaaagctggatggagaatgactttgacgagctgagagaagaaggcttcagacgatcaaattactctgagctacgggaggacattcaaaccaaaggcaaagaagttgaaaactttgaaaaaagtttagaagaatgtataactagaataaccaatacagagaagtgcttaaaggagctgatggagctgaaagccaaggctcgagaactacgtgaagaatgcagaagcctcaggagctgatgcgatcaactggaagaaagggtatcagcaatggaagatgaaatgaatgaaatgaaaggagaagggaagtttagagaaaagagaataaaaagaaatgagcaaagcctccaagaaatatgggactatgtgaaaagaccaaatctacgtctgattggtgtacctgaaagtgatggggagaatggaaccaagttggaaaacactctgcaggatattatccaggagaacttccccaatctagcaaggcaggccaacgttcagattcaggaaatacagagaatgccacaaagatactcctcgagaagagcaactccaagacacataattgtcagattcaccaaagttgaaatgaaggaaaaaatgtgaagggcagccagagagaaaggtcgggttaccctcaaagggaagcccatcagactaacagcggatctctcggcagaaaccctacaagccagaagagagtgggggccaatattcaacattcttaaagaaaagaattttcaacccagaatttcatatccagccaaactaagcttcataagtgaaggagaaataaaatcctttacagacaagcaaatgctgagagattttgtcaccaccaggcctgccctaaaagagctcctgaaggaagcactaaacatggaaaggaacaaccagtaccaggcgctgcaaaatcatgccaaaatgtaaagaccatagagactaggaagaaactgcatcaactaaagagcaaaatcaccagctaacatcatcatgacaggatcaaattcacacataacaatattaactttaaatgtcaatggactaaatgctccagttaaaagacacagactggcaaattggataaagagtcaagacccatcagtgtgctgtattcaggaaacccatctcatgtgcagagacacacataggttcaaaataaaaggatggaggaagatctaccaagcaaatggaaaacagaaaaaggcaggggttgcaatcctagtctctgataaaacagactttaaaccaacaaagatcaaaagagacaaagaaggccattacataatggtaaagggatcaattcaacaagaagagctaactatcctaaatatatatgcacccagtacaggagcacccagatcataaagcaagtcctgagtgacctacaaagagacttagacacccacacattaataatgggagactttaacaccccactgtcaacattagacagatcaatgagacagaaagtcaacaaggatacccaggaattgaactcagctctgcaccaagcagacctaatagacatctacagaattctccaccccaaatcaacaggatatacatttttttcagcaccacaccacacctattccaaaattgaccacatacttggaaataaagctctcctcagcgaatgtaaaagaacagaaattataacaaactatctctcagaccacagtgcaataaaactagaactcaggattaagaaactcactcaaaaccgctcaactacatggaaactgaacaacctgctcctgaatgactactgggtacataacgaaatgaaggcagaaataaagatgttctttgaaaccaatgagaacaaagacacaacataccggaatctctgggacacattcaaagcagtgtatagagggaaatttatagcactaaatgcccacaagagaaagcaggaaagatccaaaattgacaccctaacatcacaattaaaagaactggaaaagcaagagcaaacacattcaaaagctagcagaaggcaagaaataactaaaatcagagcagaactgaaggaaatagagacagaaaaaacccttcaaaaaattaatgaatccaggagcatgttttttgaaagatcaacaaaatagatagaccactagcaagactaataaagagagaagaatcaaagagacgcaataaaaaatgataaaggggatatcaccgccgatcccacagaaatacaaactaccatcagagaatactacaaacacctctatgcaaataaactagaaaatctagaagaaatggataaattcctcgacacatacactctcccaagactaaaccaggaagaagttgaatctctgaatagaccaataacaggatctgaaattgtggcaataatcaatagcttaccaaccaaaaagagtccaggaccagatggattcacagccgaattctaccagaggtacaaggaggaactggtaccattccttctgaaactattccaatcaatagaaaaagagggaatcctccctaactcattttatgaggccagcatcattctgataccaaagctgggcagagacacaaccaaaaaagagaattttagaccaatatccttgatgaacattgatgcaaaaatcctcaataaaatactggcaaaccaaatccagcagcacatcaaaaagcttatccaccatgatcaagtgggcttcatccctgggatgcaaggctggttcaatatacgcaaatcaataaatgtaatccagcatataaacagagccaaagacaaaaaccacatgattatctcaatagatgcagaaaaggcctttgacaaaattcaacaacccttcatgctaaaaactctcaataaattaggtattgatgggacgtatttcaaaataataagagctatctatgacaaacccacagccaatatcatactgaatgggcaaaaactggaagcattccctttgaaaactgacacaagacagggatgccctgtctcaccactcctattcaacatagtgttggaagttctggccagggcaatttggcaggagaaagaaataaagggtattcaattaggaaaagaggaagtcaaattgtccctgtttgcagacgacatgattgtatatctagaaaaccccattgtctcagcccaaaatctccttaagctgataagcaacttcagcaaagtctcaggatacaaaatcaatgtacaaaaatcacaagcattcttatacaccaacaacatacaaacagagagccaaatcatgagtgaactcccattcacaattgcttcaaagagaataaaatacctaggaatccaacttacaagagatgtgaaggacctcttcaggaagaactacaaaccactgctcaaggaaataaaagaggatacaaacaaatggaagaacattccatgctcattggtaggaagaatcaatatcgtgaaaatggccatacttcccaaggtaatttgcagattcaatgccatccccatcaagctaccaatgcctttcttcacagaattggaaaaaactactttaaagttcatatggaaccaaaaaagagcccgcatagccaagtcattcctaagccaaaagaacaaagctggaggcatcacattacctgacttcaaactatactacaaggctacagtaaccaaaacagcatggtactggtaccaaaacagagatatagatcaatggaacagaacagagccctcagaaataacgccacatatctacaaccatctgatctttgacaaacctgacaaaaacaagcaatggggaaaggattccctatttaataaatggtgctgggaaaactggctagccatatgtagaaagctgaaactggatcccttccttacaccttttacaaaaatcaattcaagatggattaaagacttaaacgttagacctaaaaccataaaaaccctagaagaaaacctaggcaataccattcaggacataggcatgggcaaggacttcatgtctaaaacaccaaaagcaatggcaacaaaagccaaaattgacaaatgggatctaattaaactaaagggcttctgcacagcaaaagaaactaccatcagagtgaacaggcaacctacagaatgggagaaaattttcgcaacctactcatctgacaaagggctaatatccagaatctacaatgaactcaaacaaatttacaagaaaaaaacaaccccatcaaaaagtgggtgaaggatatgaacagacacttctcaaaagaagacatttatgcagccaaaagacacatgaaaaaatgctcatcatcactggccatcagagaaatgcaaatcaaaaccacagtgagatgccatctcacaccagttagaatggcaatcattaaaaagtcaggaaacaacaggtgctggagaggatgtggagaaataggaacacttttacactgttggtgggactgtaaactagttcaaccattgtggaagtcagtgtggcgattcctcagggatctagaactagaaataccatttgacccagccatcccattactgggtatatacccaaaggattataaatcatgctgctataaagacacatgcacacgtatgtttattgcggcattattcacaatagcaaagacttggaaccaacccaaatgtccaacaatgatagactggattaagaaaatgtggcacatatacaccatggaatactatgcagccataaaaaatgatgagttcatgtcctttgtagggacatggatgaaattggaaatcatcattctcagtaaactatcgcaagaacaaaaaaccaaacaccgcatattctcactcataggtaggaattgaacaatgagatcacatggacacaggaaggggaacatcacactctggggactgttgtgggatggggggaggggggagggatagcattgggaggtatacctaatgctagatgatgagttagtgggtgcagcgcaccaacatggcacatgtatacatatgtaactaacctgaacaatgtgcacatgtaccctaaaacttaaagtataataataaaagaaaaa

SEQ ID NO: 469 - DNA, 1878 bp, Homo sapiens
  source 1..1878: mol_type = other DNA
tccctctcccctctcccctctccccacggtctccctctccctctctttccatggtctccctctgatgctgagccaaagctggaccgtactgctgccatctcggctcactgcaacctccctgcctgattctcgtgcctcagcctgccgagtgcctgcgattgcaggcgtgcgccgccacgcctgactggttttcgtatttttttggtggagacggggtttcgctgtgttggccgggctggtctccagctcctgaccgcgagtgatccgccagcctcggcctcccgaggtgccgggatggcacacggagtcgcgttcactcagtgctcaatggtgcccaggctggagtgcagtggcgtgatcttggctcgctacaacctccacctcccagctgcctgccttggccccccaaagtgccgagattgcagcctctgcccggccgccatcccatctaggaagtgaggagcgtctctgccaggccgcccatcgtctgagatgtggggagcgcctctgccctgccgccccgtctgggatgtgaggagcgtctctgcccggccgccccgtctgagaagtgaggagaccctctgcctgacaaccgccccgtctgagaagtgaggagcccctccgcccggcagccacatcgtctgagaagtgaggagcccctccgcctggcagccaccccgtctgggaagtgaggagcgtctccgcccggcagccaccccgtccgggagggaggtggggggggttagctccccacccggccagccgccccgtccaggagggaggtgggggggtcatccccccacccggccagccgcccatccgggagggaggtgggggggtcagcccccggcccggccagccgccctgtccgggaggtgaggggcgcctctgcccggccgcccctactgggaagtgaggagcctctctgcccagtcagccgccccgtccgggaaggaggtgggggaggtcagccccccgcccggccagccgccccatccgggagggaggtaggggggtcagccccccgcccggccagccaccccgtccgggaggaaggtgggggggtcagccccccgcccggccagccgccccgtccgggagggaggtgggggggtcagccccccgcccggccagccgccccgtccaggaggtgaggggcgcctctgcccggccgcccctactgggaagtgaggagcccctctgcccggccagccgccccgtccgggagggaggtgggggggtcagccccccgcccggccagccgccccgtccaggaggtgaggggcgcctctgcccggccgcccctactgggaagtgaggagcccctctgcccgcccaccaccccgtctgggaggtgtactcaacagctcattgagaacggaccatgatgacagtggcggttttgtggaatagaaaggcgggaaaggtggggaaaagattgagaaatcggatggttgccgtgtctgtgtagaaagaggtagacatgggagacttttcattttgttctgtactaagaaaaattcttctgccttgggatcctgttgatctgtgaccttacccccaaccctgtgctctctgaaacatgtgctgtgtccactcagggttgaatggattaagggtggtgcaagatgtgctttgttaaacagatgcttgaaggcagcatgctcgttaagagtcatcaccactccctaatctcaagtacccagggacacaaacactgcggaaggccgcagggtcctctgcctaggaaaaccagagacctttgttcacttgtttatctgctgaccttccctccactattgtcctgtgaccctgccaaatccccctctgcaagaaacacccaagaatgatcaattaaaaaaaaaaaaacccaaaaaa

SEQ ID NO: 470 - DNA, 963 bp, Homo sapiens
  source 1..963: mol_type = other DNA
cagcccccggcccggccagccaccccgtccgggagggaggtggggaggtcagccccccgcccggccaggaggcgggggggtcagccccccgcccggccagccgccccgtccgggaggtaaggggcgcctctgcctggccgcccctactgggaagtgaggagcccctctgcccggccagccgccccctccgggagggaggtgggggggtcagcccccaacccggccagctgccccatccgggagatgaggggcgcctctgcccggccgcccctactgcgaagtgaggagcccctctgcccggccagccgccccatccgggagggaggtggggaggtcagccccccgcccggccagccgccccgtccgggaggtgaggggcgcctctgcccggccgcccctactgggaagtgaggagcccctctgcccggccaccaccccgtctgggaggtgtactcaacagctcattgagaacgggccatgatgacaatggcggttttgtggaatagaaagggggtaaaggtggggaaaagattgagaaatcggatggttgccatgtctgtgtagaaagaggtagacatgggagacttttcattttgttctgtactaagaaaaattcttctgccttgggatcctgttgatctgtgaccttacccccaaccctgtgctctctgaaacatgtgctgtgtccactcagggttgaatggattaagggtggtgcaagatgtgctttgttaaacaaatgcttgaaggcagcatgctcgttaagagtcatcaccactccctaatctcaagtacccagggacacaaacactgcggaaggccgcagggtcctctgcctaggaaaaccagagacctttgttcacttatctgctgaccttccctccgctattgtcctgtgaccctgccaaatccccctctgcgagaaacacccaagaatgatcaattaaaaaaaaaaaaaaaaaa

SEQ ID NO: 471 - DNA, 4918 bp, Homo sapiens
  source 1..4918: mol_type = other DNA
taaacaaagctgccaggaagttcgaactgggcggagcccaccgcagctccacaaagcctctgtagccacactgcctctctagattcctcctctctgggcagggcatctctgaaagaaaggcagcagccccagtcaggggcttatagataaaactcccatctccctgggacagaacacctggggaaaggggcggctgtgggcacagcttcagcagacttaaacattcctgcccattggctctaaagaaagcagaggatctctcagcacagcccttgagctctgctaagggacagactgcctcctcaagtgggtccctgacccccatgcctcctgactgggagacatctcccagcaggggtcgacagacatctcatacaggagagctccagctggcatcttgtgggtgcccctctgggggacgaagcttccagaggaaggaacaggcagcaatctttgctgtttggcagcctctgctagtgatacccaggcaaacagggtctggagtggacctccagcaaactccagcagacctgtatcagaggggcctgttagaaggaaaattaacaaatagaaaggaatagcataaacataaagaaaaaggacgtccacacggaaaccccatctgaaggtcactaacatgaaaaaccaaaggtagataaaaccacgaagatgaggaaaaaccagcacaaaaagggtgaaaattccaaaaagcagaacgcctcttctcctccaaaggatcacaactcctcaccagcaaggggacaaaactggatggagaatgagtctgatgaattgacagaagtaggcttcagaaggtgggtaataacaaattcctccgagctaaaggagcatgttctaacccaatgcaaagaagctaagaaccttgaaaaaaggttagaggaattgctaactagaataaccagtttagagaaaacataaatgacctgaaggagctgaaaaacacagcacaagaacttcgtgaagcatacaaagtatcaatagctgaatcagtgaagtgggtgaaaggatatcagagattgaagttcaacttaatgaaataaagtgtgaagacaagaatagagaaaaaagaataaaaaggaatgaagaaagcctccaagaaatatgggactttgtgaaaagaccaaacctatgtttgattggtgtacctgaaagtgacaaggagaatggaaccaagttggaaagcactcttcaggatattatccaggagaacttccccaacctaggaagacaggccaacatccaaattcaggaaatacagagaacaccacaaggatattccttgagaagggcaacccaaagacacataatagtcagatttgccaagtttgaaatgaaggaaaaaatattaagggcagccagagaaaggtcgggttaccacaaaaggaagctcatcagactaacagtggatctctctgcagaaacctaacaagctagaagagagtgggggccaatattcaacattcttatataaaagaatttttcaagccagaatttcatatccagccaaactaagcttcataagtgaaggagaaatgaaatcctttacagacaggcaaatgctgaaagatgttgtcaccatcaggcctgccttacaagagctcctcttgaaggaagcactaaatatgcaaaggaaaaacccataccagccactgcaaaaacataccaaattgtaaagatcatcaacactatgaagaaactgcatcaactaatgggcaaaataaccaggtagcatcataatgacaggatcaaattcacacataacaatattacccttaaatgtgaatgggctaaatgccccaattaaaagacacagactggcaaattggataaagagtcaagacccattggtgtgctgtattcaggagacccatctcaagtgcaaagacacacataggatcaaaataaagggatggagaaatatttaccaagcaaatggaaagcaaaagaaaaaaaaacaggagtttcaatcctagtctccgataagacagacgttaaatcaacaaagatcaaaaagacaaagaagggcattacataatggtaaagggatgaattcaacaagaagagctaactatcctaaatatatatgtacccaatacaggagcacccagatttataaagcaagttcttagagacctacaaagagacttagactcccacacaataatagtgggagactttaacaccccactgtcaataatagagcaacgagacagaaaattaacaaggatattcaggacttgaactcagttctggatcaagcggacctgatagacatctatggaactctccaccccagatcaacagaatatatattcttctcagtacaacattgcacttattctaaaattgaccacataaatggaaataaaacactcctcagcaatgcaaaagaatgtaaataataacaaacagtctctcagaccacagtgcaatcaaattagaactcaagattaagaaactcactcaaaaccacacaactacatggaaactgaataacctgctcctgaatgactactgggtaaataacaaaattaaggcagagataaataagttctttgaaaccaatgagaacaaagacacaacgtaccagaatttctgggacacatttaaagcagtgtttagaaggaaatttatagcactaaatgcccacaggagaaagcaggaaagatctaattaaaaaaactagagaagcaagagcaaacaatttcaaaatctagcagaagacaagaaataactaagatcagagcagaactgaaggagatagagatatgaaaaacctttcaaaaaatcagtgaatccaggagctgattttttgaaaagattaacaaaatagatagaccgctagccagactaataaagaagaaaagagagaagaatcaaatagatgcaataaaaaatgatacaggggagatcatctctgatcccacagaaatacaaactaccatcagagaatactataaacacctatatgcaaataaactgaaaatctagaagaaatggataaattcctggacacaacacaccctcccaagactaaaccaggaagaagttaaatacctgaatagaccaataacaagttctgaaatagaggcagtaattaatagcctaccaaccaataaagcctaggaccagacggattcacagccaacttctgccagaggtacaaagaggagctggtaccattacttctgaaactatttcaaacaatagaaaaagagggactcctccctaactcattttatgaggccagcatcatcctgatatcaaaacctggcagagacacaacaaaaaaagaaaatttcaggctgatatccctgatgaacatcaatgtgaaaattctccataaaatactggcaaaccaaatccagcagcctatcaaaaagcttatgcaccacgatcaagtcggcctcatccctgggatgcaaggctggtacagcatatgcaaatcaataaacataatccatcacataaacagaaccaataacgaaaaccacatgattatctcaatagatgcagaagaggccttcgataaaattcaacaccgcttcatgctaaaaactcaataaattagatattgatggaatgtatctaaaaataataagagccatttatgacaaatccacagccaatataataatgggcaaaagctggaagcattccatttgaaaactggcacaggacaaggatgccctctctcaccactcctattcaacatggtattggaagttctggccagggcaatcaggcaagagaagaaatgaatggtattcaaataggaagagaggaagtcaaattgtctctgtttgcagatgacatgattgtatatttaaaaaaccccattgtctcagcccaaaatttccttaagctgataagcaacttcagcaaagtctcaggatacaaaatcaatgtacaaaaatcacaagcagtcctatacaccaataatagacaaacaaagggccaaatcatgagtgaactcccattcacaattgctacaatgagaataaaatacctaggaatccaacttacaagggatgtgaaggacctcttcaaggagaactgcaaaccactactcaaggaaataagagaggacacaaatggataaacattccatgctcatgggtaggaagaatcaatattgtgaaaatggccatacttcccaaagtaatttatagattcagtgctatccttatcaagctaccattgattttctccacagaattagaaaaaactacgttaaatttcatatggaaccaaaaaagggcccgtatagccaagacaatcctaagcaaaaagaacaaagctggaggcattacgctacctgacttcgaactatactaaaaggctacagtaaccaaaacaccatggtactggtaccaaaacagatatatagaccaatggaacagaatagaggcctcaaaaataacaccacacatctacaaccatctgatctttgacaaacctgacaaaaacaaacaatggggaaaggattccctatttaataaatggtgttaggaatactggctagccatatgcaggaaactgaaactggaccccttccttatgccttatacaaaaattaactcaagatggattaaaggcttaaacctaagatctaaaactctaaaaaccctagaagaaactctgggcaataccattcaggacataggcacgggcaaggacttcttgactaacacatcaaaagcaatggcaacaaaagccaaaattgacaaatgggatcaaattaagctaaagagcttctgcacagcaaaagtaactatcatcagagtgaacaggcaacttacagaatgggagaaaattttggcaatttatccatgtgacaaaaggctaatgtccagaatctacaaggaacttaaacaaatttacaggaaaaaaacaa

SEQ ID NO: 472 - DNA, 6030 bp, Homo sapiens
  source 1..6030: mol_type = other DNA
ggaggaggagccaagatggccgaataggaacagctccggtctacagctaccagcgtgagcgacgcagaagacgggtgatttctgcatttccatctgaggtaccgggttcatctcactagggagtgccagacagtgggcgcaggccagtgtgtgtgcgcaccgtgcgcgagccgaagcagggcgaggcattgcctcacctgggaagcgcaaggggtcagggagttccctttccgagtcaaagaaaggggtgacggacgcacctggaaaatcgggtcactcccatccgaatattgcgcttttcagaccggcttaagaaacggcgcaccacgagactatatcccacacctggctcagagggtcctacgcccacggaatctcgctgattgctagcacagcagtctgagatcaaactgcaaggcggcaacgaggctgggggagggacgcccgccattgcccaggcttgcttaggtaaacaaagcagccgggaagctcgaactgggtggagcccaccacagctcaaggaggcctgcctgcctctgtaggctccacctctgggggcagggcacagacaaacaaaaagacagcagtaacctctgcagacttaagtgtccctgtctgacagctttgaagagagcagtggttctcccagcacgcagctggagatctgagaacgggcagactgcctcctcaagtgggtccctgacccctgacccccgagcagcctaactgggaggcaccccccagcaggggcacactgacacctcacacggcagggtattccaacagacctgcagctgagggtcctgtctgttagaaggaaaactaacaaacagaaaggacatctacaccgaaaacccatctgtacatcaccatcatcaaagaccaaaagtagataaaaccacaaagatggggaaaaaacagtacagaaaaactggaaactctaaaaatcagagcgcctctcctcctccaaaggaacgcagttcctcaccagcaacagaacaaagctggatggagaatgattttgacgagctgagagaagaaggcttcagacgatcaaattactctgagctacgggaggacattcaaaccaaaggcaaagaagttgaaaactttgaaaaaaatttagaagaatgtataactagaataaccaatacagagaagtgcttaaaggagctgatggagctgaaaaccaaggctcgagaactacgtgaagaatgcagaagcctcaggagccgatgcgatcaactggaagaaagggtatcagcaatggaagatgaaatgaatgaaatgaagggagaagggaagtttagagaaaaaagaataaaaagaaatgagcaaagcctccaagaaatatgggactatgtgaaaagaccaaatctacgtctgattggtgtacctgaaagtgatgtggagaatggaaccaagttggaaaacactctgcaggatattatccaggagaacttccccaatctagcaaggcaggccaacgttcagattcaggaaatacagagaacgccacaaagatactcctcgagaagagcaactccaagacacataattgtcagattcaccaaagttgaaatgaaggaaaaaatgttaagggcagccagagagaaaggtcgggttaccctcaaaggaaagcccatcagactaacagcggatctctcggcagaaaccctacaagccagaagagagtgggggccaatattcaacattcttaaagaaaagaattttcaacccagaatttcatatccagccaaactaagcttcataagtgaaggagaaataaaatactttatagacaagcaaatgctgagagattttgtcaccaccaggcctgccctaaaagagctcctgaaggaagcgctaaacatggaaaggaacaaccggtaccagccgctgcaaaatcatgccaaaatgtaaagaccatcgagactaggaagaaactgcatcaactaatgagcaaaatcaccagctaacatcataatgacaggatcaaattcacacataacaatattaactttaaatataaatggactaaattctgcaattaaaagacacagactggcaagttggataaagagtcaagacccatcagtgtgctgtattcaggaaacccatctcacgtgcagagacacacataggctcaaaataaaaggatggaggaagatctaccaagccaatggaaaacaaaaaaaggcaggggttgcaatcctagtctctgataaaacagactttaaaccaacaaagatcaaaagagacaaagaaggccattacataatggtaaagggatcaattcaacaagaggagctaactatcctaaatatttatgcacccaatacaggagcacccagattcataaagcaagtcctcagtgacctacaaagagacttagactcccacacattaataatgggagactttaacaccccactgtcaacattagacagatcaacgagacagaaagtcaacaaggatacccaggaattgaactcagctctgcaccaagcagacctaatagacatctacagaactctccaccccaaatcaacagaatatacatttttttcagcaccacaccacacctattccaaaattgaccacatagttggaagtaaagctctcctcagcaaatgtaaaagaacagaaattataacaaactatctctcagaccacagtgcaatcaaactagaactcaggattaagaatctcactcaaagccgctcaactacatggaaactgaacaacctgctcctgaatgactactgggtacataacgaaatgaaggcagaaataaagatgttctttgaaaccaacgagaacaaagacacaacataccagaatctctgggacgcattcaaagcagtgtgtagaggaaaatttatagcactgaatgcccacaagagaaagcaggaaagatccaaaattgacaccctaacatcacaattaaaagaactagaaaagcaagagcaaacacattcaaaagctagcagaaggcaagaaataactaaaatcagagcagaactgaaggaaatagagacacaaaaaacccttcaaaaaatcaatgaatccaggagctggttttttgaaaggatcaacaaaattgatagactgctagcaagactaataaagaaaaaaagagagaagaatcaaatagacacaataaaaaatgataaaggggatatcaccaccgatcccacagaaatacaaactaccatcagagaatactacaaacacctctacgcaaataaactagaaaatctagaagaaatggatacattcctcgacacatacactctcccaagactaaaccaggaagaagttgaatctctgaatagaccaataacaggctctgaaattgtggcaataatcaatagtttaccaaccaaaaagagtccaggaccagatggattcacagccgaattctaccagaggtacaaggaggaactggtaccattccttctgaaactattccaatcaatagaaaaagagggaatcctccctaactcattttatgaggccaccatcattctgataccaaagccgggcagagacacaatcaaaaaagagaattttagaccaatatccttgatgaacattgatgcaaaaatcctcaataaaatactggcaaaccgaatccagcagcacatcaaaaagcttatccaccatgatcaagtgggcttcatccctgggatgcaaggctggttcaatatacgcaaatcaataaatgtaatccagcatataaacagagccaaagacaaaaaccacatgattatctcaatagatgcagaaaaagcctttgacaaaattcaacaacccttcatgctaaaaactctcaataaattaggtattgatgggacgtatttcaaaataataagagctatctatgacaaacccacagccaatatcatactgaatgggcaaaaactggaagcattccctttgaaaactggcacaagacagggatgccctctctcaccgctcctattcaacatagtgttggaagttctggccagggcaatcaggcagaagaaggaaataaagggtattcaattaggaaaagaggaagtcaaattgtccctgtttgcagatgacatgattgtttatctagaaaacaccatcgtctcagcccaaaatctccttaagctgataagcaacttcagcaaagtctcaggatacaaaatcaatgtacaaaaatcacaagcattcttatacaccaacaacagacaaacagagagccaaatcatgggtgaactcccattcacaattgcttcaaagagaataaaatacctaggaatccaacttacaagggatgtgaaggacctcttcaaggagaactacaaaccactgctcaaggaaataaaagagaacacaaacaaatggaagaacattccatctcatgggtaggaagaatcaatatcatgaaaatggccatactgcccaaggtaatttacagattcaatgccatccccatcaagctaccaatgactttcttcacagaattggaaaaaactactttaaagttcatatggaaccaaaaaagagcccgcattgccaagtcaatcctaagccaaaagaacaaagctggaggcatcacactacctgacttcaaactatactacaaggctacagtaaccaaaacagcatggtactggtaccaaaacagagatatagatcaatggaacagaacagagccctcagaaataatgccacatatctacaactatctgatctttgacaaacctgagaaaaacaagcaatggggaaaggattccctatttaataaatggtgctgggaaaactggctagccatatgtagaaagctgaaactggatcccttccttacaccttatacaaaaatcaattcaagatggattaaagatttaaacgttaaacctaaaaccataaaaaccctagaagaaaacctaggcattaccattcaggacataggcgtgggcaaggacttcatgtccaaaacaccaaaagcaatggcaacaaaagacaaaattgacaaatgggatctaattaaactaaagagcttctgcacagcaaaagaaactaccatcagagtgaacaggcaacctacaacatgggagaaaattttcgcaacctactcatctgacaaagggctaatatccagaatctacaatgaactcaaacaaatttacaagaaaaaaacaaacaaccccatcaaaaagtgggcaaaggacatgaacagacacttctcaaaagaagacatttatgcagccaaaaaacacatgaagaaatgctcatcatcactggccatcagagaaatgcaaatcaaaaccactatgagatatcatctcacaccagttagaatggcaatcattaaaaagtcaggaaacaacaggtgctggagaggatgcggagaaataggaacacttttacactgttggtgggactgtaaactagttcaaccattgtggaagtcagtgtggcgattcctcagggatctagaactagaaataccatttgacccagccatcccattactgggtatatacccaaatgagtataaatcatgctgctataaagacacatgcacacgtatgtttattgcggcactattcacaatagcaaagacttggaaccaacccaaatgtccaacaatgatagactggattaagaaaatgtggcacatatacaccatggaatactatgcagccataaaatatgatgagttcatatcctttgtagggacatggatgaaattggaaaccatcattctcagtaaactatcacaagaacaaaaaaccaaacaccgcatattctcactcataggtgggaattgaacaatgagatcacatggacacaggaaggggaatatcacactctggggactgtggtggggtcgggggagggggaagggatagcattgggagatatacctaatgctagatgacacattagtgggtgcagcacaccagcatggcacatgtatacatatgtaactaacctgcacaatgtgcacatgtaccctaaaacttagagtataataaaaaaaaaaaa

SEQ ID NO: 473 - DNA, 529 bp, Homo sapiens
  source 1..529: mol_type = other DNA
gtgatggttaattttcgatgccagcttgactgagttaagggatacccagctggtaataactggtaaagcattattcctaagtatgtctgtgcagctgtttctggaagagattggcatttgaattagtggactcagtaaggaagatccaccctcccccatggataagcaacatccaattggctgagggcctggatagaacaaaagggcaagagaaagctgaatctgctcgctcttctggagctgagacactcatcttctcctgccctggcacatcaaaactccaggttctctgatctttgaacactgggacttaatccagcatccccttactgcctgaagttctcaggactttggacttggactgaacgatgctaccagcttccctggctttccagcttgtagatggcgtatcatggaatttctcagtctccaaagtaatgtgagccaattcctataataactctcttctctatctaatctattaatatttacatttcttattgtttttcatttacctggagaaccctaa

SEQ ID NO: 474 - DNA, 1247 bp, Homo sapiens
  source 1..1247: mol_type = other DNA
tggccagccgccccatccgggagggaggtgggggggtcagccccccgcccggccagccgccccgtccgggaggggggagggggggtcagccccctgcccggccagccgccccgcccgggagggaggtggggggggtcagccccccgcctggccagccgccccgtccgggagggaggtggggggatcagccccccgcctggccagtcgccccgtccgggaggtgaggggcgcctctgcccggccgcccctactggaaagtgaggagcccctctgcccggccagccgccccgtccgggagggaggcgggggggggggggtcggccagccgccccgtccgggagggaggtgggggggggtcagccccccttccggccggccgccccgtccgggaggtgaggggcgcctctgcccggccgcccctactgggaagtgaggacccctctgcccggccagccgccccgtccgggagggaggtgggggggacagcccccggcccagccagccgccctatccaggaggtgaggggcgcctctgcccggccgtccctactgggaagtgaggagcccctctgcctggccagccgccccgtccgggagggtggtgggggggtcagccccccgcccggccagccgccccatccgggaggtgaggggcgcttctgcccggccgcccctactgggaagtgaggagcccctctgcccggccacgaccccgtctgggaggtgtgcccagcggctcattggggatgggccatgatgacaatggcggttttgtggaatagaaaggcgggaagggtggggaaaaaattgagaaatcggatggttgccgggtctctgtggatagaagtagacatgggagacttttcattttgttctgtactaagaaaaattcttctgccttgggatcctgttgatctgtgaccttatccccaaccctgtgctctctgaaacatgtgctgtgtccactcagggttaaatggattaagggcggtgcaggatgtgctttgttgaacagatgcttgagggcagcatgctcgttgagagtcatcaccactccctagtcttaagtacccagggacacaaacactgcggaaggccaaggccgcagggtcctctgcctaggaaaaccagagacttttgttcacttgtttatctgctggccttccctccactattgtcctatgaccctgccaaatccccctctgcgagaaacacccaagaatgatcaataaaaaaaaaataaataaa

SEQ ID NO: 475 - DNA, 306 bp, Homo sapiens
  source 1..306: mol_type = other DNA
ggccgggcgccgtggctcacgcctataatcccagcactttgggaggccaaggcaggcagatcacgaggtcaggagatcgagaccatcgtggctaacacggtgaaaccccgtctccactaaaaaatacaaaaaaattgaccgggtgtagtggcgggcgcctgtagtcccagctacttcggaggctgaggcaggagaatggcgtgaacctgggaggtggagcttgcagtgagccgagattgcgccattgcactccagcctgggcgacagagcgagactccgtctcaaacaaaacaaaacaaaacaaaa

SEQ ID NO: 476 - DNA, 288 bp, Homo sapiens
  source 1..288: mol_type = other DNA
gccgggcacggtggctcacgcctgtaatcccagcactttgggaggcggaggcgggtggatcacttgcggtcaggagttcgagaccagcctggccaacgtggtgaaatcccgtttctactgaaaatacaaaaattagctgggcatggtggcgtgcctgtattcccagctacttgggaggctgaggcaggaaaatcacttgaacccaggaggtggaggttgcggtgagctgagatcccgccactgcattccagcgtgggtgacaaagcaagacgccttctccaaaaaaaa

SEQ ID NO: 477 - DNA, 4968 bp, Homo sapiens
  source 1..4968: mol_type = other DNA
gattttggtaccaggagtggttttagaggaacagaatttaaaggatggatttctttagttggttttggggtttctggagttggctgcttaatctgattagactcaaaaatgctaaggactctacttctaataggatggagagcactgatagttcttggcatgaactgtttaaagagttatgcaaaataaatgcattgatactcctgattcaatgctcttgagaaacaaggagtttagtgactgtatacgtaataccttcaactatatgtggagaatcaaggaatataataaagttggttggttgcttctaaattccctggacaaaatgatgaaagaaaatgatgagctcagggattctaattcccagctccagaagcccatactgagcctcagatcgtctaagattgccctgagtgagagtcttaactcctgaagacaaagggctaaattgtggaaaatcagacaaaagctcttatcatgcgagtggctgacctgcaatgaaaggtgcacgctcagcctcaccaggtatctattgttaaaatgaggacattgattggaaaagaatgggaccctacaacttggaatggggatgtgtgggaggaccctgatgagggatgaggctgggggcactgagctcctaaattctgatgagccttttttgccagaggtggtagcaatatcccttctcgcatccatactgccatcagcctttccacctttcaggagattaaccctgtactgcctgaggcagttgccaggcaagacaaagctgattctcctcaggacacatcctcaacactgctgtttgcttctagacctataattagactcaagtcccagcaggcccctagaggtaaggttcagggtgtgacccatgaagaagtgcactacactccaaaagaatggcttgagttttctaatttatgtaagcagaaatctggagaacaggtatgggaatggatattaagggtgtgggataatggtggaagaaacataaagttggatcgggctgaatttattgatatgggcccactaaacagggattcttcatttaatgttgcagcttggggagttaaaaaaagttctaatagtttatttgcttggttagctgaaacatggatcaaacgatggcccactgtgagtgagctggaaatgccagatgtcccttggtttaatgtagacgaagggatccaaaggcttagagagattgaaatgctagagtgaattcatcactttagacttactcattccaactgggcggatccagaagacatacccttcaccaataccttgcaaaacagatttgtgaggggagtacctgcatccttgaagtctgcaattgctcctctccgtatgccagatcttacagtgggaaccacagtcactcaattggaaaacttacattcaatgggaataattggatcccgaggtggcaggggccaagtagtggcactcaaccgtcaaagacaaggtgggcataattaccataatggacagcacagccaaagcagcaatcagaatagtatgactcatgtagacctctagcactggctaattaattacggtgtttctagaagtaaaattgataggaagcctacagcattgttacttaatttatataggcagaaaactttcaggtcgagtggacaaaagactaatttgtattataaaaatagcaaatcacagaccctcaatcagtttccagacttgaaccactttcagacgcagaactccttgaataaagaggaggctggatccccttgaagaaggaccccactatactaccaaaaatttgtactgttcatcttcttcccatccttctccaaggagaactctggctttttaccagggtaactatgcactggggaaaggggactgatgagaccttgcaggaactactggatattggctctgagctgacattgattcccggggatccaaaacatcattgtggtcctccagttgaagtaggggcttatggaggtcaggtaattaatggaattttagctcagttctgactcacagtggggccagtgggtccctggatgaatcttgtggtcattttcccagtgccagaatgcgtaataggcatagacatacttagcagctggcagaatccccacattggctccctgaccaatagggtgagggctattgtggtaggaaaggccaaaaagaagccattagagatgcctctacctagaaaaatagtaaatcaaaaacaatattgcagccctggggggattgcagagattagtgccaccatgaaggacttaaaagaaacagggatggtgattcccaccacatccccattcagctctctcatttggcctgtgcagaagataaatggatcttggacaatgacagtgaattatcctaggcttaaccaagtgttgactctaattgcagctgctgtaccatgtgtggtttcatagctcaagcaaattaacacatatcctggtacctggtatgcagacattaatttggcaaatgcctttttcttgattcctgtccataaggcccaccagaaacaatttgccttcagttggcaaagcaagcagtataccttcactgtcctacctcagggatatatcagctctccagctttatgtcataatcttgtttgcagaaatatcacttttccctttcacaaggtatcacactggccccttacattgataacataatgcttattggacccaatgagtgagaaaaagcaaagacactggactcattggtgagatatttgcatgcgaggggatgggaaataaaccccattaaaattcagggaccttctacttcagtgaaattcctagaggtccagtgctatggggcctgtggagatattccttctaaggtgaaagataagttgttgcatttggccactcctacaaccaagaaaaaggcacaatgcttagagggcctatttggattttggagacaacgcattcctcatttgggtgtgttactctggcccatctgtcgagtaactcgaaaggctgccagttttgagtgtgggtctagaataggagaaggctctgcaacaggtccaggctgctgtgcaagcttctctgccatttgggccatatgacccagcagatccaattatgcttaaggcgtcagtggcagataagatgttgttaggagcctttggcgggctcccataggtgaatcacagtagagacccctaggattttggagcaaagccctgctatcttccgcagataactactttcattttgagagaaagctcttggcctgtaagtgggctttagtagaaactgaacgtttgactgtgggtcatcaagttagcatgcaacctgaaatgcctatcatgaactgggtgctttctgacccatctagccataaagttgggcatgcacagaagcatttcatcatcaaatggaagtggtatatacatgatggggcgcaagcagatcctgaaggcacaagttacatgaggaagtggctcaaatgaccatggcccccactcctgccatcctgccttctctcccccagcctgcatcgatggcctcatgagaagttccctatgatcagttggcagaggaaaagaagactagggcctggtttacagatggttttgcatgatatacagacaccaccccaaaatggacagctgtagcaccatagcccctttcttggtatccctgaaggatgctggtgaagggaaatctccccagtatgcagaactttgagcaatgcacctggctgtacactttgcttggaaggagaaatggccagatgtatgataatatagtgattcatgggctgtagcgagtggtttgggtagatggtcagggacttggaagaagcatgattggaaaattgatgacaaagaaatttggagaagaggtatgtggatggacctctatgattggtcaaaaactgaagatatatgtatctcatgtgaatgctcaccaaaggttgacctcaggagaggaggattttaataataagtgaataggatgactcattctgtgaacaccactcaaccttcttccccagacacccctgtcatcacccaatgggctcatgaacaaagttgccatcatggcagggatgaaggttacacatgggctcagcatcatggacttccactcaccaaggctgacctggctacagccactgctgagtgcccaatgtgtcagcagcagagaccaacactgaaccctcgatatggcaccattccttggagtggttagacaactatttggtggcaggttgattacattggactgcctccgtcatggaaagggcagtgatttatcctcattggaatagacatgtactctggatctgggtttgcctatctgcaaacaaaatgcctctgccaagactaccatctgtggacttgcagaatgtcttatccaccataattgtattttacacaacattgcctctaaccaaggcactcactttgtggctaaagaagtgcaacagtgggctcatgctcatggaattcactggtcttaccgtgttccccatcatcctgaagcagctggattgatagagtggtgggattgccttttgaagtcataattacgccaattaggtgacaatactttacagagctggggcaaagttcttcagaagctatgtatgctctgaatcagcatccaatatatggcacagtttctctcatagccaggattcacgagtccaggcatcaaagggtggaagtggaagtggcaccactcaccatcacccctagtgatccactagcaaaatttttgcttcctgttcccatgacattacgttctgctggtctacagatcttagttccagagggagaaatgctgccaccaggagatacaagaagtattctattaaactggaggttaggattgccacctggttactctgggctcctcctacctctaagtcaacaggctaacaagagttatagtgttggctggggtgattgacttaaactatcaagatgaaatc

SEQ ID NO: 478 - DNA, 3096 bp, Homo sapiens
  source 1..3096: mol_type = other DNA
aggttggtagactaaaaagctacagaaatctgttcctccactgagaaaactattgaactgtcaaaaactgtctgaagtaactattttggaattctcgagtctagttaaacactggaagcatcaagggaagagtttgataaagaggatgataaattttggttaatgttggtgaatttcagcctttccactcaataataactattttccataccccattattgcagggatccatgggaactgctgcccatgttcttgtaatgaattcctgcagccagggtgaacaataagcacctttttgtccaaatgtcagggttattgctgatttctgcctttgaatgctgaggggcagacacagaagtgggctatcattgcatcagtcctcatcagctgaagtggcttcccaaggatttaaataaatagtatgtgtttttcctccctttaggaagcagtcatttaagacaatttttattagataactggctgacagcagagataacagaacagagatttcaatgaccatgcacaacagagaataaaaatagttgggaaaaaatcatgaccaaatgactctgagccacaacaaccaagatttgacaatccctgaagagcaaaataattaagttaccagagttaccacaacatagtattcataatgtccagttctcaaaaaaaaattacaaaacatgcaaagaaaagtatggttcattcacaggaagaaaaagtaatctgacagaaactatccctgaagaggctcagatattaaaaatatgagtcaaaaatgttaaatcagctgtcttaagtataaccaatgagttaaaggaaactagacaaaaagctaaaggaaaccgaaaacataataaatgaacaaaattagaatatcaatataaaggtagaaattgtaaaaaagaaccaagcaaaaattccagagctgaaaagtacaatgactgaaatttaaaaataattttaaaaactcaatgaagaagttcaacagcagatttgagaagtaagagatcagaaaacttgaaaataagataattgaaacaatccagactaagaaaaacaaagaaaaagaatgaagataaataaattctaaggaacctgtaggacatcagcaaacatactaacatatgtactgtagaaatccaggaaagagaagagaaagagaagcagagaaatacacttaaagaaataatgaacaaaactttccaaaatctgaggaaatacataaatatatacatccaagaggctcaatgaactccaaaagggtaaacttaaagagatctacattgagacaaaatatagtcaagttgacaaaatccacagagagaattttgaaagcagccagaatgaagcaactcatcatttacataagaccctgaataaaattaatagctgattttctctgagaaaccatggagatcagaaggtagtggaatggcatatttaaatgtctgaaagaaaaaataaaactgccaaccatgaattctatgtatagcaaagttgtccttcaagaatgaaggaaaaagtaacacattttcagataaccaataattaagggattttattaccagtagacatgtgctacagaaaatgctaaaggaaaccttttaggctgaactgaaagtacactagacagcaattcagagcctccaaaataaagaatattcataaaagtaacaatagaggtaaatataaaacccagaattactacatgtgtcatatagtttataacttctcctatttatagctttctatatttatatttatctataacttcataggcaaatgaataaaaattataaatatgatagtggtcatataatgtataaagatgcaatctgtgacagtcttatgaagcagggatgaagacatataggatcaaaatgtttgcatagttattgaagctatgttgatattatgaaattatattgttacaagtttaagatgctaattataattctcaaggtaaccactaataaaattaccaaaattatgcagaaaaggaaaaaagaaaaacaatacactataaaaaaccaattaaatacaaaaaaagtcagtaacagacaacttgagaaacaaagacatataagatatagagaaaacaaatgattaaatggcaaaagtaaatcttgttttagtaatcacattaaatagaaaaggatgaagccatcctattaaagggctgagactgacaagttggctaaaaactaaaataaattaaaaagaaaaacaagactcatctacatgctgtctataagagacttgccttagatataaggacacaaagaagttgaaagtaaaaggactgaaaaagatattccatacaaacagtagtaaccaagatagtgccgagtggctatatttttgtcaaacaaaataaactaaagtaaaatttacaagagaaaaagaagggcattatgcattgacaaaaattttgacatagccaaataattatgttataaaatatatgtacttaataatacagcctcaaaatatatgaagcaataattgctataatttaagggagaaaagaacagttctatgaaaagttagagaatgaaatattccactttcaacatgagattaaacaactagacataagatcaataaggaaatagaaaatttgaacaacactataaaccaattatccctaacaggcatatacagaagaatctacccaacaagagcagaatattaattcttctcaaatgcacatggaacattcttaaaccatatgttaggccacaaaacaagtgttagtaagtgtgaaaatttgaagtcataaaaagtatcttttgcaattacaatggaatgaagctagaaatcaataactagaaaaaccagaaaagtcacgcatatgtagaaatttaaaaacccgctcttcaacagccattggtcaaagaagaaatcacaagggacattagaaaataccttgagacaaatgaagtaaaaatacaaatagcacgtttatggtatacactgaacatagttctaagagggaaatttatagctgtgagcagttaactaaaaaagaagaaagatctcaaatccatagcctaactgtacactgtaaggaactaaaaaaagtaaaacaaa

SEQ ID NO: 479 - DNA, 4371 bp, Homo sapiens
  source 1..4371: mol_type = other DNA
gtggctagcaagatggccgaataggaacaactctgatctgcagctcccagcgagatcagtgcagaaggcaggtgttttctgcatttccaactgaggtacccagctcatctcattgggactggttagacagtgggtgcagcccatggagggtgagccaaagcaggatggggtgtcacttcacctgggaagtgcaaggggtccgggtactcctccccctcaccaagggaagccttgagggactgtgccatgagtaatggtgcactccaacccggatactacgcttttcccattgtctgtgcaacccacagaccaggagattcccttaggtgcctacaccactggggccctgagttttaagcacaaaactgggcagctgtttgggcagacactgagctagctgcaggagtttttttttcataccctagtggcatctggaacaccagcgagacagaaccattcactcccctggaaagggggatgaagccagggagacaaatggtctagctcagcagatccaactcccatggagcccagcaagctaagatccactggcttgaaattctcactgccagcacagcagtgtgaagtccacctgggacactcaagcatggtgaggggaggggcgtctgccattactgaggattgagtaggtggttttcccctcacagtgtaaacaaagccacctggaagttcaaactgggtggatcccgccacagcttggcaaagccactgtagccagactgcctttctagattcctcctctctggggagggcatccctgaaagaaagggaaagaaaggcagcagccccagtgaggggcttatagataaactcccatctccctggaacagagcacttcagggaaggggtggctgtgggtgcagcttcagcagacttaaacgttcctgcctgccagttctgaagaaagcagcagatctcccagcaaagcactcgagctctgctaagggacagactgcctcctcaagtgggtcgctgaccccccagcctcccgattgggagacacctcccagcaggggtcgccagacacctcatacaggagagctctggctggcatctggtgggtgcccctttgggacgaagcttccagaggaaggaacaggcagcagtctttgctgttctgcagcctctgccaatgatacccaggcaaacagggtctggagtggacctccaacaaactccagcagacctgaagcaaagggcctgactgtttgtaggaaaactaacacacagaaaggaatagcatcaacaaaaagggcatctacacaaaaaccccatccaaaggtcaccagcatcaaagactaaaggtagataaatccacaaagatgaggaaaaaccagtgcaaaaaggctgaaaattccaaaaaccagaacatctcttctcctccaaaggatcacaactccttgccagcaagagaacaaaactggcagagaatgagtttgacaaattgacagaagtaggcttcagaaggtgggtaataacaaacgtcaccaagctaaaggagcatgttctaacccaatgcaaggaagctaagaatcttgaaaaaaggttagaggaattgctgactagaataaccagtttagagaagaacataaatgacctgatggagctgaaaaacacagcacaagaacttcatgaagcatacacaagtatcaatagctgaatcaatcaggcagaagaaaggatatcagagattgaaaatcaacttaatgaaataaagcgtgaagacaagattagagaaaaaagaatgaaaaggaacaaacaaagcctgcaagaaatatgagactatgtgaaaagaccaaacctacattttattggtgtccctgaaagtgacggggagaatggaaccaagttggaaaacactcttcaggatattatccaggaaaactttcccaacctagcaagagaggccaacattcaaattcaggaaatacagagaacaccacaaagatactcctcaagacgagcaaccccaagacacataatcttcagattcacaaaggttgaaataaaggaaaaaatgttaagggcagccagagagaaaggtcaggttacccacaaagggaaacccatcggactaacagtggatctctctgcagaaaccctacaagccagaagagagtgggggccagtattccacattcttaaagaaaagaattttcaacccagaatttcatatccagccaaactaagcttcataagtgacggagaaataaactcctttacagacaagcaaatgctgagagattttgtcaccaccaggcctgccttacaagagctcctgaaggaagcactgaatatggaaaggaaaaactggtaccaggcactacaaaaacataccaaattgtaaagaccattgacactatgaagaaactgcatcaacaggcaaaataaccagctagcatcataatgacaggatcaaattcacatataacaatattaaccttaaatgtaaatgggctaaatacaccaattagactggcaaattggataaagagtcaagacccatcagtgtgcagtattcaggagatccatctcacgtgcaaagacacacataggctcaaaataaagggatggaggaatatttactaagcaaatggaaagcaaaaaaaagcaggggttgcaatcctagtctctgataaaagactttaaagcaacaaagattgcaaaagacaagggaattacataatggtataagggatcaatgcaacaagaggaatggaagggctaactatcctaaatatttatgcacccaatacaggagcacccagatttacaaagcaagttcttagagacctacacaaagagacctggactcccacacaataatagtgggagactttaacaccccactgtcaatattagacagatcaacgagacagaaaattaacaaggatattcaggaccaaactcagctctggatcaattggacctaatagacatctacagaactctccacccctaatcaacagaatgtacattcttctcagcaccacatcgcacttactctaaaattgaccacatatttggaagtaaaatgctcctcagcaaatgcaaaagaatggaaatcataacagtctctcagaccacagtgcaatcaaattagaactcaggattgagaaactcactcaaagccgcacaactacatggaaactgaacaacctcctgaatgactactgggtaaataacaaaattaaggcagaaataaataagttatttgaaaccaaagagaacaaagacacaatgtaccagaatctctgggatacagctaaagtagcatttagaaggaagtttatagcactaaatgcccacaggagaaagtggaaaagatctaaaattgacaccctaacatcacaattaaaagaactagagaagcaagggcaaacaaattcaaaagctagcagaagacaggaaacaactaagatcagagcagaactgaaggagatagagacaccaaaaaaccctttaaaaatcaattaatccaggagctgttttttttaaaagattaacaaaatagatagatcgctagctagactaataaagatgaaaagagaaaagaatcaaatggaaacaataaaaaaatgataaaggggatatcaccactgatcccacagaaatacaaactaccatcagagaatactataaacacctctatgcaaataaattagaaaatctagaagaaattgataaattcctggacacatacaccctccctagactaaaccaggaagaagttaaatccctgaatagaccaataacaagttctgaaattgaggcaataattaatagcctaccaaccaaaaaaagctcaggaccagatggattcacagccgaattctaccagaggtacaaagaggagctggtaccattccttctgaaattattccaatcaatagaaaaagagggactcctctctaactcattttatgaggtcagcatcatcctgatatcaaaacctggcagagacacaacaaaaaaagaaaatttcaggccaatatccctgatgaacatcaatgcgaaaatcctcaataaaatactggcaaactgaatccagcagcacatcaaaaagcttatccaccacaatcaagtcggcttcatccctaggatgcaaggctggttcaatatactcaaaacaataaatgtaatccatcacataaacagaaccaatgacaaaaaccacatgattatctcagtagatgcagaaaagacctttgacaaaattcaccccgtcatgctaaaaactctcaataaactaggtattgattgaatgtatctggaaataataagagctatttatgacaaacccacagctaatatcatagtgaatgggcaaaagctggaagcattcccatt

SEQ ID NO: 480 - DNA, 5999 bp, Homo sapiens
  source 1..5999: mol_type = other DNA
agctccggtctacagctcccagcgtgagcgacgcagaagacggtgatttctgcatttccatctgaggtaccgggttcatctcactagggagtgccagacagtgggcgcaggccagtgtgtgtgcgcaccgtgcgcgagccgaagcagggcgaggcattgcctcacctgggaagcgcaaggggtcagggagttccctttccgagtcaaagaaaggggtgacggacgcacctggaaaatcgggtcactcccacccgaatattgcgcttttcagaccggcttaagaaacggcgcaccacgagactatatcccacacctggctcggagggtcctacgcccacggaatctcgctgattgctagcacagcagtctgagatcaaactgcaaggcggcaacgaggctgggggaggggcgcccgccattgcccaggcttgcttaggtaaacaaagcagccgggaagctcgaactgggtggagcccaccacagctcaaggaggcctgcctgcctctgtaggctccacctctgggggcagggcacagacaaacaaaaagacagcagtaacctctgcagacttaagtgtccctgtctgacagctttgaagagagcagtggttctcccaggacgcagctggagatctgagaacgggcagactgcctcctcaagtgggtccctgactcctgacccccgagcagcctaactgggaggcaccccccagcaggggcacactgacacctcacacggcagggtattccaacagacctgcagctgagggtcctgtctgttagaaggaaaactaacaaccagaaaggacatctacaccgaaaacccatctgtacatcaccatcatcaaagaccaaaagtagataaaaccacaaagatggggaaaaaacagaacagaaaaactggaaactctaaaacgcagagcgcctctcctcctccaaaggaacgcagttcctcaccagcaacagaacaaagctggatggagaatgattttgacgagctgagagaagaaggcttcagacgatcaaattactctgagctacgggaggacattcaaaccaaaggcaaagaagttgaaaactttgaaaaaaatttagaagaatgtataactagaataaccaatacagagaagtgcttaaaggagctgatggagctgaaaaccaaggctcgagaactacgtgaagaatgcagaagcctcaggagccgatgcgatcaactggaagaaagggtatcagcaatggaagatgaaatgaatgaaatgaagcgagaagggaagtttagagaaaaaagaataaaaagaaatgagcaaagcctccaagaaatatgggactatgtgaaaagaccaaatctacgtctgattggtgtacctgaaagtgatgtggagaatggaaccaagttggaaaacactctgcaggatattatccaggagaacttccccaatctagcaaggcaggccaacgttcagattcaggaaatacagagaacgccacaaagatactcctcgagaagagcaactccaagacacataattgtcagattcaccaaagttgaaatgaaggaaaaaatgttaagggcagccagagagaaaggtcgggttaccctcaaaggaaagcccatcagactaacagcggatctctcggcagaaaccctacaagccagaagagagtgggggccaatattcaacattcttaaagaaaagaattttcaacccagaatttcatatccagccaaattaagcttcataagtgaaggagaaataaaatactttatagacaagcaaatgttgagagattttgtcaccaccaggcctgccctaaaagagctcctgaaggaagcgctaaacatggaaaggaacaaccggtaccagccgctgcaaaatcatgccaaaatgtaaagaccatcgagactaggaagaaactgcatcaactaatgagcaaaatcaccagctaacatcataatgacaggatcaaattcacacataacaatattaactttaaatataaatggactaaattctgcaattaaaagacacagactggcaagttggataaagagtcaagacccatcagtgtgctgtattcaggaaacccatctcacgtgcagagacacacataggctcaaaataaaaggatggaggaagatctaccaagccaatggaaaacaaaaaaaggcaggggttgcaatcctagtctctgacaaaacagactttaaaccaacaaagatcaaaagagacaaagaaggccattacataatggtaaagggatcaattcaacaagaggagctaactatcctaaatatttatgcacccaatacaggagcacccagattcataaagcaagtcctcagtgacctacaaagagacttagactcccacacattaataatgggagactttaacaccccactgtcaacattagacagatcaacgagacagaaagtcaacaaggatacccaggaattgaactcagctctgcaccaagcagacctaatagacatctacagaactctccaccccaaatcaacagaatatacatttttttcagcaccacaccacacctattccaaaattgaccacatagttggaagtaaagctctcctcagcaaatgtaaaagaacagaaattataacaaactatctctcagaccacagtgcaatcaaactagaactcaggattaagaatctcactcaaagccgctcaactacatggaaactgaacaacctgctcctgaatgactactgggtacataacgaaatgaaggcagaaataaagatgttctttgaaaccaacgagaacaaagacaccacataccagaatctctgggacgcattcaaagcagtgtgtagagggaaatttatagcactaaatgcctacaagagaaagcaggaaagatccaaaattgacaccctaacatcacaattaaaagaactagaaaagcaagagcaaacacattcaaaagctagcagaaggcaagaaataactaaaatcagagcagaactgaaggaaatagagacacaaaaaacccttcaaaaaatcaatgaatccaggagctggttttttgaaaggatcaacaaaattgatagaccgctagcaagactaataaagaaaaagagagagaagaatcaaatagacacaataaaaaatgataaaggggatatcaccaccgatcccacagaaatacaaactaccatcagagaatactacaaacacctctacgcaaataaactagaaaatctagaagaaatggatacattcctcgacacatacactctcccaagactaaaccaggaagaagttgaatctctgaatagaccaataacaggctctgaaattgtggcaataatcaatagtttaccaaccaaaaagagtccaggaccagatggattcacagccgaattctaccagaggtacatggaggaactggtaccattccttctgaaactattccaatcaatagaaaaagagggaatcctccctaactcattttatgaggccagcatcattctgataccaaagccgggcagagacacaaccaaaaaagagaattttagaccaatatccttgatgaacattgatgcaaaaatcctcaataaaatactggcaaaccgaatccagcagcacatcaaaaagcttatccaccatgatcaagtgggcttcatccctgggatgcaaggctggttcaatatacgcaaatcaataaatgtaatccagcatataaacagagccaaagacaaaaaccacatgattatctcaatagatgcagaaaaagcctttgacaaaattcaacaacccttcatgctaaaaactctcaataaattaggtattgatgggacgtatttcaaaataataagagctatctatgacaaacccacagccaatatcatactgaatgggcaaaaactggaagcattccctttgaaaaccggcacaagacagggatgccctctctcaccactcctattcaacatagtgttggaagttctggccagggcaatcaggcaggagaaggaaataaagggtattcaattaggaaaagaggaagtcaaattgtccctgtttgcagacgacatgattgtttatctagaaaaccccatcgtctcagcccaaaatctccttaagctgataagcaacttcagcaaagtctcaggatacaaaatcaatgtacaaaaatcacaagcattcttatacaccaacaacagacaaacagagagccagatcatgggtgaactcccattcacaattgcttcaaagagaataaaatacctaggaatccagcttacaagggatgtgaaggacctcttcaaggagaactacaaaccactgctcaaggaaataaaagaggagacaaacaaatggaagaacattccatgctcatgggtaggaagaatcaatatcgtgaaaatggccatactgcccaaggtaatttacagattcaatgccatccccatcaagctaccaatgactttcttcacagaattggaaaaaactactttaaagttcatatggaaccaaaaaagagcccgcatcgccaagtcaatcctaagccaaaagaacaaagctggaggcatcacactacctgacttcaaactatactacaaggctacagtaaccaaaacagcatggtactggtaccaaaacagagatatagatcaatggaacagaacagagccctcagaaataatgccgcatatctacaactatctgatctttgacaaacctgagaaaaacaagcaatggggaaaggattccctatttaataaatggtgctgggaaaactggctagccatatgtagaaagctgaaactggatcccttccttacaccttatacaaaaatcaattcaagatggattaaagatttaaacgttaaacctaaaaccataaaaaccctagaagaaaacctaggcattaccattcaggacataggcgtgggcaaggacttcatgtccaaaacaccaaaagcaatggcaacaaaagacaaaattgacaaatgggatctaattaaactaaagagcttctgcacagcaaaagaaactaccatcagagtgaacaggcaacctacaacatgggagaaaatttttgcaacctactcatctgacaaagggctaatatccagaatctacaatgaactcaaacaaatttacaagaaaaaaacaaacaaccccatcaaaaagtgggtgaaggacatgaacagacacttctcaaaagaagacatttatgcagccaaaaaacacatgaagaaatgctcatcatcactggccatcagagaaatgcaaatcaaaaccactatgagatatcatctcacaccagttagaatggcaatcattaaaaagtcaggaaacaacaggtgctggagaggatgcggagaaataggaacacttttacactgttggtgggactgtaaactagttcaaccattgtggaagtcagtgtggcgattcctcagggatctagaactagaaataccatttgacccagccatcccattactgggtatatacccaaatgagtataaatcatgctgctataaagacacatgcacacgtatgtttattgcggcactattcacaatagcaaagacttggaaccaacccaaatgtccaacaatgatagactggattaagaaaatgtggcacatatacaccatggaatactatgcagccataaaaaatgatgagttcatatcctttgtagggacatggatgaaattggaaaccatcattctcagtaaactatcgcaagaacaaaaaaccaaacaccgcatattctcactcataggtgggaattgaacaatgagatcacatggacacaggaaggggaatatcacactctggggactgtggtggggtcgggggaggggggagggatagcattgggagatatacctaatgctagatgacacattagtgggtgcagcgcaccagcatggcacatgtatacatatgtaactaacctgcacaatgtgcacatgtaccctaaaacttagagtataataaaaaaaaaaaa

SEQ ID NO: 481 - DNA, 815 bp, Homo sapiens
  source 1..815: mol_type = other DNA
tgtgatattatgaaatatatatttggttttcatcacccatttgctgacataccaatcctaaaatctttggaacgtccaaattgctatctttttgtaggctaacgtataccgacagcttcaagatgggactggtcaccagaaaggcaaaggcatgattagagagttgggactttcagtcccaccccccaatctcctgggaggggaaagcagctgaaagtcaagttgatcatcagtggccaatggtttaatcaatcgtggctatataatgaagccttcataaaccccaagagagcaggcttcagagagctttagaatatctgaacatgtggagttcctggagggcatggaagctccacaccccttctctcatacctcaccctacacatctcttcatctgtatctttgtaatatcctttataataaactggtaaatgtgagaaagtatttccctgagttctgagagccactctagcaaattaaataaacccacagaggaggttgtaagaaccccgacgtgaagctcatcagtcagaagttctggacgcctggacttaatgactggtgtctggtgtatggggtggtagggcagtcttggggactgagccctcaaactgtgggaattggcactatctccaggtagacagtgttaaaattgaattaaaggacacccatttggtgtccactgcagaactgattgattgcttggtgggtaggagaactctccctgctccacacttttggtcacggaagttgtcttctgtgttgatgattattgcagtgtgagaacagaggggaaaatagctcagttttttcct

SEQ ID NO: 482 - DNA, 6031 bp, Homo sapiens
  source 1..6031: mol_type = other DNA
ggaggaggagccaagatggccgaataggaacagctccggtctacagctcccagcgtgagcgacgcagaagacgggtgattactgcatttccatctgaggtaccgggttcatctcactagggagtgccagacagtgggcgcaggccagtgtgtgtgcgcaccgtgcgcgagccaaagcagggcgaggcattgcctcacctgggaagcgcaaggggtcagggagttccctttctgagtcaaagaaaggggtgatggacgcacctggaaaatcgggtcactcccacccgaatattgcgcttttcagaccggcttaagaaacggcgcaccacgagactatatcccacacctggctcagagggtcctacgcccacggagtctcgctgattgctagcacagcagtctgagatcaaactgcaaggcggcaacgaggctgggggaggggcgcccgccattgcccaggcttgcttaggtaaacaaagcagccgggaagctcgaactgggtggagcccaccacagctcaaggaggcctgcctgcctctgtaggctccacctctgggggcagggcacagacaaacaaaaagacagcagtaacctctgcagacttaagtgtccctgtctgacagctttgaagagagcagtggttctcccagcacgcagctggagatctgagaacgggcagactgcctcctcaagtgggtccctgacccctgacccccgagcagcctaactgggaggcaccccccagcaggggcacactgacacctcacacggcagggtattccaacagacctgcagctgagggtcctgtctgttagaaggaaaactaacaaccagaaaggacatctacaccgaaaacccatctgtacatcaccatcatcaaagaccaaaagtagataaaaccacaaagatggggaaaaaacagaacagaaaaactggaaactctaaaacgcagagcgcctctcctcctccaaaggaacgcagttcctcaccagcaacagaacaaagctggatggagaatgattttgacgagctgagagaagaaggcttcagatgatcaaattactctgagctacgggaggacattcaaaccaaaggcaaagaagttgaaaactttgaaaaaaatttagaagaatgtataactagaataaccaatacagagaagtgcttaaaggagctgatggagctgaaaaccaaggctcgagaactacgtgaagaatgcagaagcctcaggagccgatgcgatcaactggaagaaagggtatcagcaatggaagatgaaatgaatgaaatgaagcgagaagggaagtttagagaaaaaagaataaaaagaaatgagcaaagcctccaagaaatatgggactatgtgaaaagaccaaatctacgtctgattggtgtacctgaaagtgatgtggagaatggaaccaagttggaaaacactctgcaggatattatccaggagaacttccccaatctagcaaggcaggccaacgttcagattcaggaaatacagagaacaccacaaagatactcctcgagaagagcaactccaagacacataattgtcagattcaccaaagttgaaatgaaggaaaaaatgttaagggcagccagagagaaaggtcgggttaccctcaaaggaaagcccatcagactaacagcagatctctcggcagaaaccctacaagccagaagagagtgggggccaatattcaacattcttaaagaaaagaattttcaacccagaatttcatatccagccaaactaagcttcataagtgaaggagaaataaaatactttatagacaagcaaatgctgagagattttgtcaccaccaggcctgccctaaaagagctcctgaaggaagcgctaaacatggaaaggaacaaccggtaccagccgctgcaaaatcatgccaaaatgtaaagaccatcgagactaggaagaaactgcatcaactaatgagcaaaatcaccagctaacatcataatgacaggatcaaattcacacataacaatattaactttaaatataaatggactaaattctgcaattaaaagacacagactggcaagttggataaagagtcaagacccatcagtgtgctgtattcaggaaacgcatctcacgtgcagagacacacataggctcaaaataaaaggatggaggaagatctaccaagccaatggaaaacaaaaaaaggcaggggttgcaatcctagtctctgataaaacagactttaaaccaacaaagatcaaaagagacaaagaaggccattacataatggtaaagggatcaattcaacaagaggagctaactatcctaaatatttatgcacccaatacaggagcacccagattcataaagcaagtcctcagtgacctacaaagagacttagactcccacacattaataatgggagactttaacaccccactgtcaacattagacagatcaacgagacagaaagtcaacaaggatacccaggaattgaactcagctctgcaccaagcagacctaatagacatctacagaactctccaccccaaatcaacagaatatacatttttttcagcaccacaccacacctattccaaaattgaccacatagttggaagtaaagctctcctcagcaaatgtaaaagaacagaaattataacaaactatctctcagaccacagtgcaatcaaactagaactcaggattaagaatctcactcaaagccgctcaactacatgaaaactgaacaacctgctcctgaatgactactgggtacataacgaaatgaaggcagaaataaagatgttctttgaaaccaacgagaacaaagacaccacataccagaatctctgggacgcattcaaagcagtgtgtagagggaaatttattgcactaaatgcctacaagagaaagcaggaaagatccaaaattgacaccctaacatcacaattaaaagaactagaaaagcaagagcaaacacattcaaaagctagcagaaggcaagaaataactaaaatcagagcagaactgaaggaaatagagacacaaaaaacccttcaaaaaatcaatgaatccaggagctggttttttgaaaggatcaacaaaattgatagaccgctagcaagactattaaagaaaaaaagagagaagaatcaaatagacgcaataaaaaatgataaaggggatatcaccaccgatcccacagaaatacaaactaccatcagagaatactacaaacacctctacgcaaataaactagaaaatctagaagaaatggatacattcctcgacacatacactctcccaagactaaaccaggaagaagttgaatctctgaatagaccaataacaggctctgaaattgtggcaataatcaatagtttaccaaccaaaaagagtccaggaccagatggattcacagccgaattctaccagaggtacaaggaggaactggtaccattccttctgaaactattccaatcaatagaaaaagagggaatcctccctaactcattttatgaggccagcatcattctgataccaaagccaggcagagacacaaccaaaaaagagaattttagaccaatatccttgatgaacattgatgcaaaaatcctcaataaaatactggcaaaccgaatccagcagcacatcaaaaagcttatccatcattatcaagtgggcttcatccctgggatgcaaggctggttcaatatacgcaaatcaataaatgtaatccagcatataaacagagccaaagacaaaaaccacatgattatctcaatagatgcagaaaaagcctttgacaaaattcaacaacccttcatgctaaaaactctcaataaattaggtattgatgggacgtatttcaaaataataagagctatctatgacaaacccacagccaatatcatactgaatgggcaaaaactggaagcattccctttgaaaactggcacaagacagggatgccctctctcaccgctcctattcaacatagtgttggaagttctggccagggcaatcaggcaggagaaggaaataaagggtattcaattaggaaaagaggaagccaaattgtccctgtttgcagacgacatgattgtttatctagaaaaccccatcgtctcagcccaaaatctccttaagctgataagcaacttcagcaaagtctcaggatacaaaatcaatgtacaaaaatcacaagcattcttatacaccaacaacagacaaacagagagccaaatcatgagtaaactcccattcacaattgcttcaaagggaataaaatacctaggaatccaacttacaagggatgtgaaggacctcttcaaggagaactacaaaccactgctcaaggaaataaaagaggacacaaacaaatggaagaacattccatgctcatgggtaggaagaatcaatatcgtgaaaatggccatactgcccaaggtaatttacagattcaatgccatccccatcaagctaccaatgactttcttcacagaattggaaaaaattactttaaagttcatatggaaccaaaaaagagcccacattgccaagtcaatcctaagccaaaagaacaaagctggaggcatcacactacctgacttcaaactatactacaaggctacagtaaccaaaacagcatggtactggtaccaaaacagagatatagatcaatggaacagaacagagccctcagaaataatgccgcctatctacaactatctgatctttgacaaacctgagaaaaacaagcaatggggaaaggattccctatttaataaatggtgctgggaaaactggctagccatatgtagaaagctgaaactggatcccttccttacaccttatacaaaaatcaattcaagatggattaaagatttaaacgttaaacctaaaaccataaaaaccctagaagaaaacctaggcattaccattcaggacataggcgtgggcaaggacttcatgtccaaaacaccaaaagcaatgacaacaaaagacaaaattgacaaatgggatctaattaaactaaagagcttctgcacagcaaaagaaactaccatcagagtgaacaggcaacctacaaaacgggagaaaattttcgcaacctactcatctgacaaagggctaatatccagaatctacaatgaactcaaacaaatttacaagaaaaaaacaaacaaccccatcaaaaagtgggcaaaggacatgaacagacacttctcaaaagaagacatttatgcagccaaaaaacacatgaagaaatgctcatcatcactggccatcagagaaatgcaaatcaaaaccactatgagatatcatctcacaccagttagaatggcaatcattaaaaagtcaggaaacaacaggtgctggagaggatgtggagaaataggaacacttttacactgttggtgggactgtaaactagttcaaccattgtggaagtcagtatggcgattcctcagggatctagaactagaaataccatttgacccagccatcccattactgggtatatacccaaatgagtataaatcatgctgctataaagccacatgcacacgtatgtttattgcggcactattcacaatagcaaagacttggaaccaacccaaatgtccaacaatgatagactggattaagaaaatgtggcacatatacaccatggaatactatgcagccataaaaaatgatgagttcatatcctttgtagggacatggatgaaattggaaaccatcattctcagtaaactatcacaagaagaaaaaaccaaacaccgcatattctcactcataggtgggaattgaacaatgagatcacatggacacaggaaggggaatatcacactctggggactgtggtggggtcgggggaggggggagggatagcattgggagatatacctaatgctagatgacacattagtgggtgcagcgcaccagcatggcacatgtatacatatgtaactaacctgcacaatgtgcacatgtaccctaaaacttagagtataataaaaaaaaaaaa

SEQ ID NO: 483 - DNA, 3635 bp, Homo sapiens
  source 1..3635: mol_type = other DNA
tatggaaaagcaaaataaaaaacagcagtgttataaaaaatgggagaaataattggtaatgctatgttataaggtaccagcactgcccataaaacagttttaatgttaattgaaggtggattcgttgtaaatgtacactgccaactctagggcaactaaaacaaaaattttttaagtataattgatatgctatgaacagacagaaaatggaattatttaaaatgttcaactaataacagagaaggcagaaaaagagtggaaggcaaaataaattttttaaaaaagaacaagagcaatgaacagaaaagctgcaaacctagaccagataactaatccaactaaatcaataatcattttaaatgtgaacagcttaaatacaccaattaaaacacagagactttcaaagtggatttaaaacaacaagatccgactgtacactatatgttggctacaagaaacccattttaaatataaaaacacatagaggttaaaagtaaaaggatagggacagatatgctatgctaacactaatcaaaacaaagtgggaataactgcattaatctcaaagcagacctcagaacagggaaagttatcaaagacaaagggcatttcattatgataaaggggccaatactccaagaagacataaccattcttaatatgtatgtgcctagcaatagagcatcaaaatatgagacaaaaactgatagaaatgtaaggaggactagtcaaatccactatcatagttaaagacttaaacacccctcaatcaggaattgacagatccagaaggcagaaaatcggtaaggacataattgaactaaacagcaccatcaatcaacaggatctaattgacatctataggctacttcatccaacaacaaacagaatacacattcttctcaagctcacataaatgttcaccaaaacagaccacattctgggcaataaaaacataaaacaaatgtaaaagaatacaaaccaagctttcagcccacaatggaattaaactaaaaatcaataacacataccaaatatttacagatagttgcaaacccacaaaatacttagaaatttaaaaatacacttctaaatataacatcggtcaaagaagcctcaatttttttaattgtttcaaactaaatgaaaataaaaatagtttatcaaaatttttggaatgcagcagaaacagtgctagagggaaatttataacactgaaagcatataaaagaagactgaaaaccaataatctaggaaaactgaaacagaagagcaatataaatctaaagcaaacagaaaaagaaatcagatcagaaatcaatgaaactgaaaacatgttaatacagaaaaatcaacaaaaccaaaatctagttctttgatcaataaaactgataaacttagggccaggctagccaataaaagacaccaaaaaataataccacaaatcaaaaagcatgactactgatcccatgggtattaaaagaataacaagtgttatgagcagttctgtctccacaaatttgttaagttagatgaaatgggcaaattccttgaataatctatcaaaattcacatgggaaaaaacagataaactgaataggcccatatctattaaagaaattgaatcaatcattaataaccttcccatgtagagttctaccaggtatctcatgatatgataccaattctctataatctctttagaaagcagaaacagtaaacaattcctagctcattctgtgaggcctttgtaacagaactagaaaaagataatactagaaaggcaaattacagactaatctctcattaatattgatgcaaaaatccttgacaaaatacaaatcaaatccaacaatgtataaaaaaaattctacaccatgaccaagtgagatttttccatatatacgaggctggtttgacattcaaaagtcaatctataaaatctactacatcaataggctaaagaaaaatcatgtgatcctatcaataaatgcagaaaaagcacatgacaaaaatccaacatccattcataaaaactctgggcaaactaggaagagagggaaactccctcaacctgataaagagtatcaacaaaaaaaaacctacagtgaacatctcacttactgttgagaaatgtctttcttgttggtgaagaaggatgctttcccctaatattgggaacaagacaaggatgtctcctctcaccaccccaattcaacattatactgggaagtcctagctagtgcaataagcaaacagaatgaaaggtatgcagattgaaaaggaacaaataaaacttgtttgcagatgatatgattgtgtatgttgaaaaccgcaaggaatcaaggaaaagattcctgcaactaacacctatagcaaggttgaagaatataaggttagtacacaagtcaattgctttcccatacaccagcaatgaacaattggaattggaaattaaaacaccatttacattaacaccaagaaattaaacactttggtataaatctaacaaaataggatctcatataaggtctatataaggaaaaagctaaaaaatgctaatcaaaaatcaaagatctgaaaaaatggagagatattccatgtttatagataggaatactcaataatgctaagatgtcaattcttcccaacttgatctttagattcagtgcaatcccagtcaaaatcctggcatggtggatacaggcaaactgatttgaaagtctatgtggaaaagcaaaaggtccaaaatggccaacacgataccgaagaaccaagtcagaggatttacactctccagacttcaagacttagtaaaaagcttcagtattcaacacagtatgatattggcaaagaaaagatcagtggaatggaataaagagcccagatgtagaaccacatatagtcaacagacctttgaaaagagagcaaaggcaattcatggagaaagaacagtcttcaacaaatggtgctggaacaactggacatcatatgtccctcatccccccaaaaatcaatgtaaacacaaaccttacccctttcacaaaaactgagaccaagtcatagatctaaatgtaaatcacaaaacttaaaaaaaaatctgtaggatataaaacaggggaaaatctaggtggccttaaatttttagatacaccaccaaaatcatgacccagtaaaggcagactttattaaaatttctttgcaaaagacaatattaagagaacgagaagacaagccacagattgggataaaacatttaccaaacacccgataaaaagctggtatccaaaatatatcaagaactcttaaaactcaaaaaaaaaaaacaaacctgatttttaaaatgggtaaataatttaagcagacactcagcagattgagtggaaagtgtatgagaagatgttcaacatcatatatcattagggaattgcaaattaaaacaatgagataccactacacacctattagagtagctacaaccaaatgataacatcaaatgctggtgagaatgtggagcaacagaaatcacattcattgctgatgggaatgcaaaatggtaaagtcactttagaagacagtttggcagtttctgtactgcaaagctaagcactgacttaccatatgatccagccatc

SEQ ID NO: 484 - DNA, 48865 bp, Homo sapiens
  source 1..48865: mol_type = other DNA
gagcagttttgaaaaactctttttgtaatatctgcaaatggacatttggagcgctttttggcctatggtggaaaaggaaatatcttcatttaagaactagatggaagcattctgtgaaactgcttagtgatgtgcgcattcctctcacagagctgaaactttattttaattgagcagttttgagaactctcattttgtagaatctgcaagtggacatttggagcgctttgaggcctatggtggaaaaggaaatatcttcacattaaaactaggcagaagcattctgacaagtttatttgtcatttatctcacggagttgccatttatctcatggagttgaacttaactttcgttagagcagttttgaaacactctttttgtagaatctgcaagtggacatttggagagctttgagtcctgtggtggaaaaggaaatatcttcacacaaaactagacagaagcaatctgacaaagtttttgtgatgtgtgtattcatctcgcagagtggaaccttaatttcgattgagcagttttgaaacactcttttttgtagaatctgtaagtggacatttggagcgctttgatgcctatggtggaaaacgaaatatcttcacataataactagacagaagcattctgagaaacttctatgtgatgtgtgcattcatctcatagggttgaaactttcttttgattgagccactttgaaacactctttctgtagtatctgcaagtggacatttttggtgctttgaggcaatggtggaaaatgtaatattttcacataaaaactagacagaagaattcagagaaacttctttgagatgtgtgccttcatgttacagagttgaacttttcttttgattgagcagtttggaaacagactttttgaagaatcttcaggtgcacaattggagcacttagtggcctacagtagaaaaagaaatatgttcacataaaatctagacagaagcaatcagacaagagcagctttgaaacactctttctgtagcatctgcaagtggacatgtttggcgctttaaggcaatggtggaaaaagaaatatcgtcacactagaactatacagaaacattctgaaaaacttcactgagatgtgtggattcatctcacagagttgaacctttcttttgattgagcagttttgaaagactctatttgtagaatctgaatttggacatttggtgcactttgtggcccctggtggaaaaggaaatatctccacataaaaatagacagaagatttctgagaaacttctttgtgatgtgtgcattcatgtcacagatttgaacctttctgttgattgagtattttggaaacactcttttttagaatctgcaagtggacatttggagcgctttgtggcctgtggtagaaaaggaattatcttcaaataatatctagacagaagcaatctgagaaacttctttgtgatatgtgcattcatctcacagagttaagccattcttttgattgagcagttttgaacctctcttttcgtagactctgtaagtggacatttcgagtgctttgaggcttacggtgaaaaaggaaatatcttcccataaaaagtagacagaagaattctgaaaaactttgtgatgggcacgttcatctcacagagttgaaactttcttttgattgagcagtttggaaaccctctttttacagaatctgcaagtggacatttggagcactttgcggcctatggtagactaggaaatatgttcacataaaatctagacagaagtaatctgagaaacaactttgtgatgtgtgcattcatctcacagagataaacatttcttttgattgagcagttttgaaactgtctttttgtagaatctgcaagtggacatttggagcgctttgaggcctatggtggaaaatgaaatatcttcacataaaaactatattgaagtgttctgagaaagattttgtgatgtgcgcattcatcacccagagttgaatctttctttcgaaggaccagttttgaaatactctgtagaatcttcaagtggacatttcgagtaccttgaggcctatggtttaaaaggaaatatcttcacataaaaacaaaacagaagaattctgagaaagttctttgtgatatgtgcgttcatctcgcagaattgagcctttcttttgattgagcagtgttgaaaccctctttttgtagaatctgcaaatggtcatttggagcactttgaagcctacggtggaaaaggaatttatcttcacataaaaactagagagaagaattctgacaaacttctttgtgatgtgtgcgttcatctcacagagttgaaactttcttttgattgagctgtttggaaagactctttttgtagaatctgcaagtggacatttggagcactttgtggcctatgatagaaaaggaaatatcttcacataaaattcagacagagccaatctgagaaactactttgtgatttgtgcattcatttcacagagttaaaactttagtttggttgagcagttttgaaactctctttttgtagaatctgcaagtggacatttggagcgctttgaggcctatggtggaaaaggaaataatttcacataaatactagacagaagaattctgagaaacttctttgtgatgtgtgtgttcatctcactgagttgaaccttcattttgattgagcattttggaagcactccgtttgcagaatctgcaagtggagatttggagcgctttgcggccagtgttagaaaaggaaatacctgcacataaaatctagacagaagcaatatgagaaaattctttgtgatatgtgcattcatctcagagacttaaacactgcttttgatggagcatttttaaactctgtttttgtagaatctggaagagtacatttggagcggtttgaggacaatgtggaaaagaaaatatcttcacataaaaaccagattgaagaatactgtgaaacttctttgtgatgtgtgcgttcatctcacagagtggaacctttcttttgattgagctgtttggaaacactctttttgtagaatctgcaagtggacattttgagcactttgtggcctatggtagaaaaggaaatatcttcacataaagttcagacagaagcaatctgagaaactactttgtgatgtgtgcattcatttcacagagttaaacttttcttttgattgagctgtcttgaaactctattttgtagaatctgcaagtggacatttggagcgctttgaggcctatggtagtaaaagaaacatcttcacataaaatctagacaaaagcaatctgagaaacttctttgtgatgtgtgctttcatctcacaggtttaaaacttttgtttgattgagcagttttgaaactctctttttgtagaatctgcaagtgggcatttggagtgcttttaggcctatggtggaaaaggaaatatcttcccataaaaactagacagaagaattctgagaaacttctttgtgatgtgtgtgttcatctcacagagttgaaacttccttttgattgagcagtttggaaacactctttttgtaaaatctacaagtggacacttggagcgctttggggcctaaggtagaaaaggaaatatcttcacataaaacctagacagaagcaatctgagaaacttctttgtgatgtgtgcattcatctcacagagttgaaccttccttttgattgagcagtttggaatcactctttttgtagaatgtgcaagtggacatttggagcgctttgccgactatgatagaaaaggaaatatcttcacattaaatctagaaagaagcaatctgagaaatctctttgtgacgtgtgcattcttctcacagagttaaacattccttttgatagagcagtattgaaactctctttttgtagaatctgcaagtggacatttggagtgctttgaggcctatggtggaaaaggaaatatcttcacataaaaactagacagaagaactctgagaaacttctttgtgatgtgtgcattcatctgacagagttgaacatttcttttgattgagaatatttgaaacactctttgtagattctctaagtgagcatttggagcgctttgcagcctatgttagaaaaggaaacagtttcacataaaatctagacagaagcaatctgagaaacttctttgggatgagtgcattcatctcacagggttaactcttacttttgattgagcagttttgaaactctctttttgttgaatgtggaagtggacatttggagcgctttgaggcctacggtggaaaacaaaatatcttcacataaaaactcgacagaagcttttttagaaacttctttgtgatgtgtgcactgatctcaaagagttaagcctttgttttgattgagcagttttgaatctctctttttgtagaatctgcaagttaacatttggagcgctttgaggcctgtggaggaaaaggaaatattttcacatcaaaactacacagaagaattcggagaaacttctttgtgatgctttgtgatgtttatctcacagagttgaacctttcttttgattaagcagtttggaaacactctttttgtggaatctgcaaatggacatttggagtgatttgcagcctatgttagaaaaggaaatatattcccataaaatctagatagaatgaatctgagaaacttctttttgatgtgtgcattcatctcacagagttaaaactttcttttgattgagctgtcttgaaactctctttttgtaaaatctgcaagtggacatttggagcgctttgaggcctatggtggaaaagtaaatattttcacataaaaactaaacagaaaaattctgagaaacttctttgtgatttgtgcttacatctcaaagagttgaacctttattttgactgagcagtttggaagcactctttttgtggaatatgcaagtggacaattggaacactttgtgacctctcgtagaaaaggaaatatcttcacagaaaatctagataaaagcagtctgataaagtactttatgatgtgtccattcatctcacagagttaaacatttcttttgattgagcagttttgaaactctctttttgtagaatctgcaagtgtacatttggagtggtttgaggtctatggtggaaaaggaaatgtcttcagataaaaactagacagaagaattctgagaaacttctttgtgatgtgcgaattcaactcacacagttgaacctttcttttgatagggcaggtttgaaacactctttttgcagaatctgcaagtggacaattgaagcgctttgaggcctatggtggaaaaataaatatcttcccataaaaaatagaaataagcattctcagaaacttctttgtgatgtttgccttcaacgcacagagttgaacatacctcatcatagagcagttttgaaacactcttttagtagaatctgcaagtggatatatggaaagccttgaggccttcattggaaacgggtacatcttcacataaaaactagagagaagcattctcagaaacttctttgtgatgtatacattcaactcacagagttgaacctttcttttgatagagcagttttgaaacactcttcttgtagaatctgcaactgcatatttgaactgcttcgaggcattctttggaaataggataccttcacataatcactagacagaagcattgtcagaaacttctttgtgacgtgcgaatttaactcacagagttgaacctttcttttgatagggcaggtttgaaacactctttttgccgaaactgcaagtggacatttgaagcgctttgaggcctatggtggaaaagaaaatatcttcacataaaaactagacagaagcattctcagaaacttctttgtgatgttagcattccactcacagagttggacacactttatcatagagcagttttgaaacactcttttagtagaatctgcgagtggatatttggaccgctttgaggctttctttggaaatgggaatatcttcacataatctctagagagaagttttctcagaaacttctttgtgctgtgtgcattcaactcacagaattgaacctttcttttgatagagcagtcttgaaacactgtttttgtagaatctgcaagtggacatttggagagctttgagacctatggccgaaaaggaaatatcctcacataaaatatagacagaatcattctgagaaacatctttgtgatgtttgcattcaactcacagagttgaagatactttatcatagggcagttttgacacactcttttagtagaatctgcaagtggatatttggaccgctttgaggcattcgttggaaatgggaatgtcttcagataatcactagatagaagctttctcagaaactactttgtgatgtgtacattcatgtcacagagttgaacctttcttcttatagagaagtttaagaaccccctgtttgtagaatctgcatgtgggtatttcgaccagtttgaggtcttcgttggaaacgggtatatcttcacataaactctagacagaggcattctcagaaacttttttgtgatgtgtgcattcaactcacagagttgaacctttcctttgatagagcagtttagaaaccctctttttgtagaatctctatgtggatatttggaccagtttgaggtcttcgttggaaacgggtatatcttcacataaactctagacagaagcattctcagaaacttttttgtgatgtgtgcattcaactcacagagttgggcctttcttttgatagagcagctttgaaacactctttttgtagaatttgcaattggatatttggtccgctttgaggccttctttggaaacaggaatatcttcacataaacactagacagaagcattcccagaaacttctttatgaggtgagcattcaactcacagagttgaacataccttatcatagagcagctttcaaactctctttttgtagaatctgccagcggatattttgagagctttgaggcctaaggtggaaaaggtaatatctttatataaaagccagacagaaaaattctcagaaacttctctgtgatgtgtgcattcaactcacagagttgaacatttcttttgatagagcaggtttgaaacactctttttgcagaatctgcaagtggacatttggagcgccttgaggcctatggtggaaaaggaaatatcttcacataaaaactagacagaagcattctcagaaacttctttgtgatgtttgccttcaactcacagagttgaacataccttatcatagagcagttttgaagcactcttttagtagaatctggaagtggatattttgaatgctttcaggccttcattggaaacgggaatatcttcacataaaaattagacagcagcattctcagaaacttctttgtgatgcgtacattcaactaacagagttgagcctttcttttgatagagctggttttaaacgctctttttgtagaatctgcaaatggatatttggaccgctttgaggccttcgttggaaacgggaatatcttcacataaacactagacagaagcattcttagaaacttctttgtgctgtgtgcattcaactcacagagtttaacctttcttttgatagagcaggttgaaacactctttttgcagaatctgcaagtggacatttggagcgccttgaggcctatggtggaaaaggaaatatcttcacataaaaactagacagaagcattctcagaaacttctttgtgatgtttgctttcaacccacagatttggacatactgtatcatagagcagttttgaaacactcttttcgcagaatctgcaagcggatatttggactgcttaccagccttcattggaaacgggaatatcttcacataatcactagacagaagctttctcagaaacttctttgtgctgtgtgcattcaactcacagatttcaagctttctttagatagagcaggtttgaaacactctttttgtataatctgcaagtggacatttggagcgatttaagccctacagtggaaaaggaaatatcttccaataaaaactagacagaagcattctcagaaacttctttgtgacgtttgccttcaactcacagtgttgaacataccttatgatagagcagttttgaaacaatcttttagttgaatctggaagtgaatatttggaactttttgaggccttcatcagaaacaggagtatcttcacataaaaattagacagcagcattctcagaaacttctttgtgatgtgaacattcaactcacagagttgaacctttcttttgatagggcagctttgaaacactctttttgtagaatctgtccatggacttttggagagctttgtggcctatggtggaaaacgaaatatcttcacataaaaactagacagaagcattctcagaaacttctttgtgatttgtgcattcaactcacagagttgaacctttcttttgataaagcagacattaaacagtcttttcatagaatctgcaagaggatatttggaccactttaagtccttcattggaaacaggaatatctcacataaacactagacagaagcattctcagaaacttctttgtgatgtgtgcattcaactcagagatgaacctttcttttgatagagcaggtttcaaacactttttgtagaatctgcaaatggacatttggagcactttgaggcctgtgctggaaaaggaaatgtcttcccatgaaaactagagagaataattctcagaaacatctttgtgatgtttgccttcaactgacagagttgagcataccttatcatagagcagttttgaaaccatcattttgtagaatcttcaagtggaaatttggagagctttgaggcctaacgtgggaaaggaaatatcttcgcataaaaagtagacagaagcattctcagaagcttctttgtgatgtttgcattcaactgacagagttgaaactattttttggtagagcagttttgaaacactctttttgtagaatctgcaagtggatatttgaagcgctttgaggacttcattggaaactggaatatcgtcacataaacactagacagaattgttctcagaaacttctttgtgatgtgtgcattcaactcacagagttgaacctctcttttgttacaggagttttgaaacactctttttgcagaatctgcaaggggacatttggagagccttgaggcctatggtggaaaaggaaatatcttcacataaaaactagacagaggcgttctcagaaacttctttgtgatgtttgcattcaactcacagagttggacatactttatcatagagaagttttggtacactcttttagtagaatctacaagtggctattttgaccgtttattggccttcgttggaaatgggaatatccttatataaaaattagacagaagcattctcagaaacttctttgtgttgtgtgcattcaactcacagtgttgaacctttcttttgacagagcaggtttgaaacactgtttttgtagaatccgtaagtgaacctttggagcactttggagcctatggtggaaaaggaaatatgttcacataaaaactagacagaagtattctcagaaacttctttgcaatgtttgcattcaactcacagagttgaacataccttatgataaagcagttttgaaacactctttttgtagaaactgtaagtggatatttggaccgctttgaggccttcgttggaaacgggaatatctttacataaaaactagacagcagcattctcattaacttctttgcgatatgtacattcaactcacagagttgaacctttcttttgatagagcagttttgaaacagtcttttggagaatttgcaagtggatatttttactgctttgaggccttcatttgaaacggaaatatattcacataaacactagagagaagcatcctcacaaacttgtttgtgatgtgtcccttcaactcacagagctgaaactttcttttgagagagcagatttgaaggactctttttatagaatctgcaaatggacatttggagcgctttagaggcctaaggtggaaaaggaaatatcttcccatagaaactagacagaaggattctcagaaacttctttgtgatgtttgtattcaactcacagtgttgaacataccatttcatagagcagttttgaaacactctttttgcagaaactgcaagtggaaatttggagagctttgaggccttcgttggaatcggttatatcttcacgtaaacactagacagaagcattatcagaaacttccttgtgatgtgtacattcaactcacagacttgaagctttcttttgatagagcaggtttgaaacactctttttgcagaatctgcaagtggacattttgagcgctttcaggcctacggtggaaaaggaaatatcttcccataaaaactagactgaagcattctcagaaactcatttgcaatgtttgccttcaactcacagagttgaaaatactttatcatagagcagttttgaaacactctttagtaaaatctgcaagtggatatttgtaatgctttcaggccttcgttggaaacgagaatatcttcacataaaaactagacaggagcattctcagaaacttctttgtgatgtgtacattcaatgcacagagttgaacctttcttttgatagggcaggtttgaaacactctttttttagtatcggcaggaggatatttggaccgctttaaagccttcgttggaagccggaagatattcacataaacactagacagaagtattctcagaaacttctttgtgatgtgtgcattccactcacagagatgaacctttcttttgatagagcaggattgaaacactctttttgtagaatctgcaagtggacatttggagagctttgaggcctattgtagaaaaggaaatatctttatataaaaatgagacagaagaattctcagaattttctttgtgatgttcgcattccactcacagagttgaacataccatttcatagagccttttgaaacattctttgtagaatctgcaagtggatatttggaccgctttgaggccttcgttggaaacgggaatatcttcacataagtactagacagaggtattctcagaaactttgtgatgtgtgtattcaactcacagagctgaacctttcttttgatagagcaggtttgaaactttcattttgtagaatctccaagtggacacttggagagctttgtggcctatggtggaaaaggaaatatcttcacttaaaaactagacagaagcactctcagaaacttctttttgatatttgcattcaattcacagagtagaaacttcctttccatagatcacttttgatacactcctttagtagaatctgaaggggatatttggaccactttgaggcattcgatggaaacgggaatatcttcacataatcactagacaagggttctctgaaacttctttgtgctgtgtgcattaaaatcacagagttgaaccttactttttatagagcaggtttgaaacacactttttgtacaatctgtaactggacatttaaagtgttttgagacctatggtggaaaaggaaatatcttcccataaaaattagctagaaactttctcagaaacttctttgggttgcttgcattcaactcacagagttgaacatatcttatcatagagctgttttgaaacattcttttagtagaatctgcaagtggatatttggaatgccttgaggccttcgttggaaactgggatatcttcaaataaaaactagacagcatcattctcagaaacttgtttgtgatgtgtacattcagctcaccgagttgaacctttcttttgatagagcagttttgaaacactcttttagaagaatctgcaagtggatatttggaccgcattgaggccttcgctggaaatgggaatatcttcacataaaaactaaacagcagcattctgagaaactttttgtgatgtgtacattcaactaacagaggtgaaaatttcttttgatggatcaattatgaaacactctttttgtagtatctgcaagtggatatttgtactgctttgagaccttcgtttgaaacggcaatatcttcacataaacactagacagaagcattctcacaaacttctttgtgatgtgtgcctttaactcacagagttgaacctttcttttgatagagcaggtttgaaacactctttttgtagaatctgcaggtggacatttggagcgctttgtggcctatggtggaaaaggaaatatcttcccataaaaactagacagaagtattctcagaaatttctttgtgatgtttgcattcaactcacagagttgaacataccacttcatagagcagttttgaaacgctctttttgtagatcctgcaagtggaaatttggagagctttgaggcctttgttggaattgggtatatcttcacataaacactggacagaagcattctcagaaacttctttgtgatgtttgcattcaactactcacagagttgaacataatttatcatagagcagttttgaaacactctttttgtagaatccgctagtggatatttggactgttttgaagcattcattggaaacgggaatatcttcatataaaaactagacagaaacattctcagaaacttctttttgatgtgtgcattcaactcacagagttgaacatttcttttgatagggcagttttgaaacactctttttgtagaatctgcaagtggacatttctgaactttgaggcttatggtggaaaaagaaataccttcacatgaaacctagacagaagcattctcagaaacttctttgtgatatgtgcattcaactcacagagttgaacctttcttttgatagagcaggtttgaaacactctttttggagaatttgaaagtggacatttggagagctttgaggcctatgtggaaaatgaggtatcttcacataaaaactagacataagcaatatcagaaacttctttgtgatgtttgcattcaactcacacagttgaacataccttttcatggaggaattttgaaacactttttttgtagaatctgcttgtgtatatttggactgctttgaggccttcgttggaaacaggaatatcactacataaaaactagacagaagcattctcagtaacttgtttgtgatgtgtgcattcaactcacagagttgaacctttcttttgatagagcaggtttgaaacactctttttgcagaatctgcaagtggacatttggaacgctttggggcctatggtggaaaaggaaatatcttcacataaaaactagtcagaagcattctcagaatcttctttctgatgtgtgcattcaactgacagagttgaagctttcttttgatagagcaggtttgaggcactctttctgtagcatctgcattggacatttggagcactttgaggcctatggtggaaaaagaaatatcttcccataaaaactagagagaagcattcagaaacttctttgtgatgtttgccttcaactcacagagttggagatatcttatagagcagttttgaaacactcttttagtagaatctgcaagtgaatatttggaacgctttgaggccttcattgcaaacgggaatatcttcacataaaaactagacagcagcattctcagaaacttctgtatgatgtgtgcattcaactcacagagatgaaactttcttttgatagagcagttttgaaacactctttttgcagaatctacaagtggacatttgaagcgctttgaggcctatggttgaaaaggaaatgtcttcacataaaaactaaacagaataattctcagaaattatttgtgatgtttgcattcaactcacagaattggacatactttatcatagagcagttttgaaacactcttttagtagaatctgcaagtggatatttgtactgctttgagaccttcgttggaaatgggaatatcttcacataaacattcaacagaagcattctcataatcttctttgtgatgagtgcattcaactcacagagttgaaactttcttttcaaagagctgtttgaaacactctttttgtagaatgtgcaaatggacatttggagcgctttgaggcctgtggtggaaaaggaaatatcttcacataaaaactagacagaagaattctgagaaacttctttgtgatgtgtgcgttcttctcacagagttgaaacttccttttgattgagcagtttacagacactctttttgtagaatctacaagtgggcattaggagccctttgcgacttatgttataaaggaaatatcttcacataaaatctagacagaaccaatgtgagaaacctctttgtgatgtatgtattcacctcacagagtttaacctttcttttgatcgagcagttttgatcctcttttttgtagaatctgcaagtggacatttggagtgctttgaggcctatggtggaaaaggaaatatcttcacataaaaactagggagaagaattctgagaaacttctttgtgatgtgtgcgttcatctcacagagttgaacctttcttttgattgagaattatggaaaaactctttttgtagattctgtaagtggacatttgaagcgctttgcagcctaacttagaaaaggaaatatcttcacataaaatctagacagaagcattctcagaaacttctttgtgatgtttgcatgcaactcaccgagttgaacctttcttttgatacagcagttttgaaactctctttttgttgaatgtggaagtggacatttagagcgctttgaggcttatggtggaaaaggaaatatcttcacatagaaactagacagaagcattctcagaaacttctttgtaatatctacattctactcacagagttgaatattcattttcatggggaagctttgaaacactctttttgtagaatatgctagtggatatttggactgctttgaggccttcattggaaacgggaatatcttcacataaaaactagacagaagcattctcagaaacttgtttgtaatgtgtgcattcacttcacagagttgaaactttcttttgatagagcagttttgaaacactctttttgtagaatctgcaagtggacacttggaacactttgaggcctatagtggaaaaggaaatatcttcccatctaaactagagagaagcattctcagaaacttctttttgatgtttgccttcaactcacagagtggaacataccttatcatagattcgttttgaaacactcctttagtagaatctgcaagtggatattaggtaccccttgaggccctccttggaaacgggaatatcttcacataaaatctagacagcagcattttcagaaacttctttgtgatgtgtacattcaactcacagagttaaacctttcttttgattgagaagttctgaaacattctttttgtagaatccgctagtggacatttgtagcgcttttgggcctataatggaaaaggaaatatcttcacataaaaactagacagaagtattctcagaatcttctttgtgatgtgtgacttcaactcaaatagttgaaactttcttttgattcagcagtttggaaacactctttttggagattctgcaagtggacatttgtagcactatgtggactatggtagaaaaggtaatatcttcaaaaaaaatctagacagaaggaatctgagaaactcctttggcatgtgtgcattcatctcacagagttcaaactttcttttgactgagcagttttgaaacactgttcttgtagaatttgcaagtggacatttggatcgttttgaggcctatggtggaaaaggaaatatcttcacataaaaacttgacagaagaattctgagaatctcctttgtgatgtatgcgtttatctcacaaagttgaaccttccttttgattgggcagtttagaaacattctttttgtagaatctgcaagtggactattggagtgctttgttgcctatggtagaaaaggaaatatcttcacataaaatctagacagaagaaatctcagaaacttctttgtgatgtgtgcattcatctcagagagttaaacctttcttttggttgagtagttttgaagttctctttttgtagaatctgcaagtggacattttgagtgctttgaggcctacagtgggaaaggaaatatcttcacataaaaactagacagaagaattctgagaaacttctttgtgatgtgtgcgttcttctcacagagttaaaacttccttttgattgagcagtttgcagacactctttttgtagaatctgcaagtggactattagagtgctttgttgcctatgttataaaaggaaatatcttcacataaaatctagacagaaccaatgtgagaaacctctttgtgatgtgtgcgttcatctcacagagttaaagcaatcttttgattgagcagttttgaaactctttttttgtagaatctgcaagtgaacatttggagtgctttgaggcctatggtggaaaaggaaatatcttcacctaaaaactagagagaagaattctgagaaacttctttgtgatgtgtgcattcatctcacagagttgaacctttcttttgattaagaattatggaagcactctttttgtagattctgtaagtaggcatttgaagcactttgcagcctatgttagaaaaggaaatatcctcacataaaatctagacaaaagcaatgtgagaaacttccttgggatgtgtgcattcatctcacagggttaactcttacttctgattgagcagttttgaaactctctttttgttgaatgtggaagtggacatttggagtgctttgaggcttatggtggaaaaggaaatatcttcacatagaaactagacagaagcatttttagaaacttctttgtgatgtgtgcactgatctcacagagttaagcctttgttttgattgagcagttttgaatctctctttttgtagaatctgcaagttaacatttggagcgctttgaggcctgtggaggaaaaggaaatattttcacatcaaaactacacagaagaatttggagaagcttctttgagatgcatgcgtttatctcacagagttgaacctttcttatgattaagcagtttggaaaaactctttttgtggaatttgcaactggacatttggagcgctttgtggtctatggtagaaaagaaaatatcttcacataaaatctagataaaagcaatctgacaaacctctttgtggtgtgtgcattcatctcacagagtaaacctttcttttgattgaacggttttgaaactctcttttcgtagaatctgcaagtggacatttggagcgctttgaggactgtggtggaaaaggtaatatcttcacataaaaactagacagaagaattctgacaaacttcttggtaatgtgtgctttcatctcacagacttgaacctttcttttgattgagcagtttggaaacactcttttttgtagaatctgcaaatggacatttgaagcactttgcgacctatggtagaaaaagtaataccttcacataaaatctagagagaagcaatcggagaaacttcttagtgatgggtgcattcatctcacagagtttaaactttcttttgattcagcagttttgaaactctctttttgtagaatctgcaagtggacatttggaacgctttgaggcctatggtggaaaaggaaatatcctcacataaaaactagaaagaataattctgacaaacttctttttgatgtgtgcgttcttctcacagagtggaaccgttcttttggttgagcagtttggtaccactctttcttgtagagtctgcaagtggacatttggagcactttgtggtctatggtagaaaagtaaatatcttcacataaaatctagacagaagcaatatgagaaacttgtttgtgatatatgcattcatctcacagagataaccgtttcttttgattgagcagttttgaaactctctttttgtagaatctgcaagtggacatttagagcgtcttgaggcctatggtggaacaggaaatatcttcacataaaaattagacagaagaattctgagaaacttctttgtgacgagtgtgttcatctcacagagttgaacgtttcttttgattgagtagtttggaaacactctttttgtagaatctgcaagtggacatttggaactctttgtggccaatggtagaaaaggaaatatcttcacataaaatctagacagaagcaatctgagaaacttctttgtgatgcgtgcattaatctcacagagttaaacctttcttttggttgagcagattggaaactctctttttgtagaatctgcaagtggacatttgtcagcactttgaggcctgtggtggagaaggaaatatcttcacataaaaagtagatagaagcattctgagaaagttctctgtgatgtctgcattcatctcctggagttctaactttctttaggagacccagttttcaaatactctttttggataatctgcaaggggacatttcaagcaccttgaggcttaagttggaaaaggaaatatcttcacaaaaaaaaaaagaagaattctgagaatcttttttatgatgtgtacgctcatctaacagagttgaacctttcttttgattgcgtagtttgggaacaccctttttgtagaatcggcaagtggacatttggagcgctttgcggcctatgatagaaaaggaaatatcttcacataaaatctagaaggaagcaacctgagaaactcctttgtgatgtgtgcattcatctcacagagttgaaactttcttttgattgagcagttttgaaacactctcttcgtggaaactgcaagtggatattgggagttctttgaagcctattgtggaaaaggaaatatcttcacataaaaactactcagaagcattctgagaaacaccattgtgatgtttgcattcaactcacagaattgaaactacattttgattgagtagttctgaatctctctttttgcagaaactacaagtgtatgtttggaaagctttgaggcctattgtgggaaaggaaatatcttcacataaaaactacacagaagcattctgagaaactactttgtgaggtgttcattcaactcacagagttgaaattatcttctctttgaggagttttcaatctctctttttgtagaatctgcaagtggatatttgaagacctttgagccctatggtggaaaaggaaatatcttgaaataaaaactacacagaagcattcagagaaacttctttgtgatatgtgcattgaactcacagagttgaacctatcttttgattgagcagttttgaatctctctttttgcacaatctgaaggtggatatttgagccctttgaggcctacagcggaaaagcaaatatcttcacataaaaactatgcagaagcattgtgagaaactactttgtgaggtgtgcattcaactgacagagttgaacttatcttctcattgagcagttttgaatttatcttttggtagaatctccaagtggatatttggagctctttgaaccctatggtggaaaaggaaatatcttcaaacaaaaactacacagaatcactcagagaaactgctttgtgatgtgtgcattcatctcacagggttgaacttagcttatgattgagcagttttgaaacactctttttgtagtatcttcaagtggatatttggagcgctttgaggtctacagtggaaaaccaaatatcttcaaataagaactacacagaagcattctgagaaacttctttgtgatgtgtgcattcatctcatagagttgaaactttcttttgattgagcagttctgaaacactctttctgctgaatctgcaagtggatatttggagccctctgcggcctatggtggaaaaggaaatatcttcaaataaaaactacacagaagcattctcagaaacttcttcatgatgtatgcattcaactcacagagttgaacctatcttttgattgaacagttttgaatctctctttttgtagaatctgcaagtggatatttggagcgctgtgaggcctactgtggaaaatcaaatatgttcacataaaaactacagagaagcattctgagaaacttctttgtgctgtatgcattcaactcacagagttcaacctgtctttcaattgagcagttttgaatctctctttttgcaggttctgcaagtgggtgttgggagagctttgaggcctatggtggaaaaggaaataacttcacataaaaactacacagaagcattctgagaaacttctttgtgatgtgtgcattcatctcacagagttgaacctttattttgattgagcagttttgaaacactctttttgtagaatctgcaagtggatatttggagaactttgaggcctattttggaaaaggaaatatcttcacataaaaactactcagaagcattccgagaaacttctttgtgatatgggcattcaactcacagagttgaacctatcttttgattgagcaatttagagtcactctttttctagaatctgcaagtggatatttggaaccctttgcaccctatggtggaaaaggaaatatcttcaataaaaactacacagaagcattctaagaaacttcttcgtgatgtgtgcattcaactgactgagatgaacttatcttctcattgagtagttttcaatctctgttttgtagaatctggaagtggatgtttggagccctttcaccctattgtggaaaaggaaatatctgcaaataaaactacacagaaccattcagagaaacttctttgtgatgtatacattcaactcacagagttgatcctatcttttgattgagcagttttgaatccctctttttgcagaaactgcaggtggatatttggagccttttgaggcttactgtggaaaatcaaatatgttcacataaaaactacacagaaagattctgagaaacttctttgcgatgtgtgcattcaagtcacagagttgaacctatctttcgattgagcagttttgaatctctctttttgcagaacctgtatgtggatgtttggagagcttggaggcctattgtggaaaaggaaatatcttcacataaaaactacacagaaacattctgggaaacttctttgtgaggtgtgcattcaactcacagatttgatcttatcttctcattgagcagttttgaatctctctttttgtagaatctgcaagtggatattttgagccctttgagccctgtggtgcaaaaggaaatatcttgaaataaaaactacaaaggagcattcagacaaacttctttgtgatgtatgcattcaactcacagagttgaacgtaccttttgattgagcagtttcgaatctctctttttgcaaaatctgcaggtggatatttggagccctttgaggcctactgtggaaaagcaaatatcttcacataaaaattacacagaagcattctgagaaactacttagtgacgtgtgcattcatctcacagggttgaatctatctcatgattgagcagttttgaaacactatttttgtagaatatggaagtggatatttggagcccattgaggcctacagtgtaaagaaaatatcttcacataaaaacaacacagaaggattctgagaaacttctttgtgatgtgtgcattcatctcactgagttgaacctttctttacattgcgcagttttgaaacaccgtttttgtagaatctgcaagtggatatttggagaactttgccgcctattgtggaaaaggaaacatcttcacataaaaactactcagaagcattccgagaaacttctttgtgatgtgggcattcaactcacagagttgaacctatcttttgattgagcagtttagagtctctctttttctataatctgcaagaggatatttggagccctttgcgccctatggtggaaaaggaaatatcttcaataaaaactacacagaagcattctaagaaacttcttcgtgatgtgtacagtcaacccactgagttgaacttatcttctcaatgagcagttttgaatctctgtttttgtagattctgcaagtggatatttagagccctttttgccctatggtggaaaaggaattattttcaaatagaactacacagaatcattcagagaaacttctttctgatgtatgcattcaactcacagtgttgaacctatcttttgattgagcagttttgaatacttctttttgcagaatctgcaggtggatatttggagccttttgaggcctgctgtggaaaatcaaatatgttcacatgaaaactacaaagaaagattctgagaaacttctttgtgatgtgtgcattcaactcacagagttgaacctatcttttgattgagcagttttgaatctctctttttgtagaatctgcaagtggatattaggagccctttgcaccctatggtggaaaaggaaatatcttcaaataaaaactatatagaagcattcagagaaactgctttgtgatgtgttcattcaactcacagaggtgaacttatcttttgtttgagcagttttgaatctctctttatgaagaatctgcaggtggatatttggagaccttcgaggcctactgtggaaaaggaaataacttcaaataaaaactacacagaagcattctcagaaacttcttcgtgatgtatgcattcaactcacagagttgaacctatcttttgattgaacagttttgaatctctctttttgcacaatctgcaagtggatattttgaccgttgtgaggcctactgtggaaaatcaaatatgttcacataaaaactaaacagaagcattctgagaaacttctttgtgaggtgtgcattcaactcacagagttgatcttatcttctctttgagcagttttgaatctctctttttgtagaatctgcaagtggatatttggagccctttgagccctatggtggaaaaggaaatatcttgaaataaaaactacacagaagcattcagacaaacttctttgtgatgtgtgcattcaactcacagagttgaaagtatcttttgattgagcagttttgaacctctctttttgcagaatctgcaagtggatatttggagccctttgaggcctactgtggaaaagcaaatatcctcacataaaaattacagagaagcattctgagaaactacttcgtgacgtgtgaattcatctcacagggatgaatttatctcatgattgagcagttttgaaacactctttttgtagaatatggaagtggatatttggagcccactgaggcccattgtgttaaggaaatatcttcacataaaaacaacacagaagcattctgagaaactactttgtgatgtgtgcattcatctcacagggttgaaactttcttttcattgagcagttttgaaacaccgtttttgtagaattttcaagtcgatatttggagaactttgaggcctattgtggaaaaggaaacatcttcccataaaaaatactcagaagcattctgagaaacttctttgtgatgtgggcattcaacttacagagttgaacctatctgttgattgagcagtttagagtttctctttttctagaatctgcaagaggatatttggagccctatgcaccctatggtggaaaaggaaatatcttccataaaaactgcacagaagctttctaagaaacttcttagtgatgtgtacattcaaatcactgagttgaaattatcttctcaatgagcagttttgaatctctggttttgtagaatctacaagtggatatttggagccaattgtgccctatggtggaaaaggaattatctttaaataaaactacacagaaccattcagagaaacttctttgtgatgtatgcattcaactcacagagatgaacctatcttttgattgggcagtttagaatctctcttttgaagaaactgcaagtggatatttggagccctttgcgctctgtgttggaaaatgaaatatctttaaataaaaacaacacagaagtagtcagagaaacttctttgtgctgtgtgcattaaactcagagagttgaaacttccttttggtagagcagttttgaaacactctttttgtagaatctgcaggtggatatttggagcgctttgaggcctatggtagaaaaggaaatatgttcatacagaaactagatagaagcattcacagaaactactttgtgatgtgtgcattcaactcaaagagttgaacattcctttagtcagagcaggtttgcagcactctttttgtagaatctgcaagtggatacttggactgctctgaggcctatgttggaaaaggaaatatcatcacacaaaaactagacagaagcattctcagaaacttctttgtgatttgtgcattcaactcatggagttcaccattcctcttaacagaacagttttgaaacacacttgttgtagaatctgcaagtggatatttggagtgttttgaggccttcggtggaaacgggaataccttcacataaacactagacagaagcattctcagaaacttctttgtgatgtgtgcattcaattcacagagttgaaccttctttttgatagagcagttttgagacactgtttttgtataatctgcaagtggacatttggatcgctctgaggcctacggtggcaatggaaatatttttacataaaaaccagacagaagaattctccgaaacttctttgtgatgtgtgcattcaactcagagaattgaacctttcttttgatacagcaggtttgaaatactctttttgtagaatctgcaagaggacatttgcagcgctttgaggccaatggtggaaaagaaaataacttcacataaaaactagacagaagcattctcagaaacttctttgtgatgtttgcattccactcacagatttgaacataccttatcatagagcagttttgaaacactcttttagtagacttcgcaagtggatatttggactgctctgaggccttcgttggaaacgggaataccttcacataaagactagacagaagcattctctgaaacctcttagtgatgtgtgcattcaactcacagagatgaacttttcttttgatagagcaggtttgaaacactctttttgtagaatctgcaagttgacatttggagagctttgaggcatatggtggaaaaggaaatatcttcacacaaaaactagacagaagcattctcagaaacttcttaaggatgtttgcatttaactcacagagttgaacataccttttcatggagaagtttagaaacacactttttgtagaatctgcaagtggatatttagaccgctttgaggccttcattggaaatgggaatatctacacataaacactagagagaagcattctcagaaactcctttgtgatgtgtgcattcaaatcacagagttgaacctttcctttgatagagctggtttgaaacactctctttgtagaatctgcaagtggacatttggagtgatttgaggcctatgctggaaaaggaaatatcttcacataaaaactagacagaagcatactcagaaacttctttgtggtgttttcattaagctcacagagttaaaccttccttttcatagagcagttttgaaacactcttttcgtaggatctgcaagttgacatttgaactgctttgaggcctagggtggaaaaggaaatagcttcacataaaaactagacagaagcattctgagaaacttctttgtgatgtgtgaattaaactcacagagttgaactttctctgatagagcagttttgaaccaatctttttgaagaaactgcaaatggatatttggactgctttgaggccttcgttgaaaacgggaatgtctttacataaacactagacagaatcattcccagaaacttctctgtgatatgtgcattcaattcacagagttgaacctttcttttgatagagcaggtttgaaacaatctttttggaggatctgcaagtgaacttttggagagctttgaggcctatggtggaaaaggaagtatcttgatataaaaagcaggcagaagaattctcagaaaattctttgtgatcttgcattcaactcacagagttgaacataccttttgatagagcagttttgaaacactcttttagtagaatctgcatgtggatatttttaccgctttgaggccttctatggaaacgggaatatcttcacataaaaaatagacagaagcattctcagaaacttctttgtgatgtttgttttcaactcacagatttcaacgtaccttatcatagaatagctttgaaacactcttttagcagaatctgcacgtgcacatttggagagctttgaggcctgtggtggaaaaggagatatcatcatataaaaactagacagaagaattctcagaaacatctttgtgacgtttgcattcaactcaaagagttgaacataccttttaacagagcagttttggaacactcttcgtggaatctgcaagcggatatttggaacgctttgaggccttcgttggaaacgggaatatcttcacataaaaactagacagaagcattctcagaaaattctttagggtggttgcattcaacacacagagttgaacataccttgtcctagagcagttttgaaacactctttttgtagaatctgcaagtggatatttggaccgctttgaggctttcgttggaaatgggaatatcttcacataaacagtagacagaaggattctcagactcttctttgtaatgtgtgctttcaactcacagagtttaacctttcttttgatagagcaggtttgaaacactctttttgtaggatctgcagttcgacattttgagagatttgaagcctatggttcaaaaggaaatatcatcacatacaaagtagacagaagcattctcagaaactacattgtgatgtttgcattcaaaacacagagttgaacataacttttcatggagcagttttgaaacactctttatgtagaagctgcaaatggatatttggatagctttcaggacttcgttggaaacgggaatatcttcacataaaaactagatagaagcattctcagaaactagtttgtgaggtttgcattcaactcacagagttgaacatactttatcataaagcagttttgaaacactcttgtagtagaagctgcaagtggatatttggaccgctttgaggtcttcgttggaaacgggattatcttcacataatcactagagagatgctttctcaaaaacttctttgtgctgagtgcattcaactcacagagttaaccttatttcatagagcaggtatgaaacatccttcttgtagaatctacaactggacatttggaatgctttgaggcctgtggtggaataggaaatatcttcacataaaaactagacagaagcattctcagaaacatctttgtgatgtttgcattcaactcacagagttcaaaatcccttttcatagagcagttttgaaacactcattttgtagactctacaagtggatatttggactactttgaggccttcgttttaaaagggaatatcttcacataaaaactagacagaagcgttctcagaaacttctttgtgatgtgtgcattcaactcaccgagttgaacatactttgtcatagagcagttttgaagcacccttttagtagaatctgcaagtggatattttgaccgctttgaggccttcattggaaacaggaatatcttcacataaaaactagacagatgcattctcagaaacttctttgtgatgtgtgtattcaacataaagatttgaacctttcttttaatagagcaggtttgaaacactctttttgtagaatctgcaagtggacatttggagagctttgaggcctatggtggaaaaggaattatcttctcataaaaactacacagaagcattctcagaaacaactctgtgatgtgttcattaaacacaaagagttgaaggtttcttttgatatagtagatttgaaatattctttttgtagaatctgtaagtggacatttggagagctttgaggcgtatggtggaaaaggaaatatcttcacacaaaaactagacagaatcattctcagaaacgtctttgtgatgtttgcattcaactcacagagttgaagatacctttccatggagcagttttgagatactctttttgtagaatctgcaagtggatatttggaccgctatgaggccttcattagaaacagaaatatcttctcataaacactagacagaagcattctcaaaaacttctttgtcatgcgtgcattaaactcaaagagttgaacctttcttttgatagagcagctttgaaacactccttttgtagaatctgcaagttgacatttggagagctttgaggcctatggtgtaaaaggttatatcttcatataaaaattagagagaagaattctcagaaacttctttgtgatgcttgcattcaactcagagttgaacataccttttcatagagcagttttgaaacagtcttttcctagactctgcaagtggatatttggaacgctttgagaccttcgttggaaacgggaatatgttcacacaaaaacaggcagaagcattctcagaaacttcgttgtgatgtgtgcattcaactcaaagagttgaaactttcttttgatagagcatgtttgaaacactctttttgtagaatcggtaccggatatttttagagctatgaggcctatggtggaaaaggaaatatcttcaaataaaaaccagacagaagaattctaaggaactacattgtgatgtttgcgttcaactcatagagatgaacataccttttcatcgagcagttttgaaatgctctttttgtagaatctgcaagtgaatatttggaccactttgaggccttcgttggaaatgggaacatcttcacataatcactagatagaagctttctcaaaaacttttttgtactgtgtgcattcaactcacggacttgtacctttcttttgatggagcagttttgaaacactctttttctagaatcagcaagtggatatttggagtgctttgaggcctatggtggaaaaggaaatatcttcccataaaaactagacagaagcattctcagaaagttttcatgatgtgtgcattcaattcacagagttgaacataccttatcatagagcacttttgaaacactcttttagtagaatctgcaagtggatatttggaccactttgaggccttcattggaaacgggagtgtcttcacataaacccaagacagaagcattctcagaaactcctttgtgatgtgtgcattcaactcacagagttgaaccttccttttcatagagcagggttgaaacactctttatgcaggatctgcaagtggacatttggaactctttgaggcctatggtggaaaaggatatatcttcacataaaaactagacagaagcattctcgtaaaattatttgtgatgtgcacattcaaatcacagagctgaacctttattttggtagagcaggtttgaaacattcattttgtagaatctgaagtggacatttggagagctttgaggcctatggtggaaaaggaagtatcttcatataaaaactagagagaagcattctcaggaacttctttgtgatgtgtgcattcaactcacagatttgaacctctcttttcatagagcaggtttgaaaaactctttttgtagaatctgaaagtggacatttggagagctttgagtcctatggtggaaaaggaagtatcttcacacaaaaactagatagaagcattctcagaaacgtctttgtgatgtttgcattcaactcacagagttgaagatacctttccatggagcagttttgagacactctttttgtagattctgcaagtggatatttggacggctatgaggtcttcattagaaacggaaatatcttctcataaacactagacagaagaattctcaaaaacttctttgtcatgcgtgcattaaactcaaggagttgaacctttcttttgatagagcagctttgaaacactctttttgtagaatctgcaagttgacaattggagagctttgaggcctatggggtaaaaggttatatcttcatatgaaaattagagagaagaaatctcagaaacttctttgtgatgcttgcattcaattaagagttgaagataccttttcatagagcagttttgaaacactctttcatagaatatgcaagtggatatttggaatgctttgaggccttcgttggaaacgggaatatgttcacacaaaaacaggcagaagcattctcagaaacttctttgtgatgtgtgcattcaactcaaagggttgaaactttcttttgatagagcatgtttgaaacactctttttgtagaatcggtaccggacatttttagagctatgaggcctatggtggaaaaggaaatatctgtaaataaaaaccagacagaagaattctaaggaactacattgtgatgtttgcgttaaactcatagagatgaacataccttttcatcgagcagttttgaaacactctttttgtagaatctgcaagtgaatatttggaccgctttgaggccttcgtgggaaacaggaatatcttcacataatcactagtcagaagctttctcaaaaacttttttgtactgtgtgcattcaactcacggagttgtacctttcttttgatggagcaggtttgaaacactctttatctagaatccgcaagtggacatttggagtgctttgaggcctatggtggaaaaggaaatatcttcccataaaaactagacagaagcattctcagaaagttcttatgatgtgtgcattcaattcacagagttgaacatactttatcgtagagcacttttgaaacactcttttagtagaatctgcaagtggatatttgcactgctttgaggcctttgttggcaacgggattatcttcacataaacactagacagaagcattctcagaaactgctttgtgatgtgtgcattcaactcacagagttgaacctttcttttcatagagcaggtttgaaaccgtctttttgtagaatcttcaagtggacatatggcgagcgttgaggcctatgatggaaaaggaaatatcattatataaaaaccagacagaataattcttaggaactactttatgatgtgtgctttcaaatcacagggttgaacatacctcttcatagagcagttttgaagcactctttttgcagaatctgcaagtggatatttgaaccgctttgaggccttcgttggaaaaggggatatcttcacataaacactagacagaatcgttctcagaaacttctttgtgatgtgcgcattccactcacagaattgaacctttcttttcatagagcaggtctgaaacactttttttttgtagattctgcaagttgacagttggagagctttgaggcctatggtggaaaaggaaatatctataaataaaaactagacagaagcattgtcagaaacttctttgtgatgtttgcattcaactcacagagttaaacttcccttttcatagagcaattttgaaacactcttttcttataatctgcaagtggatatttggactgctttgaggccgtcattggaaatgggaatatcttcatataaaaactagacagaagcattctcagaaactacttttgatgtatgcattcaactcacagagttcaacctttcttttcatagaacagcgttgaaacactctttttgcaggatctgcaagtggacatttggagctctttgaggcctatggtggaaaaggatatatcttcacataaaaactagacggaagcattctcataaacttgtttgtgatgtgtgcattcaactcacagagttgaacctttcttttgatagagcaggttggaaacattcattctgtagaatctgaagtggacatttggagagctttgagatctatggtggaaaaggaagtatcttcacataaaaactagagagaagcgttctcagaaacttctttgtgatgtgtgcattcaactcacagagttgaacctctcctttcatagagcaggtttgaaacattcttttcttagtatctgcaagtggacatttggagagctttgagtcctatggtggaaaaggaaatatcttcacacaaaaactagacagaagcgttctcagaaacatgtttgtgatgtttgcattcaactcacagagttgaagatacctttccttggagcagttttgagacactctttttacggaatctgcaagtggatatttggaccgctatgaggctttctttggaaacgggaatgtcttcacataaacactagacagaagcattctcaaaaacttctttttcatgcatgcattaaacacaaagagtggaacctttcttttcatagagcagctttgaagcactctttttgtagaatctgcaaattgacatttggagagctttgaggcctatggtggaaaaggttatatcttcatataaaaataagagagaagaattctcagaaaattctttacgatgtttgcattcaactcacagagttgaagataccttttcatagagcagttttgaaacactcttttcgtagaatatgcaagtgatatttgaaacgctttgaggcctttgttggaaatgggaatatgttcacacaaaaacaggcagaagcattatcagaaacttctttgtgatgtgtgcattcaaccccaagagttgaaactttcttttgatagagcatgtttgaaacactctctttttgtagaatctgcaaggggacatttgaagaggattgaggcctatggtggaaaagtaaatatcttcacataaaaactagagagaagcatgctcagaaacttctttgtgaggtgtgcattctactcacagagttgtacctttcttttgatagagcagttttgaaacactctttttgtagaatgtggaaatgtatatttggaccacttggaggccttctttggaaacgggaatatcttcacatacacactagacagaagcattctctgaaacttctttgtgatgtgtgcattcaactcaaagggttgaaactttcttttgatagagcatgtttgaaaccctctttttgtagaatcggcaccggacatttttagagctatgaggcctatggtggataaggaaatatctttaaataaaaaccagacagaagaattctaaggaactacattgtgatgtttgcattcaactcacagagttgaacacaccttttcatagagcagttttgaaacactctttttgtagaatctgcaagtgaatatttggaccgctttgaggcctttgttgcaaaggggaatatcttcacataatcaccagacagaagctttctcaaaaacttttttgaactgtgtgcattcaactcacagagttgaacctttcttttgatagagcaggtttgaaacactctttctccagaatctgcaagtggacatttggagtgctttgaggcctatggtggaaaaggaaatatcttcccattaaaaactagacagaagcattctcagaaacttcttatgatgtgtgcattcaattcacagggttggacataccttatcatagagtacttttgaaacactcttttagtagaatctgcaagtggatatttgcactgctttgaggcctttgttggcaacgggattatcttcacataaacactagacagaagcattctcagaaactgctttgtgatgtgtgcattcaactcacagagttgaacctttcttttcatagagcaggtttgaaaccgtctttttgtagaatcttcaagtggacatatggcgagctttgaggcctatgatggaaaaggaaatatcattatataaaaaccacacagaataattcttcggaactactttatgatgtgtgctttcaaatcacagggttgaacatacctcttcatagagcagttttgaagcactctttttgcagaatctgcacgtggatatttggaacgctttgaagccttcgttggaaatgggaatatcttcaaataaacactagatagaagcattatcagaaacttctttgtgatgtgtgtgttcaactcacagagttgaagctttcctttaataaagcaggtttgaaacactctttttgtagaatctgcaaggggataattgaaccgctttgaggccttcattggaaaaggggatatcttcacataaacactagacagaatcattctcagaaatctctttgtgatgtgtgcattccactcacagaattgaacctttcttttgatagagcaggtttgaagcactttttttgtagaatctgcaagcagacatttggagagcttggaggcctatggtggaaaaggaaatatctataaataaaaactagacagaagcattgtcagaaacttctttgtgatgtttgcattcaactcacagagtcgaacctcccttttcgtagagtagttttgcaacactattttcgtagaatctgcaggtagatatttggactgctttgaggccttcattggaaacgggaatatcttcacataaaaactagacagaagcattctcagaaactactttgtgatgtgtacattcaactcacagagttgaaccttccttttcatagagcagggttgaaacactctttttgcaggatccgcaagtggacttttggagctctttgaggcctatggtgaaaaaggaaatatcttcacataaaaactacacagaagcattctcagaaagttctttgtgatgtttgctctcaactcacagagttgaacatttgttttcatagagcagttttgaaacactctttttgtagaatttgcaaggggatatttggacggatttgaggccttctttggaagcgggagtatctttatataaaaactagacaggagcattctcagaaactgctttgtgatgtttgcattcaactcatagagttgaacatatcttttgatagagaagtcttgaaacaatctttttgtagtatctgcaagtggacatttggagttctttgaggcctatggtgaaaaaggaaatatcttcacataaaaagtagacagaagcattcgcagaaactgctttgtgatgtgtgcattcaactcacagagttgaatcttcctttccatagggcagttttgaaacactctttttgtagaatctgcaagtggacatttggagcacattgaggccttcgttcaaaacgggaatatcttcagataataattagacagaagcattctcagaaaattcatgtgatgtttgcattcaattcacagagttgaacattccttttcatagagcaggtttgaaacactctttttgtagaaattgcaattggacatttggagtgcttggggtcctaaggtgaaaaaggaaatatcttcaaataaaaactagacagaagcattgtcagaaacttctttgtgatgtgtgtactcagctcacagagttaaacctttcttttgatagagcagttttgaaacactcttcttggagaatttacaaatggatatttgggaagctttgatgctttcattggaaacgcgaatatcttcacatagaaactagacagatgcattctccgaaacttctttgtgaagtgtgcattcaactcgctgtgttgaagctttctttttatagagcagattggaaacactgtttttgtgggattcgcaagtggatatttggacagctttgaggccttcgctggaaacggcagtatctttatataaaaacaagacagaagcattctcagaaacttctttgtaatgtttgcattcaactcacagagttgaacattccttttcatagagcagttttgaaacactctttttgtagtatctgccagtggacatttggagctctttgaggcctatggtgaaaaaggaaatatcttcatataaaaactagacagaagcattcgtataaacttctttgtgatgtgtgcattcaactcacagagttgaacagtccttttcatagagcagtttgaaacactctttttgtagaacctgcaagtggacatttggagagctttgtggccttcattggaaacggtaatatcttcacataaaaactagacagaagcattctcagaaacttctatgtgatgtttgcattcaactcatagagttgaacataccttttcatagagcagttttgaaacactctttttgtagtatctgcaagtggacatttggagcactttgtggccttcattggaaatgggaatatgttcacataaaaactagacagaagcattctcagaaacttctatgtgatgtttgcattcaactcatatagagttgaacattccttttcatagagcagttttgaaacactctttttgtaggatctggaagtggacatttggagcttgttgaagacttcattcaaaacgggcatatcttcacataaaaactagacagaagcattctcagaaacttctttgtgatgtgtgcattcaactcacagagttgtacccttcttttgatagagcagttttgaaacactctctttgtagaatctgcaagttgacattttgtgtgctttgaggactatggtgaaaaaggaaatatcttagcataaaaactagacagaagcattctcagaaacttctttgtgatgtgtgcagtcaacacacagagttgaagctttatttgacagagcgtttttaaacactctttcagtacaatctgcaagtggacatttagagcgctttgtggccttcgttggaaacgggaatatattcacataaatattagacagaaggattctcagaaacttctttgctatgtgtgcatataattcacagagttgaacattccttttcatagagcaggtttcaaacactctttttgtagtatctccaactggatgtttggaaagctttgagcctttcgttggaaacagtattatattcaaataaaaactagacagaggcattctcagaaacttttttgtcatgcttgcattcaactcacagagttgaacattccttttcatagagcagttttgaaacactctctttgtagaatgtgcaagtggacatttggggtgcttgaggtatatggtgaaaaacgaaatatcttaagataaaaactagacagaagaattctcataaacttctttgtgatgtgtgcactcaactcacagagttaaacctttcttttgacagagcagttttgaagcactctttttgtagaatctgcaagtgaatatttgggagctttgagggtcttgttggaaacgggaatatgttcacaaaacactagacagtggcattctcagaaacttctctgtgatgattacattcaactcacagagttgaacactccttttcagagagtagttttgaaacactcctttttagtatctgcaagtggacatttgaagcgctttgatgccttcgttcgtaaagggcatatcttcacataaaaactagatagaagcaggctcagaaacttctttgtgatgtgttcactcaacacacagaattgaacctttcttttgatagagcgtatttaaacactccttttgtagaatctgtatgtggacatttggagcgctttgtggccttcgttggaaacgggaatatattcacataaaaactagacagaagcattctcagagacctctttgtgatgtttgcatttaagtcagagttgaacattccttttcatagagcagttttgaaagactctttttgtagaatctgcaagtggacattcggagtgcattgaggcctatggtgaaaaaggaaatatcttcacataaaaactagacagaggcattctcacaaacttcttggtaatgcatgtattcaactcacagagatgaacctttctttttctagagcagttttgaaacaatctttttgcagcatttacaaggggatatttggatagctttgagactttggttggaaacgggaatatcttcccataaaaactagacagaagcattctcaggaaattctttttgatgtgtttactaaacacacagagatgaacttttcctttgctagagcagttttgaaacactctttttacagcatttacaagtggatatttggacagctttgagactttcgttggaaacggaaatatcttcacataaaaactagacagaagcattctcagaaacttctttgcgatgtttgcattcaactcacagagttgaacattccttttcatagagcagttttgaaacactctttttgtagaatctgcaatggacatttgaagcgctttgaggactatggtgaaaaaggaaatatcttcacataaaaactagacagaagcattctcagaaacttctttgtgatgtgtgtactcaactcacagaagtgaacctatcttttaatagagcagatttgaatcactctttttgaagcatttacaagtggatattttacagctatgaggctttcgttggaaacgggaatatcttcacaaaaaactagacagaagcattctcagacactcccttgtgatgtgtgcattcaattcacagtgttgaaactttcttttgatatagcagattggaaacactctttttgcagaatttgcaagtggatatttggacagctttaaggccttcactgggaacgggagtatcttcatataaaaactagacagaaatattctcagaaactaatttgtgatgtgcatactcaactcacagatttgaacacttcttttgatagagcagttttgaaacactctctttgtagaatctgcaactggatatttggacagttttgaagccatcactggaaaagggactattttcttataaaaactagacagaagcattctaggaaagttctttttgatgttttcattcaactcacaaagttaaacattccctttcatagagcagttttggaacactctttttgtagatcctgcaagtggacatttggagcgctttgaagcctatggtggaaaaagaaataacttcacataaaaaccagatagaagcatactcagaaacaactttgtgatgtgtgtactcaactcacagagttaaacctttcttttgatagagcagttttgaaacactctctttgtagattctgctaatggctatttggacagctttgaggctttcgctggaaatggaatatcttcccataaaaactagacagaagcattctcagaaacttttttgtgatgtgcgcactcaactaacagagttgaacctttcttttgaaagagcagttttgaaacactctttttgtagaatttgcaagtggatatttggactgctttgaggccttctttgtaaacgggtgtatcttcacataaaaactaggcagaagcgttctagtaaactactttttgatttttgcattcaactcacagagttgaacatttcttttcatagagcagttttgaaacattctttttgtagaatctgcacttggacatttggagcgctttgaggcctatggtggaaaaggaaatgtcttcacataaaaaccagacagaagcattctcagaaactactttgtgatgtgtgcagccaactcacagagttgaacattccttttcatagaggagtttcgaaacactctttttgtaggatctgcaagtggtcatttggagcgctttgatgccttccttcgaaaagggaatatcttcacagaaaaactagaccgaagcattttcagaaacatctttgtgatgtgtgcattaaagtcacagatttgaacccttcttttgatagagcagtttgaaacactctctttgtagtatgtgcaagtggacatttggtgtgcatgaggcctatgatgaaaaaggaaatatcttaacataaaaacttgacagaagcattctcagaatcttatttgtgatgtgtgcactccactcacagagttgaacctatcttttgatagagcagtttcgaaacactctttttgtgcaatctgcacgtggacattaggagcgctttgtggccttcgttggaaacgggaatatcttcacataaaaactaaagagaagcattctcagaaacttcactgtgatatttgcattcaactcacagagttgaacattccttgtcatagagcagttttgaaacactctttttgcagaatctacaagtggtctttggagcactttgaggccttcgtttcaaacgggaatatcttcacttaaaaactggacagaattattatcagcaacatctttgtgatttgtgcattcaactcacagaattgaacccttcttttgatagagcagttttgaaacactctctttgtagaatctgcaagtggacatctggtatgctttgaggcttgtggtgaaaacggaaatatcttaacataaaaactagacagaagcattctctgaaacttatttgtgatgtgtgcactcagctcacatagttgaacctttcttttgagagagaaattttgaaacactctttttgtggaatctgcaagcgcacatttggagcgctttgtggcctacgttggaaacggaaatatctccacataaaaactagagagaagcattcttagaaacttctttgtgatgtttgcattcaactcacagagttgaactttctctttcatagagcagttttgaaacactctttttgtagaatctggaagtggacgtttggagcgctttgaggccaatggtgaaaaaggaaatatcttcacataaaaactagacagaagcattctcagaaacttctttgtgatatgtgtactcaactcacagatttaaatctttcctttgatagagcagttttgaaacactcttcttgtagaatttacaagtggatattaggacacctttgaggctttccttggaaacgggaatatcttcatataaaaaccagacagaaatattctcagaaacttctttgtgatgtttgcattcaactcacagagttgaacattccttttcatagagcagttttgaaacactctttctggaatctgcaagtggacatttggagcgcttggtggcctatagtgaaaaaggaaatatcttcacataaaaatgagacaaaagcattctcagaaacttctttgtgaagtgtgtactcaactcacagatgaatctttcttttgctacagcagttttgaatcactccttttgaagcatttccaagtggatacttggacagctttgaggctttctttggaaacgggaatatcttcacttaaaaactagacagaagaattctcagaaacttctctgtgaagtgtgcattcaaatcacggtgttgacactttcttttaatagagcagattggaaacactttttgtagtatttgcaattggatatttggacagcattgacgctttctttggaaacggaactatcttcacataaaaactagacagaagcattctcagaaacttctttgtgatgtgtgcactcaactcacagagttgatcttttcttttgatagagcagttttgaaacactgtttttgtagtatctggaaggggacatttggagcgctttgaggcctaaggtgaaaaagaaaatatcgtcacataaacattagacagaatcattatcagaaacatctttctgatgtgtgcattcaactcacagagtagaaaccgtcttttgatagagcagttttgaaacactctctttgtagaatctgcaagttgacattgggtgtgctttgaggtctatggtgaaaaagaaatatcttaacaaaaaaactagacagaagcattctcagaaactttttgtgatgcttgcattcaactcacagagttgaacactcctcttcatagagcagttttgaaacactcttttgtagtatctggaagtggatatttggggggctttgaggcctatggcaaaaaaggaaatatcttcacatgaaaactagacagaagcattctcagaaacttctttgtgatatctgtaatgaagtcagagagttgaacctttcttttgatagagcaattttgaaacactctctttgtagaatctgcaagtggacatttgttgtgctatgagacctacagtgaaaaaggaaatgtcttcataggaaaactagacagaagcattctcagaaacttctttgagatgtgtgcagtcaactcacagagttaaacttttcttttgatagagcagattggaaacactctttttgtagtatttacaagtgggtatttggacaaatttgaggccttcgcaggaaacgagaatatcttcacataaaaacaagatagaagcattctaagaaacttctttgtgatgtgtgtcctcaattcacagagttgagcatttcttttgaaagagaagttttgaaacactctctttgtacgatctgcaagtcgatatttggagagatttgaggctctcattggaaacgggaatattttcacataaaaactaggcagaagcattctcagaaacttctttgtgatgtttgcatccaactcacagagttgacccttccttttcatagagcagttttgaaacactctttttgtagaatctgcaagtggacgtttgtaacgatttgaggcctatggtgaaaaaagaaatatctacaagtaaaaagtagccagaggcattctcagaaactactttgttatgtgtgtactcaactcacagagtaaaagctttcttttgatagagctgttctgaaacacactttttgtagaatttacaagtggatattaagtcagctttgaggctttcattagaaacgggaatatcttcacataaaaaccagagagaagaattctcagaaacttctttgtgatgtgtgcattcaactcacagagttgaaactttcctttgacagagtagatttgaaacactctttttatagaatttgcaagtggatatttggacagctttgaggccttcgctggaaatgggaatatcttcacataaaaactagacagaagcattctcagaaactactttgtgatgcttgcattcaactcacagagttgaacattacttttcatagaacagttttgaaactctctttttgtagagtctgtaagtggactcttggagcgctttgaggcctatggtgaaaaaggaaatatcttcatataaaaactaaacagacgaattctcagaaaatttttgtgatgtttgcattcaactcacagagttgaacattccttttcatagagcagatttgaaacacaatttttgtagaatctgcgagtggtcaattgtagcactttgaggccttctttcaaatcgggaatatcttcacataaaaactagacagaagcattgtcagaaacaaccttgtgatgtgtgcattcaactcacagagttgaaaccttcttttggtagagcagctttgaaacactgtctttgtagaatctgcaggtggacatttgttgtgctttgaggcctatgttgaaaaaggaaatatcttaacatgaaaactaggcagaagcattttcagaaacttctttgtaatgtttgcattcaactcacggagttgaacattcctttacataggacagttttgaaacactctttttgtaatatctggaagtggacatttggagcgctttgagacctatggtgaaaaaggaaatatcttcacataaaaactagacagaagcattctccaaaacttctttgtgatgtttgcattaaacccacagatttgatcacttcttttcatagaggagttttgaaacactctttttgtagaatctccaagtggtcatttggagcattttgaggccttctttcgaaagaggaatatcttcacatagaaactagacagaatcattatcagacatacctttgtgatgtgtgcattgaactgacagagttaaacctttcttttgttagaggagttttgaaacactctctttgtaggatctgcaagtggacattcggtgtgctttgaggcctatggtgaaaaaggaaatatcttaatataaaaactcgacagaagtattgtcagaaacttttctgtgatgtgtgcagacaactcacagagtggaacctttcttttgatacagcagttttgaaacaccctttttgtttaatctgcacgtggacatttggagtgctttgtggccttcgttggaaacgggaatatcttcacataaaaactagacagaaacattctcagaaacttcttggtgatgtttgcattcaacccacagaggtgaacattccctttcatagagcagttttgaaacactcttattgtagtatctggaattggatatattgagcgctttgaggcctatggtgaaaaaggtaataccttcacataaaaagtcgacagaagcattctcagaaacttcttagtgatgtgtgtactcaactcacagaggtaaaactttcttttgaaagagcacttttgaaacactcttcttgtaaaatttaaaagtggatattaggacacctttgaggctttcgttggaaacgggaatatcttcatataaaaactagacagaagcattctcagaaacttccttgtgatgtctgcgttcaatgtacagtgttgaacatttctattcatagagcaattttgaaacactctttttgtagaatctgcaagtggatatttggatagctttgaagatttcattggaaacgggagcatcttcatataaaaactagacagaatcattctcagaaacatatttgtgatgtgttcactcaactcacagagttgaacccttcttttgttagcagagttttgaaacactctctttgcaggatctgcaagtggatatttggtgtgctttgtggcctgtgatgaaaaaggaaatatcttaacagaaaaactagacagaagcattgtcagaaacttatttgtgatgtgtgtacacaactcaccgtgttgaatctttcttttgatacagcagttttgaaaaactcttttgtggaatctgcatgtggacatttggagcgctttgtggccttcgttggaaacgggaatatgttcacataaaaactagacagaagcattctcagaaacttctttgagatgtgtgcattcaactcacacagtggaaactttcttttcatagagcagattggaaacactctttttgtagaatttgcaaatggatatttggacagcttagaggccttcacaggaaacaggtataccttcacataaaaacaagacagaaacattctgggaaacatctttgtgatgcgtgtcctcaactcacagagttgaacatttgtttttcatagagcagttttgaaaccctctctttataggatctgcaagggaatatttggacagctttgaggctttcgttggaaacgagaatattttcacataaaaactagtcagaagcattctcagaaacttatttgtgatgtgtgcacacaactcacagagttgaacattccttttcatacagcaattttgaaacactctttttcagaatctgtaagttgtcatttggagcactttgaggccttcattcgaaacgggaatatcttcatatagaaactagacagaagcattctcagaaacttctttataatgtgtgtactcaactcacagagttaaacctttcttttgatagagcagcttggaaacactcttcttgtagaatttacaagtggatataaggacacctttaaggctttccttggacacgggaatatcttcacataaaaaccagacagaagcattctcagaaaattctttgtgatgctttcaatcatctcacagagatgaacattccttttcatagagcagttttgaaacactctttttgtagaatctgcaagtggagatatggagtgcttggtggcctatggtgaaaaaggaaatatcttcacataaaaactagacaaaagcattttcagaaacttctttgtgatgcgtgtactcaactcacagagatgaatctttcctttgctagaatagttttgaatcactatttttgaagcatttacaagtggatatttggacagctttgaagctttggttggtaacaggaatatcttcacataaaaactagatagaaacattcttagaaacttctttgggatatgttcattcaactcacagtgttgaaactttctttaaatagagcagattggaaacactctttttgtagaatttgcaaatggatatttggacagctttgacgctttcatgggaaacgggggtatcttcacataaaaactggacagaagcattctcagaaacatctttgtgatgtgtgcattcatctcacagagttgaaacttactttcgatagagtggatttgaaacactctttttgtagaatttgcaagtggatatttggacagctttgacgctttcattggaaacgggtgtatcttcccataaaaaatagacagaagaattctcagaaacttctttgtgatgtgtgtactcaactcacagagttgaaactttcttttgatagagagttttgaaacactctttttgtagaatctgcaagtggatatttggataactttgaggctttcgtgggaaacgcgaatatcttcacataaaaagtagacaggagaattatcagaaacttctttgtgatgtttgcatgcaactcacagagttgaacgttatttttcatagggcagttttgaaacactccttttgtagtatctgcaagaggactttggagtgctttgaagcctatggtgaaaaataaaatatcatcacaagaaaactaaacagaagcattctcagaaacttctttgtgatgtgtgcattcaactcacagagttgaacattccctttcatagagcagttttgaaacactatttttgtagtatctgcaaggggacttttggagcactttgaggcctatggagaaaaaggaaacatcttcacataaatactagaccgaagcattctcagaaactactttgtgatgagtgcattcaactcacagtgttgaacatttcttttgatagagcagattggaaaccctctttatgtagaatttgcaagtggatatttggacagctttgaggccttcacgggaaaccggaagatctacaaataaaaacaggacagaaacatgctaagaaacttctttgtgatatgtgtactcaactcacagagttgaacatttctttttttagaatagttttgaaacactctctttgtaggatctgcaagggaatatttggacagctttgaggctttcattggaaatgggaatatcttcacataaaaactagtcagaagtattctcagaaacttcttcatgatgtttgcattcaactcacagagttgaacattccctttcatagagcagttttgaaacactctttttgtagtatctggaaaaggacatttggaacccattgaggcctatgctgaaaaaggaaatatcttcacataaaaactagacagaagcattcccagaaacttctctgtgatgtgtgtactcagctcacagagttgaacctttctgttgatactgcagttttgaaacactctttttgtagaatctgcaagtggatatttggatagcttttaagctttcgttggaaacgggaatgtcttcacataaaaactagacagaagcattcccagaaacttttttgtgatgcttgcattctactcacagaggtgaacattccttttcatagagcagttttgaaacattctttctgaagactctgtaagtggaaacttggagctctttgatgcatacgctgaaaaaggaaacatcttcctataaaaactagacagaagaattctcagatacttctttgtgatgtgtgtactcaactcacagacttgaacttttcttttgatacagcagttttgaaacactcctttggagagagtgcaagtggatatttggatagctttgaggatttcgttggaaacgggaataccttcacctaaaaactagagagaagcattctcagaaacttatttgtgatgttgcattcatcttacagagttgaaaattcctattcatagagcagttttgaaacactctttttgaggaatctgcaagtggatatttggagtgatttgagacctatggtgaaaaaggaaatatcttcacataaaaagtagacagaagcattctcagaaactactttgtgatgtgtgtactcaactcacagagttaaacctttcctttgatacagcagttttgaaaaactctttatgtagaatctgcaagtgcacatttggagcgatttgagacctatggttgaaaagtaaatatcttcacataaaaagtagacagaagaattcttacaaattacttcgtgatgtgtgtactgaagtgacagagttaaacctttcctttgatacagcagttttgaaacactcttcttgtggaatttacaagtggatattaacacagcaatgaggatttcattggaaacgggaaaatcgtctcataaaactagacagaagcattctcagaaacttctttgtgatgtgtgcattcaactcacagagttgaaacattcttttgatgaagcagattggaaacactcttttgtagaatttgcaagtgaatattttgactgctttgacgttttcgctggaaacgggttgatcttcacataaaaactagacagaagcattctcagaaacttctatgtgatgcttgcattcaactcacagagttgaacattccttttcattgagcagttttgaaacactctttttgtaggatctgtaagttgaaacttggagcgctttgaggcctatgatgaaaaaggagatatcttcccataaaagctacacacaa

SEQ ID NO: 485 - DNA, 105125 bp, Homo sapiens
  source 1..105125: mol_type = other DNA
gcagcagtcttacagaatcctttgtgagttactaacattcagaacctcgtagcagtgttctggaatcgtgtgtaagggacaaactttctgaaaccagcagcagtgttttggaatcccatgtgagggagaaaaactcagaacccagcagcagggttctggaatcctatgtgagtgacaaacactaagaaatctgcagcagttttatggaatcctatgtgagggacaaacactcagaactcagcagccgtgttctggaatccgatgtgagggacaaacactcagaaatcagcagcagcgttctggaatactaggtgagagacaaacactcagaacacagcagcagtgtactggaagcctatgtgagtgacactcagaaaatagcagcagtgttatggaatcctctgtgcgggacaaacactcagaacccagcagcagtgttctagaatcgtttgtgagggacaaacattcagagactcgtagcagtgttgtggaatcgtatgtgagggacagacagaatgtggcagcagtgttctccaatcccatgtgagggaaaaacactcagaacccagcagcagtgttctagaatatttgtgaggcacaaacattcagaaactagtagcagtgatctggaattgtatatgaaggacaaacactctgaaaccagcagcacagttttggaatcccacgtgagggaaagacattcacaatccagcagcagtgttctggaatcctatgtgagggacaaacactcagaacccagcagcagtgttctagaatcctttctgaggcacaaacattcagaaattagtagcagtgttgtggaatcgtacgtgagggacaaacactctgaacccagctgcagtgttttggaatcccatgtgaggaacaaacactcagaagccagaagcagtgttctggaatcctatgtgagtgacaaacactcagaacccagcagcagtgttctagaatcctttgtgaggcacaaacattcagaaactagtagcagtgttctagaatcgtatgtgagggacaaacactctgaacccagcagcagtgttttggaatcccatgtaaggaacaaacactctgaacccagcagcagtgttttggaatcccatgtgagggacaaacactcagaagccagaagcagtgttccggaatcctatgtgagtgacaaacactcagaacccagcagcagtgttctagaatcctttgtgaggcacaaacattcagaaactagtagcagtgttctggaatcgtatgtgagggacaaacactctgaacccagcagcagtgttttggaatcccatgtaaggaacaaacactctgaacccagcagcagtgttttggaatcccatgtgagggacaaacactcagaagccagaagcagtgttgcggaatcctatgtgagtgacaaacactcaaaatccaaaagcagtgttctagaatcctttgtgagggacaaaccttcagaccctcaaagcactgttctggaatactgtgtgagggaaaaacactcagaaaccagcgggagtgctctggaatcccttgtgatggacaaacactcacagtcctaaagcagtattctggaatcctttgtgagggacaaaaactcagaacccagcagcagtgttttggaataccatgtgaggtacaaacacgcagaacccagcagcagggttcacgaatcctttgtgagggacaaaccttctgaccctcaaagaagtgatctggaatcgcatatgagggccaaacacttcgaacccagtcgcagggttctgcaatgcattgtgatggagaaacattcagaccgtcgtagctgtgttctgtaatcctatgtgagggacaaacactcagaacccagtaggagagttttagaatcctttgtgagggacaaagactcagaacccatcagcagtgttctggaatcctgtgtgcgggacaaacactcagaacccagccactgtgttctggaatcccatctgagggacaagcattcagacactcgtagaagtgttctggaatactatgtgagggacaaacatacagaacacagtagcagtcttctggaatcccatgtgagggacaaacacgcagaacccagcagcagggttctcaaatcctatgtgagtggaaaacaatcagaacccagaagcagttttctagaatcctttgagagggacaaaccttctgaccctcgaagaagtgatctggaatcgtatgtgtgggcaaaacactccgaacccagtagcaggattctggaaacttatctgagagacaaaaattcagaacccagcagcagtgttctggaatcctatgtgaaggaataatactcagaactcagccacggtgtttctggaatcctatctgagggataaacattcagaccctcgtagcagtgttctggaatcctgtgagggaaaaacactcagaatccagcagcagagttctggaatcctttgtgagggacaaacactcagaacccagcagcactgttctggaatcctttgtgagggacaaacattcagaacctcgtagcagtgctctggaatcgtacatgagggacaaatactctgaacccagcagcagtgttttggaatcccatgtgagggacaaacactcagaacccagcatcagtgttctggaatccgttgttatgggcaaacatttagaccgcctagcaatgttctggaatcctatttgaaggagaagcactcagaaaccagcaacagtgttctggaatcctatgtgagcaagaaaaactccgaacttagcagcagtgttctggaatcctaagtgagggacaaaacctcagaacccagcagcagtgttctggaatcccacgtgagagaaaaacactcacaacccagcaacagtgttctggaagcctatatgagggacaaatactcaaactcaccaaaagtgttctcgaatactatgtcatggaaaagcactcagaatccagcagcagtgttctggaatcccttgtgatgggcagacattcagaccctcgtagcagagttctggattcctatgtgagggacaaacaatcagtacccagtagcactgttctggaatcctatgtgagggacaaacactcagaacccagcagcagtgttctggaatcctatatgagggagaacactcacaacccaggagcagtgttgtggagtcctatgtgaggacaaactttcagaacccagcggcagtgatctggaaatctatgtgagggacaaacactcagaaaccagccactgtgttctggtttcctatatgagggacaaacatacagacactcgtagaggtgttctggaatcctatgtgagggacaaagactcagaaaccaatagctgtgctctggaaacctttgtgagggacaaacacacagaactcagcagcagtattctggaatcctttctgagggaaaaacattgcgaccctcctagcagtgttctggaatcctacgtgagggacaaaaactcaggacccagcagcagtgttccggactcctatgtgagggataaacactcagaaaccagcagcagtgctcaggaatcctttgtgaggaacaaacatacagaactgagcagcagtgttttggaatcctacgtgagggacaaacattcagtacatcttaagagtattctgaaatcgtatgtgagggacaaacactcgcaacccagcaacagttttctggaatcctatgtgagtgacatacactcagaccccagcagctctgttctagaatcctatgtgaggaacaaacactcagaacccagcagtagtgttctagaatcctttgtgagggacaaatgctcagaacccagcagcagtgttctagaatcctttgtgagggacaaacgctcagaacccagcagcagtgttctagaatcctttgtgagagacaaacacaaagaagccatcagcagtgttctagaatcctttgtgagggacaaacactctgaacccagcagcagtgttttggaatctcatgtgagggacaaacactcagaacccagcagcagagttcttgaatcttatgtgggtgaaaaacaatcagatcccagtagcagtgttccagaatcttttatgagggacaaaacttcagacccttgaagaagtgttctggaatcatatgggagggagaaatactcagaacccaacagcagggttctggaatcctatgtgagggacaaacactcagaacccaggagtagtgttccggaatcctctgtgagggaaaaacattcagaacccagcagcagtgttctggaaacctatgtgagtgacaagaatttggaacacagcagtagtgttctagaatcctttgtgagggaccaacattcataccctcgaagcagtgctctggaatcctaagtgagggacacacactcagaaccaagcagcagtgttctggaatcctaagtgagggacaaacactaagacccagaagcaaggttctggaatcctatgtgagggacaagcactcagaaactagcagcgttgttctgcaatgctatgtgagggacaaacactcagcacccagcaactctgttctggaaacctatatgagggacaaacattcagacacttgtagaagtgctctggaatcctacgtgaggacaaacactcagaaactagcagcagtgctcagcaatcttttgtgagggacaaacatacagaacacagcagcagtgttttggaatcctatctgagtgacaaacactcagaaccctgcagcagtgttctggaaacccatgtgacggacaaacactcaggacccagcagcagtgttccagaatcctttgtgaggaacaaacacacagaaaccagcagcagtgttctggaaccctgggtaagggacaaacactcagaacgtaggagcagtgttctagaatccttcatgagggaaaaactctcagaatccagcagcagtgtcctagaatactttttgagggacaaacactcagaagccagcagcagtgttctggaatcctatgtgagggacaaaaaatcagaacccagccattgtgttctggaatcctatctgagggacaaacattcagacactcgtagaagtgttgtggaatcgtatgtgagggacaacactcagaacccagcagcagtgttctggaaacctatgtgagtgacaagcatttggaacacagcagtagtgttctagaatccttttttgagggacaaacattcgtaccctcgaagcagtgttctggaatcctaagtgagggacacacactgagaaacgaggagcagtcttctggaatcccatgtgagggacaaacactcagaacccagcaggtgtgttttgaaatcctaagtaagggacaaacactcagaacccagccactgtgttctggaatcctatctgagggacaaacattcagacacttgtagaagtgctctggaatcctacgtgaggacaaacactcagaaaccagcagcagtgctcagcaatcctttgtgagggacaaacattcagaacacagcaggagtgttttggaatccgatctgagtgacaaacactcagaacccagaagcaggtctctggaatcctatgtgagggacaaacaccaagacccagcagcagtgttttggaatcctatgtgagggacaaacactcagaacccagcagcagtgccctggaatcctatgtgagtgacaaacactcagaacccagcagcagtgttctagaatcctttgtgagggacaaacactcagaacccagcagcagtgttctagaatcctttgtgagggacaaacactcagaacccaacagcagtattctggaatcctatgtgagggacaaacactcagaactcagcagcagtgttctagaatcctttgtgagggacaaacactcagaacccaacagcagtattctggaatcctatgtgagggacaaacaatcagaacccagccactgtgttctgaaatcctaggtgggggacaaatattcagacactcatagaagtgttctggaatcctatatgagggacagacactcagaaaccagcagcagtgttctgcaatcctttgtgagggacaaacatacagaatacagcagcggtgttctggaatcctattttagggacaacactcagaacccaacagcagtgttctagaatccttagtgagggacaaacattcagaacctcggagctttgttctggtatcccaagtgagggacaaacactcacatcccagtagcagtgttctggaatccttggtgatggacaaacattcagaacctcgaaggagtgttctggagtcctatgtgcgatacaaaccttcagacccccgtagcagtgttctcgaatgctatgtgacggacaaacaatcagaacccagcagccgtgttctgtagtactatgtgagggacaaacactgagaaccctgcagcagtggtctggaatcttttgtgagggacttacattcaggccttcttatcagtgttatggaatcctatgtgagggaccaaccctcagaacccagcagcagtgtgctggattcctttctgaggcacaaacattcagagcctcgtagcagtgttctcgaatcctatatgagggacaaacaccccgaacccagcagcggtgttttggaatcctttgtgagagaaaaactttctgaccctcaaagcagtgttctggaatcctatgtgacagagaaacactcaaaacccagcagccgtgttctggtatcctacatgaggggcaagcattcagaccatcatagcagtgttctggaatcatatgtgagagacaaacattcagaccctcgtagctgtgttctgcaatcctatgagagggaaaaacattcagaacccagcagcagtgttctggagtcctttgtgacggacaagcattcagacccttgtagcagtgttctggaatcctatgtgagagacaaatattcaaaccttcatatcagtgttctggatttctatgtgagggtcatacactcagaacccagcagcagtgttctggaatcctatctgagggagtaacattcagacccttgcatcagagttctgggatcctatgtgagggacaaacactcagaaactagcagcagtgttctggaatcctatgtgaaggacaaacactcagaacccagcaacagtgttctggaatcccatgtgagggactagcattcagaccatcgtagcaatgttctggaatgctatgttgcggagaatccttaagaccgtcgtaccagtgttctggaatcctatgagagggacaaacaatcagaacccagtagcagtattccggaatcctttttgagggacaaacactcggaacccagcagcagtgttctggaatcctatgtgtgggacaaactctcatatcccagcagcagtgttccagattgctatgtaagggacaaacactgagaacacggcagcagagttctggaatcctttgtgaggaacaaagtttcagaccctcatagcagtgttctggaataagatgtgaggctcactcagaacccagaaaaattgtcctagaatcctatgtgagtgacagaaactcagaacccagcagcagtgttctggaatcctttgtgagggacaaacattcagaaccacggagaagttttctggaatactatgtgagggtaaacaccaagaacccaggagcagtttctcgaaaatgatgtgagggaaaagctttcagacctttgtaccagtgttctggaatccgatgtgagggacaaatattcagaaccttgtagcagtgttctgtaatcctaagtgagggacaattactcagaacccagcagcagtgttctggaatcctttgtgagggacatagattcagaccctcttagcagtattctctaatcctatgtgagtgacaaacattcagacactcgtagcagtgttctggaaacctatatgtaggacaaacactcagaacccagcagcagtgttctggaatcctatttgattggcaaagacacagaacccatcagcagtgttctggaaaaccagcagcagagttctggaatcctatgtgagggagaaatcctcagaatccaccagtgtgttttggaatccattgtgaaggacacacattcagaccctcctagaagtgttctggaatcctatgtgagtgacaaactttgagacccttgtagaagtgttcaggaatcatatgtgagtggcaaacactaagaaccgagcagaagtgttccggaatcatatttgattgacaaacacacagaaccccgcagcagtgttctggaatcctttgtgaaggaaaaaccttcagaaacttgtagcagtgttctggaatccaatgtgagggagaaacactgagaacccaacagcagtgttctggaatcctatgagagggtcaaacactcagaacccagcagcagtgttctggtatcctatgttatggacaaacactcagaacccagcagcagtgttctggaatcctatgtgatggacaaagacacagaacccaggagcaatattctagaatcttttgtgagggacaaacactcagaaccccgcagcagtgttctgtaatcctttaggagggaaaaactttcacaccctcctaacagtgttctggaatcctaggtgagggaaaaacattcagacactcctaccattgttttggaagacaatatgagggcaaccactcagaacccagcagcagtttcctggaaacctttatgagggataaacattcagaacctcgtagcagtgttttgcaatcttatgtgagagacaaacactagaacccagcagcagtgttctggaatcctatgagagggagaaacactcagaacccagcagcagtgttctggaatcctatgtgagtgacaaactttctgaatttcgtagcagtgctctggaattctctgtgagggacaatcactgagaaatcagcagcagtgttctggaattctatgtgagggacaaaaattcagaccctcctaacagtgttctggaatcctatgtgaggtacaaatcctcagaacctagcagcaatgttctagaatcctttgtgagggacaaacagaaaccaaccgaagtgttctagaatcctttgtgaaggacaaacatgcagaacctcgtagcagtgttctggaattctatgtgagggacaaacactcagtatccagccacattgtactggaatcctatctgagagcaaacattccgaacctcgtcacagtgttctggaatcctatgtgagggacaaacactaagaattctgcagcagtgccctggaattctttgtgtgggaccaaaaaacataacccagttgcagtgttctaaaatcctttgtgaggtaaaaacattcagatcctcgtagcagtgttctgggatcctatctgagggacaaatactcagaatccagccactgtgtactggaataatatatgagtgcaaacattcagaacctcatagaagtgttctggaatcgtatgtgagggataaacactaagacatctgcagcagtgctctggattcctttgtgagggacaagcaaacagaacccagtagcaatgtcctacaatcctctgtgagagaaaaacattcagaacctcgtagcagtgttctggaatcctatgtgagggaaaaacattcagaccctcgaagctgtgatctggaatcctacctgagggacaaacactcagaacccagcagcagtgttctggaatcctttaggagggaaaatattcacaccctcataacagtgttctggaatcctatgtgagggaaaaacattcagacactcgtagcattgttctggaatccaatataagggcaaacactcagaacccagtagcagtgttctggaaaactttgtgagggataaacactcagaacccaacagcagtgtattggaatcctatgtgaggaacaaacactcagaatccagaagcagtgttctggaatcctatgagtgaaacaaacactcacaacccagcagcagtgttctggaatcccatgcgagcgacaaactttctgaacttcctagcagtgttctggaattctatatgagggacaaactctgagaagccagcagcagtgttcttgaatcctaagtgagggacaaacactcagaacccagcagcagtgttctggaatcctatgagagtgacaaacactcagaacccatcagcagtgttctagaatcctttgtgagggacaaacactcagaacccagcatcattgttctagaatcctttgtgagagtcaaacattcagaacctggtaacagtgttctggaatcctatgtgagggacaaacactcagaatccagccattgtgtacttgaattctagctgagggcaaacattcagaaccccatagaagtgttctggaatcctatgtgtgggacaaactctaagaaatctgcagcagtgctctggaatccattgtgaggggcaaacaaacataacccagtagcagtgttctacaatcctttctgagggaaagacattcagaccatcttagcagtgttcttgaatcctatgtgagggaaaagcattcagaccctcgttgcagtgatttggaatcctatatgtgggacaaacactcagaatccagcagtaatcttctggaatcctttggtagggaaaaacattcaaactatagaaacagtgttctggaaacctatgtgatggaaagacattcgggccctcttggtattgttctggaatccaatatgagggacaaatgctaacaactcagtagcagtgatctgaaacactttgtgactgataaacattcagacccttgtagcactgttctggaatcttatgtgagggacaaacactcagaacgctgcagcagtgttctggaatcctatgtgtgtgacaaactttcagaacatcgtagcagtgttgtggatttctatgtcatggacaaacactcagatggcagtgagggacaaacactcagaaaccaacagcagtgttctggaatcctatgtgatggacaaacacacagaatccagcagcagtgttctagaatcctttgtgagggacaaacactcagaactcagcagaagtgttctagaatactttgtgagggacaaacattcagaacctcgtaacactgttctggaatcctatgtgagaggcaaacactcaaaatccaaccactgtgtactggaatgctatctgaggctaaacattcagaacctcggagaagtgttctggaatcctaagtgagggacacacactaagaaatctgtggcagtgttctggaatcttttctgaggacaaactaaaagaactcagtagcagcattgtacaatcctttgtgagggaaaaatattcagaccttgtagcagtcttctggaatcctatgtgagggaaaaacattcagaccctcgctgcagtgttctcaaatccaacatgagggacaaacactcagaacccagtagcattgttctggaaacctttgtgagggataaacattccgaccctcgtagcagtgttctggaatcctaagtgagggacagacactcagaaccaagcagcagtgttctgaaatcctatgtaagcgacacagtttcagaatttcatagcggtgttctggaattctatgtgaggaataaacactcagaagccagctgcagtgttctggaatccaacgtgagggacaaacattcagaacccagcaacagtgttctcgaatcctatgtgagggactaacccagagaacacagcagcactcttctagaatcctttgtgagggaacaaacactcagaacccagaagcagtgttctagaatcctttgtgagggaaaaacaatcagaatctcgtagaagtgttctagaatcctatgtgagggacaaacactcagaatccagaggctgtgtactggaatcctacttgagggcaaacattcagaacctcggagaattgttctggtatcctatgtgagggacaaaccctaagaaatctggagcatcgctctgtaatcctttgtgagggacaaacaaacagaacccaggttcagtgttctacaatgctttgtgagggaaaaacattcagactctcgtagcagtgttctggaatcctttttgaggaacaaacactcacaacctagcagcagtgttccggtatcctttggttgggaaaaacattcacacgctcataacagtgttctggaatcctatttgaggaacaaaaactcagaacccagcagcagtgctctggaatcctatatgggggacagacactcagaatccaacagcagtttggtggaatctcatgtgagagacaaactttcagaacttcatagcagtgttctggaattctatgtgagggacaaatgcacagaacccagcagcagtattctggaatcctaggtgaccgacaaacactcagaatccagcagcagtgttctggagtccaatgtgagggacaaacactcagaacccagcagcagtgttctagaatcctttgtgagggacaagcattcataacctcgtaacagtgttctggaatcctatgtgagggacaaaaactcataatccagccactgtgtactggaatccaatctgagggcaaacattcagtaccttgtagaagttttctggattcctatgtaagggagaaacactaagaaatcagcagcagttctcttgaatactttgtgagggataaacaaacagaacccagtagcagtgttctacaatcctttgtgagggaaagacattcagaacctcgtagcagtgttttggaatactacgtgtgggaaaaacattcagaccctcgtagcaggattctggcatcctatatgagggacaaacactcagaacctagaagcagtgttctggagtcatttggaaaggaaaaatttcacaccctcgtaaccatgttctggaatcacatgcgagggaaaaacattcagaccctcgtagtattgttctggaatccaatatgagggagaaacactcagaacccagcagcagtgttctggaagcctttgtgagggataaactctcagaccctcgtagcactgttctggaatcccatgtaagggacaaacactcagaacccagcagcagtgatctggaatcctatatgagggaaaaccactcagaacacagcagcagtgttctggaatcttatgtcagcgacaaactttcagaacttcgtagcagtattctggaattctatgtgagggacaaacactcagaagccagcagcagtgttctagaatactatgtgtgttataaacactcagaacccagcagcagtgttctggaatcctatatgagggacacaccctcagaacccagcagcagtattctagaatcctttgtgagggacaagcactcagaacccagcagcagcgttctggaatcctttgtgagaaagaaacactcaaaacccagcagcagttttctagaatcctttttgagggactaacattcagaacctcctagcagtgctctggaatcatatgtgagggacaaacattctgaatccagcatcagtgttctggaatcccatgtgagggacaagtgctcagaacccagcagcagtgttctggaatcctatgtgaggtacaacagtcagaacccagcagctgtgctctggaatcctatgtgagggacaaacactcaaaacccagcagcagggttctggtatcccatgtgcgggacaaacactcagaatccagcagtagtgttctggaatcctttgtgatagacaaacattcagactctcataggtgtgttctggactcgtatgtgagggacaaaccctcagaaaccagcagcagtgttctggaatcctatgtgagtgaaaaacaatcagaacccagcagcagtgttctagtttcctttatgaggaacaaaatttcagaccctcgaagaagtgttctggaatcgtatgtgagggagaaacactcagatcccagcagcagtgttctacaatcctttgtgagggaaaagcactcggaacccagcagcattgttttagaatactctgtgagggactaacattcagaacatcctagcagtgttctggaatcccttgtgagcaacaaacaccctcatccctgcagcagtgttttggaatcccacgtgagggacaaacactcagaacccagcaagtgggttctggaatgctatctgagggacaaactttcagatgatcgtagacgtgttctggaatcctatgtgtgggacaaaaactcagaacccaacagcagtgctcgggaatcctttgtgagagacaaacatacagaaccgagaagcaggcttttggaatcctatgtgagtgacaaactctcagaaaccagcaacagtgttctggaatgctatgtgacggacaaacactcagacccagcagctgtgttttggaatcctgtgtgagggacaaaccctcagaactcagcaccagtgttctggaatcccatgtgagtgacaaccattcagaacgcagcagcagtgttctggaatcctatgtgagggacaaacactcagatcccagcagcagtgtcctagaatcctttgtgagggacaaacactcagaacccagcagcagttttctagaatcatttttgagagacaaacattcagaacatcttagcagtgttctgaaatcctatgtgagtgaaaaactctcagaatccagtagcaatattctggaatcctatgtgagggactaacactgagaacccagctgcagtgttctggaatcccatgtgagggacaacccctcagaacccagcagcagtgttctggaatcctatgtcagtgacaaacactcataacccagcagaagtgttctggaatcttatttaagggacaaacactcaggacccagagcagtgttctagaatctttgtgagggacaaacgctcagtacccagccactgtgttctggaatcctatatgaggaacaaacactcacaacacagcagcaatgttctagaatcgtttgtgagggacaaaaattcggaatctcgtagcagtgttctggaatcatatgtgaggaacaaacaccctgaacccagcagcggtgttttgtaataccatgtgagggacaaacactcagaaatcagcagcagtgttctagaatcctttgtcagggacaaacctgcagaccctcgaagcagtgttctggaatcatatgtgagggacaatcactcagaacacagtggctgggttcgggaatccaatgttagggacaaatcctcaaaacccagcagtagtgttccggaatcctgtgtgagggacaaacattcagaacccagccactgtgttctggaatactacctgaggaacaaatttcagacactcgtagaagtgttttggaatcctatgtgagggacaaacattcagaacacagtagttgtctcctggaatcctatgtgcgggacaaacactcagaacccagcagcagtgttctggaatcctatgtgagagacactcagaacccagaagcagtgttctggaagtcccatgtgagggataaacactccgaacccagcagtagttttctggaatcctatgtgagtgacacacaggaaccagcagcagagctctagattcctttgtgagggacaaacattgggacccttgaagctatgttctgaaatcctatgtgagggacaaacactcagaacccagcagcagtgttctggaatcctttgtgatggacaaacattcagaccgtcctagaagtgttctgaaatcctatgtgagggacaaacactcagaacccagcagcagtgttctggaatcctttgtgatggacaaacattcagaccgtcctagaagtgttctgaaatcctatgtgagggacaaacactcagaacccagcagcagtgttctggaatcctttgtgatggacaaacattcagaccgtcctagaagtgttctggaatcatatgtgagggacaaactctcagaacccagcagcagtgttctggaatcctatgtgagggacaaacactcagaaaatggcagcagtgttttggaatcctgtgtgatcgagaaagattcagaaattcgtaacagtgttctggaatcccatgtgagggctaaacactcagaaccctgcagcagtgttctggaatcctatgtgagggaaaaacactcacaacccagcagcagtgttctcaaatcgtatgtgagggacaacactcataacccaccagcagtgttctggaatcctctgtttgggacaaacattcagaaactcatagcagtgttctggattcgtatgtgagggagaaacactccgaacccaacatcagtattttggaattccatgtgagtgacaaacactcagaacccagcatctctgttctggaatcctatgtcggggacaaacactcagaacccagcagcagtgttctggaaccctatatgaggtaaaaaccctcagaacccagcagcagtgtatcataatcctgtgtgaaggacaaagattcagaattcgtagcagtgttctggaaccctatgtgaggtaaaaaccctcagaacccagcagcagtgtatcataatcctgtgtgaaggacaaagattcagaattcgtagcagtgttctggaatcccatgtgagggacaaacactcagaacccagccgcagtgttctggaatcctatgtgagggacaaacaatcagaaaccagcagcagtgttctggaatcctatgtgagagacaaacattcagacactcatagaattgttctggaatcctacgtgattgaaaaacacgcagaagccagcagctgtgctctggaatcatttcagcggaaaaacaaacagaaccagccgcagtgttgtgcaatcacttgtgtgggaaaaacattcagacactcgtagcagtgttctggaatcctatgtgatggaaaaactctcagaacctatcagcagtgttctggaatcctatgtgagagacaaacacacagaatacagcaacagtgttctggaatcctatgtgagcgacaaacattcagaacttcgtagcaatgttctggaatcctatgtgagggacaaacactaaaaaccctgccactgttctggaatcctatcggagggacaaacattcagacactagtagaattgttctggaatcctacgtgagggacaaacactcagaatccagcagcagtgctctggagtcctttgtgagggacaaataaacagaacccagcagcagtgttctggaatccattctgagagaaaaacattaagaccctcctaacagtgttctggaatcctatgggagggacaaacactcaggacgcagcagcagtgttttggaatctcgtgtgagctgcaaagattcagaatttcatagcagtgttcacgaatccaatgtgagggacaaacactcagaacccagcagcagtgttctggaatcctatgggaggtacaaacactcagaacccagcggcaatgttctgtaatcctatgtgagggacaaacactcagaacccagcagcagtgctctgtaatcctttgtgacggacaaacaaacagaacccagcagcagtgttctggaatcctatgtgagggacaagcactcagaacccagcagtagtgttctggaatcctttgtgagggacaaacattcataacctcgtagcagtgttctgaaatcctatgtgagagacaaacactcaaaacccagccactgtgttctggaatcatatgtgagcgacaaacactcaggcactcgaaacagtgttctggagtcatatgtgaaggacaaacattcagaacccagaagcagtgttctggaatcctttgtgatggacaaacttttagaccctcataggtgtgttctaggatcccatgtgagatacaaacactcagaacccagtatcagcgttctggaatcctatgtgagggataaacactcagaacgcagcagcagtgttctgaaatcttgtgtgagggacaaacactcagaacccagcagcagtgttctggaatcctatgtgagggacaaacactcagaacgcagccactgtgttctggagtactatctgagagacaaacattcagacactcctagaattgttctggaatcctacgtgagggccaaacactgagaaaccagcagtggtgctgtggaatcctttgtgaggaaaaacaaagagaacccaacagcagtgttctggaatcctttgtgagggacaatctctcagaacccagcagcagtcttctggaatctcatgtgagggacaaacactcagaaccgagcaacagtgttctacaatcctttgtgagggacaaaccttcagacactcgaagcagtgttctggaatcctatgtgagggacaaacactcaaaactcagcaacagtgctctgtaatcctttgtgaggaacaaagaaacagaacacagtggcagtgttctggaatcctatgtgagggacaaacactcagaacccagccactgtgctctggaatcctacctgagggacaaacattcagacactcgtagaagtgctatggaatcccatgtgagggtcaaacactaagaaacatgtagcggttgtctggaatcccttgtgagagacaaacagaacccagcagcagtgttctggaatcgtttgtgagggaaaaacattcagaacctcctagcagtgttctggagtcctatatgagggagaaacactcagaactgagcagcagtgttctggaatcagatgtgagggacaagcattcagaacccaacagcagtgttctagaatcctttgtgagggacaaaccttcagagacccgaagaagtgtactggaatcctagatgagggacaaacactcagaaaccatcagcagtgctctgtaatcctttgtgcgggactaacgaacagaacccagcagaagtgttccggaatcctatgtgagggacaaactctcagaacccggcagcagtgttgtggagtctattgtgagggacaaactctcagaacctcctagcagtgttctggaatcctatgtgagggacaaacactctgaacccagcagcagttttctggtatcctatgtgagggacaaacactgagaacccagcacccatgtttcggaatcctatgtgagggacaaacactcagaaaccagcagcattgctctggattcctaagtgagagacaaacactcagaacccagcagcagtgctctgtaatcctttgtgagggacaaacaaacagaacccagcagcagtgttctggaatcctatgtgaggaacaaacactcagaacccagcagaagtgttctggaatcctgtgtgagggacaaaccttcagaacctcttagcagttttctgaaattctgtgtgagtgacaaacactcttaacccagcagaagtgttctggaatcccatgtgaggaacaaacactcagaacccagcagccatgttctggaatcctatatcagtgagaaacactcagaacccagcagcaatgttgcagaatcctttgtgagggacaaacattcagacactcgaagcaatgttctggaatcctatgtgagggacaaacagtccgaacccagcagcagtgttctggaatcctttgttaaggacaaacattcagacactcgtagcagtgttctggcatcctatgtgaggggcaaacactcagaaccctatagcagtgttctggaatcctatgtgagggataaacactcagaatccagcagcagtgttgtggaattctatgtgagggacacacactcagaacccagcagaagtgttctggaatcctatggagggacaaacactcagaacccagcagcagcgttccggaatcctatgtgatggacaaacactctgaaccaaccagcagtgttctggaatcccatgtgagggacaaacactcagaacccagcagccgtggtctggaatcctatgtcagggacaaacactcagaacccagcagcagtgttttggaatcctgtgtgagcgacaaagattcagaacttagtagcagtgttctggaatctcaggtgcgggacaaacactcagaacccagtggcagtgttgtggaatcctatgttggggacaaacactcagaacccagcagaagtgttctggagtcttatgggagggacaaacagtcagaacccagccgctgttttctggaatcctatcagagagacaaacattcaggcactcatataagtgttccggaatcctatgtgttggaaaaacacccagaaaccagcagctgtgttttggaatcctttgtgaggataaacaaacaaagccagcagcagtgttctggaatcgtttgtgagggaaaaacattcagatccccgtagcagtgttctggaatcctatgtgagggacaaactctcaaaacccagcaacagtgttctggaatcctatgtgaggaataaaagcacagaacacagcagcagtgttcttcaatcctatgtgagtgacaaatattcaaaacttaatagcagtgttctggaatcttatgtaaaagacaagcactcaaagcacagccactgtgttctggaatcttatctgagggacaaacattcagacactcgtcgaagtgttctggaatcctatgtgagggacaaacattctgaatccagcagcaatgctctgagtcctttttgagggacaaacaaacagaacccaagagccgtgttctggaatcctttctgagagaaaaacataaagaccctcgtaacagtgttatcgaatcctttttgagggacagacactcagaacccagaggcagtgttttggaatgccgtgtgagtgacaaagattcataacttcgtagcagtgttcacgaatccaatgtgagagacaaacacttaaaacccagcagcagtccccaggaatcatttgggagggacaaacattcagaacccagcagccatgttctggaatcctatgtgaggggcaaacactcagatccctgcagccgtgttctggatcctatgtgagtgacaaacactcagaacccagcagcagtcttctggaataccatgtgagggacaaacactcagaaaccagcagcagttttccggaatcctatgtgagtgacaaacactcagaaggcagcagcagttgtctagaatcctttgtgagggacaaaccttgagaccctcgaagcagtgttctggcatcctatgttagggacaaacactcagaacccagcagcagtgttctggattcctttgtgatggacaaatattcagaccgtcgtagtagtgttctggaatcctatttgagggagaaacactaagaaagcaacagaagtgttccggattcctatgtgaggaacaaacactcagaacacagcagcagtgctcaggaatcctttgtgagggagaaacatacagaatccagcagctgtgttttggaaacctatgtgagggaaaaacattcagtacctcctaggagtgttcgggaatcgtatgtgagggacagacagtcagaacccagcagcagagttctggaattctatatgagggacaaacactcagaatgcaacagcagtgttctggaatcctatgtgttggacaaatactcagaagacagcaccatttttctggaatcctatgtcagataaaaacactcagaacacagcagcattcttccggaatactatgtgggtgacaaacactcagaacccatcagtaggattctggaatcctatgtgagggacaacactcagaacccagcagcagtgttctggaattctaagtgagggacaaacactcagatctcagccaatgtgttctgcattcctatctgagggacaaatattcagacactagtagaagtgttcaagaatcctttgtgagggacaaagtcacagaaaccagcagctgtgctctggaaacctttgtgaggcacaaacaaacggaacccagatgtagtgttctggaatactttgtgaggaaaaaacattgagaccctcatagcagtgttctggaatcctacgtgagggacacaccttcagaacccagcaacagtgttctgaaatcctatgtgagagacaagcattcagaacgtcgtagcagtatttgggaatcccatgtggagaacaaacactcagaacccagccactgtgttctggaatcctttctgagggacaaacagtcagaaaccagcagcagtgctcaggaatcctttgtgaggtacaaacatacggaacccagcagcagtgttttggaatcctatgtgagggacaaacatacggaacctcctagcagtgttctggaatcctatgtgtgacaaaccctcagaacccagcagcagtgttctagaatcccatatgagagacaaaatctcagaacccgtcagcagtgttctggaatcgtatgtgagtgacaaacactcagaacccagcagcagtgttctggaatcccatgtgagggacaaccacgcagatcccagcagcagttttctggaatcctatgtgagagtaaaacactcagaagccagcagcagtgctctagaatcttttgtgagggacaaacagtgagaccttcgaagcagtgttctggaatcccaggtgggagacaaacactcagaacccagcagcagtgctccggaatccaatgtgatggacaaacattcagaccctcatagcagtgttctggaatcctatgtgagggacaaacactcagaacccagccactgtgttctggaatcctatctgagggacaaacattgagacactcgtataagggttctggaatcctatgtaaggaacaaacactcagaaaccaacagcagtgctctggaatcctatgttagggcaaacactcagaacccagccgcagtgttctggaatcctttgtgatgggcaaacattcagaccctcgtagcagtgttctggaatcctatgtgagggacaaacactcagaacccagcagcagtgctctggattcctatgtgaggacactcagaatccagcagcagtgttttggaatcctgcgtgatcaataaagatttacaacttcgtagctgtgtgctggaatcccatgtgcgggacaaacactcagaacccagcagcagtgttctggaatcttatgtgacggacaaacactcagaacccagcagtagtgttctgtaatcctaagtgagggagaaactctcagaacccagaagcagtgttctggaatcctttgtgaaggacaaactttcagaacctcatagcattgttttggaattgtatgtgagggacaatcactctgaacccagcagcagtgttctggaatccaacgtgagggataaacactcagaacccttcaacagtgttctggaatcttatgtgagtgacaaaccctcagaactggcagcagtgttctagaatcctctatgagggacaaatattcggaacatggaagcaagattgtggaatcctatgtgagggagaaacactcagataccagcagcagtgttgtggaatcctttgggatggacaaacattcagactctcgtagcagttttctataatcctatgtgattgacaaaggttcataacccagctgcagtgttctgaaatcttatgtgagagagaaacattcagatattcacagcagtattctggaatcctacgtgggggacaagcacgcagaacccagccactgtgttctggaatcctatccgagggacatacattcagaaacttgtagaagtgttctggaatccaacgtgagggacaaacactcagaacccagcagtagatttctggaatcctatgagagtgacaaacacaagccagcagtagtactccagaaatctttgtgagggacaaacaatgagaacctcaaaactttgttctggaatcctatgaaagggacaaaaactcagaacccaacagcactgttctggaatcctttggaatggacaaacattcagagcgtcgttgcagtgttctggaatcctatgtgagggacaaacactcagaacccagcagcagtgttctggaatactttatgatggacaaacattcagaccctcgcagccgtgttctggaatcatatgtgagggacaaacactcagaacccagcagcagtgttctgtaatcctatgtgagggaaaaaccctcagaacccagcagcagtgttctggaatcgtaagtgagggagaaatactcagaaaccagcagcagtgttctagattcctttgtgagggacaaacattcagaacccagcagcaatgttctagaaacctttgtgagggacaagcactcaaaacccagcagccgtgttctggaatcttttctgagggacaaccattcagaccctccaagcagtgttctggaatcctatgttaggcagaaacacccaggacccagcagcggtgatctgtaatgctttgtgacggacaaacaaacagaacccagtagtagtgttctggaatcctatgtgatggacaaacactgagaacccagcagcagtgttctggcatcctgtgtgatcgacaaagttcagagactcttagaggtgtactggaatcctatgtgagggacaaactctcagaaaccagcagcagtgcacaggaatcctttgagagggacaaacatacagaacccagcagcagtgttttgtaattaatgtgagtgacaagcaatcagaacgcagcagtagtgttctagaatcctatgagagggacaaacactcagaacccagcagcagtgttctggaatcctttgtgagggacaaacattcagaacctcatagcagtgttctggtatagtatgtgtggaagaaaccctctgaacccagaagcagtgttttggaatcccatgtgagggacaaacactcagaacccagcagcagtgttctgtaatcccatgtgagtgaaaaacactcagaacccagaagcagtgttatagaatcctttgtgagggacaaaccttcagaacctgaaagcagtgttctggtatcgtatgtgagggacaaacactgagaacccagccaatgtgttctggaatcctatctgagggacaaacattcagatactcgtagaagtgttctggaatcctatgtgagggacaaaagctcagaactccgtagcagtcttctggaatcctatatgagggataaacactcagaacccagcatgagtgttctggaatcatatgtgagggacaacactcagaagccagcagcagtgttctggaatcctaagtgagggaaaaacactcagaacccagcagtagcgttctgtaatcctatgtgagtgacagacactcagaacccagcagcaatattctggaatcctttgtgagggaaaatctttgagactctcgtagcattgttctggaatagtgtgagggaaaaacactcagaacccagtaaaagtgttctggaatcttatgagaaggaaaaacactcagaacccaacagcaatgttttggaatcctatgtgatcaacaaagattcagaagttcatagcagtgttctggaatcacatgtgaggaagaaacactcagaaaccagcagtagtgttctggaatcctatgtgagtgacaaacactcagaaaccagcagtagtgttctagaatcctttgtgaggcacagacgttcagacgctcgaagcagtgttctggaatcctatgtgagggacaaacactcagaacccagcagcagtgttctggaatactttatgagggacaaacactcagtacccagccactgtgttctataatactatctgagggacaaacattcagactttcgtagaagtgttctggaatcctatgtgagggacaaacactaagaaacctgaagcagtgctctggaatcctttgtgaaggacaaacaaacacaacccaacagcggtgttttggaatcctatgtgagggaaaaatattcagacacttgtagcattgtcgaggaacctaatatgagggactaacactcagaacccagtagaagtgttctggaatccttagtgagggataaacattcagacactcgcagcagtgttctggaatcctacgtgagggacaaacactcagaaagcagcaacatttttctggaatcctatgtgagcaaaaaacattcagaacttcgtagcagttttttggaattctatgtaagggacaaacactcagatcccagcagcagtgtttcggaatcctaagtgaggtacaatccctcagaaccaagaagcagggttctggaatcctgtctgagggacaaactttcagacactcttagaagtgttctggaatcctatgtgagggacaaatactcagaaaccagcagcagtgctctgtaatcctttgtgaggtagaaacattcagaacctctcagcagtgttctggaatcttatgtgagggacaaacactcagaacccagcagcagtgttctggaatcctatgttaggggcaaagactcagaacccagcagctgttttcttgaattccttgtgagggacaaactttcagaacctcgaagcagtgttctggagtcccacgtgagggacaaacactcagatcccagtagcagtgttctggaatcctttggaatggacaaacattcagatgctcgtagcattgttctggaatcctacgtgagggacaaacactgagttcctagccactgtgttctggaatcctatttaattgacaaacgttcagacactctcaaaagctttctgtaatcctatctgagggacaaacactcagaaaccagcagcagttctctggaatcctttgtgagggacactcagaaaccagcggcagttctctggaatcctttgtgagggacaaacactcagaaaccagcggcagttctctggaatcctttgtgagggacaaacactcagaaccccacagaagtgttctggaatcctttgtgatgggcaaacattcagaacctagtagcagtgttctggaatcctatgtgaggaacaaacactcagaacccagcagcaatcttctggaatacaatgtgagggacaaacgctcagaacccagcagcagtgttttggaatccggtatgatcgacatagactcagaacttcttagcattgttctggaatcccatgtgaggatcaaacactcagaacccagcagcagtgttctgaaatcctatgtgagggagaaacactcagaacccagtagcagtgttctggaatcctatgtgagtgacaaaccctcagaaaccagcagcagtgttctagaatcctctgtgtgggacaaatatccagaaactcgaaacagggttctggaatcctatgtatgaaacaaacattcagatccctgaagcagtattctggaatccttactgatggacaaacattaagaccttcatagcagttttcttgaaccctatgtgagtgagaaacgttcagaacccagcagcagtgttctgaaatcctatgtgagtgacattcagatattcgtagctgtattctggaatcctatgtgggggaaaaacactcagaacccagccactgtgttctggaataatatctgagggacaaacattcagacactcgtagaagtattctggaatcttattcgtgggacaatcacttggaaaccagcagcagtgctgtggaatcctctgtgagggacaaacacttagaactcagcagcagtgttctggaatccgttatgagggacaagcattcacaaccccgtagaattgttctggaatcctaagtgagggacaaacactcagaagccatcagtactgttctggaatcctttgtgagagacaagcattcagaaactcatagcagtgttctggaatcataagtgagggaaaaacactcagaaatcagcagcagttttctggaatcctatttgagtgacaaactctcggaacccagcagcagtattctgaaatcgtatgtgaggcagaaacactcagaatccagcaggagtgttctgaaatcctatgtgaggtacaaacactcagaacccagcagcagtgttgtgcaatcctttgtgatgggcaaacattcagacactcgtagtagtgggtagtgctctggaaacctttatgagggacaaacaaacagaacacagcaacagtgtttaggaaacctttgtgagggaaaaccattcagacactcgtagcagtgttctggaatcctacatgagggaaaacactcagaacacagcagcagtcttccggacacctaagtgagggacaaactctcagatcccagaagcagtgttctgaaatcctatgtaagcaacaaacattcagaacttagaagcagtgctctggaatttcttgtgagggacaaacactctgaactcagcagcagtgttctggaatcctttgtcagggacaaacattcagaacctcgtagcagtgttctggaatcctaagtggagaacaaactctcagaacacaacaacagtgttctggaatcccatgtgagtgacaaacagtcagaactgagcagcagtgttctggagtcctatgtgagggacaaacactcagaatccagcagcagttgtctgcaatcctatgtgagcgacaaacactcagaacctggacactatgtactggaatcctatatgagggacaaacattcagaccctcgtagaagtattctggaatcctatgtgggagacaaacactaagaaacctgcagcagtgctctggaatcctttgtgagggacaaacagaacccagcaacagtgttctggaatcctttgtgagggaaaaacattcagaacttagtagcagtgttctggaatccaatatgaggaaaaatcatacagacccacttagcagtgttctggcatcctatgtgagtcacaaacactcagaacacagaagcagtgttctagaatcctctttgagggacaaacatgcttaccctcaaaacagtgttctggaatcctatgtgagggacaaccactcagaaccgagcagtagtgttgggcaatcctttgtgatggacaaacattcagaccgttgtagcagtgttctggaatcctatgtgagggacaaacactcagaaccctgcagcagagttctggaatcatttatgagggacaaaacttcagaccctcgaagaagtgttctggaatcagatgtgagggacagacactcagaacccagccactgtgttctggaatcccacctgagtgataaataatcagacactcatagaagagttctggtgtcctatgtgagggacaaacactcagaacacagtagcagtcctctggattactgtgtgagggacaaacactaagtacccagcagcagtgttttgtaatcctttgtgagggacaaacattcagaatctcttagtagtgttctggaatcatatgcgaaggagaaacaatcagaacccagaagcagtgttctgggatcccatgtgagggacaaacactcagaaaccagcagcagggttctggaatcctatgtgttggagaaacactcagaaaccagcattaatttctggaatcctatgtgagggacaaacactaagaacccagccactgtgttctggaatcctttgtgattgacaaactttcagacactcgtagcagttttccggaattctacgtgaaggacaaacaatcagaaaccagcaatcctgttctggaatccttgtgatgggcaaacaaacagaaccccgtggcagtgttttggaatcctatgtgaaggacaaacactcagaacccagcagcagtgttctagaatcctatgtgagggacaaacactcagaacccagcatcagggttctggaaacttatctgagggataaacactcagaatgcaacagctgtgttctggaatcctagatgaggatcaaaccctcagaacccaccagcagtgttctggaatcctacgtaagggacaaacactcagaaccccgccactgtgttctggaatcctatatgagggaaaaacattcagacattcatataagtgttctggaatcctatgtgagggacaaacactcagaacccagcaggagtgttctggagtcctttctgagggacaaacattcggaacctcatagcagtgttatggaatcctatgagagggtgaaatactctgaacccagcagcagtgtactggaatcccatgtgagtgacaaacactcagaacccagcagtggtgttcaggaatcctatgtgagtgacaaacactcagtacaaaggagcagtgttctagagtcctttgcgacggacaaaattcagaccctggatgcagagttctggaatcctctgtgagggacaaacactctgaacccaggagcagtattctggaatcctttgcgatggaaaaactttcacaccctcgtagcagtgtcctgggatcctaagtgagggacaaacactcagaacccagcagcagtgttctggaatcctagatgagagacaaacactcagaacacagcagcagtgttctggaatcctctgtgagggataaacactcagaacccagcagcagtgttctggaatcctttgtgatggacaaacattcagaccctcgcgacagtgttctggaatcctatgtgaagggcaaacactcagaaatcagcagcagtgttctggaatcctctgtgagggacaaacactgagaacacagcagtagtatgctggaatcctatgtgagggacacacactgagaaccgagcagcagtgttctggaatcctatgtgagggaaaaacattcagaccctcttagtagtgttctgtaatcctatgtgagggacaaacactcagaacccagcagcagtgttctggaatcctaagtgagggacaaactcagagcccagcagcagtggtttggaatcctatgtgagggacaaacactcagaacccagcagcagtgttctggaatcccttgggagtgacaaagactcagaacccagcagcagagttctacattcttttgtgagggacaaacactcagaacccagcagccgtgttcaggaatgctatgtgagggagaaacactcagaacccagtagcagtgttctggtatcctatatgagggacaaacactcagaacccagcagaaatgttctggaatcctatatgagggatatacactcacaatccagcagcagtgttctggattcctatgggagggacaaacattcagaccctcggagcagtgttctggaatcctatgtgaagggcaaacactcagaacccagtagcagtgttctggaatcctatgtgagggacaagaattcagacactcatagcagtgatacggaatcctttgtgagggacaaacatttggaccctcgtagcagtgttctgaaatcctttgtgaggggcaaacactcagaactcaaaaacagtgttctgcaatccctataagggacaaatattcagacccttacagcagtgtttgggaattatatgtgagggacaaacacccagaaaccaggagcagtgttctggaatcctttgtgagagacaaactttcatacccttgtagcagtattctggaatcctacgtgagggacaacctagcagcagtgttctggaatccaatgtgagggacaaacacatacaacccagcaacaatgttctggtatcttatgtgaggaacaaacactcagaatacagcagctgtgatctgtaatcccatgtgagggacaaacactcagaacccagcagctgtgatctgtaatcccatgtgagggacaaacactcagaacccagcagcagtgttttggaatcctgagtgagcgacaaagaatccgaacttcgtagcagtgttcacgaaacgcatgtgggggacaaacgctcagaacccagcagcagtgttctgcaatcctgtgggagggacaaatactcagaacccagcagcagtgttatgggatcgtatgcaagagacaaacactccgaacccaggagcagtgtcctggaatcctatgtgagcacgaacactcagaacccaacagcagggatctcgaattctgggtgcaggacaaacactcagaacccagcagcagtgttctggaatcctatgtgagggacaaacactcagaagtctgcacagttttctggaatcctatctgagtgacaaacattcagagactcgtagaagtgttgtagaatcctttttgagggacaaacagaaacagcagcagtgttctggaatcctttgtgagagaaaaacattcagaccctcgcaacagtgctctggaatcctatgtgatgggcaaatactcacaacccagcagcagtgttctggaatccaatgtgagagacaaacactcagaacccagcagcagtgttctagaattttttgtgagggataaacattcagacaatcgaagcagggttctggaatcctatgtgagggacaaccactcagaaaccagcagaagtgctctgtaatcctttgtgagggacaaacaaacagaacgcagcagcagtgttctggaatcctatgccagggacaaacactcagaaaccagcagtagtgttctggattcgtttctgagggacaaacattcaggaccttgtagcagtgttgtggaatcccatttgagggacaaatacactgaacccagcagcagtgttctggaatcccatgttagggacaaacactcagaaaccagcagccgtgttctggaatcctatgtcaaggacaaactgtcagagcccagcagcagtgttttgggatcctgtgtgagtgaaaaagattcagaatttcatagcagtgttctggaatcccatgtgagggaaaaaccctgagaacccagtggcagtattctggaatagtatgtgagggacaaacactcagaacccagccactgttttctcgaatcctatctgagaaacaaacattcagacactgcagaagtgttctgtaatcctacgtgaaggaaaaataggcagtaaccagtaacagtgctctggaatcctttgtgagggaaaaacattcagaccctcgtaacagtgttctggaatcctatgtgacggaaaacctctcaacacctagcagctgtgttctggaatcctatttgagggacaaacactcaaaccccagccactgtgttctggaatactatctgagggacaaacattcagacactcatagaaattttgtggaatcctatgtgagggcaaacactcagaaaccagtagcagtgctctggagttctttgtgagggacaaacataaagaacccagcgcagtgttctggaatcctttcagagagaaaacattaagactctcgaaagaatgttctggaatcctatatgagggagaaacactcagaatccagcagtagagttttggaatcctgtgtgagggacaagtattcagaatttcgtggaagtgttcacgaatcagatgtgagggacaaacactcagaacccagcagcagtgttctagaatcctttgtgaggaacaaacactcacacactcgaagcagtgctctgtaatcctatgtgagggacaaagaatcagaacccagcagcagtgttctggaatcctttgtgatgaacaaacatttagaccctcgtaacagttttctgggatcccatgagagggacaaacactcagaacccagttgcagtgttctggaatcctatgtgaggtacaaactctcagaaaccagcagcagtgttctggaatcctacttgagagacaaacactcataacccagcagcagtgttcttgaattgtacctgaggtacagacacacagaacacagcagcagtgttctggagtctaatgtgagggacaaacattccaaaccctgcaggagtgttctggaatcctgtgtgagggacaaaaaacggaacacagaagcagtgttctggaatcctatgtgagtgacaaacattcagaacttcgtagcagtgttctggaatcttatgtgagggacaaacactcaaaacccagctactgtgttctggaatcctatctgagggacaaacatttagaaactcgtaggagtgttctgaaattctatgtgagggagaaacactcagaaaccagcagcagagctctggagtcctcagtgagggacaaacaaacagaaaacagcagcagtgttctggaatcctttctgagaaaaaaactttaagtccctcataaaattgttctggaatcctatgtgagggacaaacactcagaacccagcagtagtgttttggaatcctgtgagaacaacaaatattcagaacttcgcagcagtgttcacgaatatcatgtgagggacaaaccctcagaacccagcagcagtgttctggaatcctaagtgagtgacaaacactaagagcccagcagcagtgttctacaatactttgtgagggatattcagacactcgaagcagtgttctggaatcctatgtgagggacacacactcagttcccagcagcagtgttctggaatcctttgtgaaggaaaaagatttagaccctcgtagcagtgttctgggatcctatgtgagggacaaacactcagaacccattagcagtgttctggaatcctatgagagggacaaacactcagaaaccagtaacagtgttttggaatcctatgtgagggacaaacactcagaacccattagcagtgttctggaatcctatgagagggacaaacactcagaacccagtagcagtgttttggaatcctatgtgagggacaaacactcagaacacaggaacagtgttctggaattctatgtgagggatagacactcagaaaccagcagctgtgttctggaatggtatgtgagggacaaacactccgaatccagcagcagtgttctggaatcctatgtgtacgagacacattcagaacttcgtagctgtgttctggaatcctatgtaagggacaaaccctgagaaccaaaccattgttttctggattccaatctgagagataaacatttagacactcttagaattattctggaatcctatgtgagggacaaacactcagaaaccaacagcagtactgtggaatcctttgtgagggacaaacagagagatcccaacagtagtgttctggaatcctttctgaggcaaaaacattcagacacttgtagcagtgttctggaatcctatgtgagggacaaacactcagaacccagcagcagtgtcctggaatcctatgtgcggtaaaaacactcagaacccagcagcagtgctttggaatcctgtgtgagcgacaaggactcaggaattcatagcattgttctggaattccatgtaagaggcacacactgagaacccagcagcactgttctggaatcctatgtgagggacaaaaactcagaacccagcagcagcgttctggaatcctatgtgagggacaaaaactcagaacccagcagcagcgttctggaatcctatgtgaaggacaaataatcagaacctagccactgtgttctggaaacctctctgagggacacacattcagacattcatagaagtgttctggaatcctctgtgggggaaaaacatgcagaaaccagcagctgtgctctggaatccttcgtgaggaaaaacaaacaaatgtagcagcagtgttctggaatcatatttgagggaaaaacattcagacattcgtagcagtgtactggaatcctatgtgaggtacacacactcagatcccagcagcagtgttctggaatcgtttgtgatggaaaaagatttagacactcgtagcagtgtcctgggatcctgtgtgagggacaaacactcagaaactggtatcagtgttctggaaccctatgtgagggacaaacattcagaacccagcggcagtgttctggaatcctatgtgagggacaaacactcagaacccagcagccgtgttctggaattctatgtgaggcactaacacacagaatcaaacagctgtgttctggaatcgtatgtgagggacaaacactgagaacccaacagcagtgctctgtaatcctttgggaggaacaaacaaacagaaaccagcagcagtgctctggaatcctatgggagggttaaacactcagaaccaagcagcagtgttctggaatcctacgtgaggggcaaacactaagaatccagccactgtgctctggaatcctttcggagggacaaacattcagacaatcgcagaagtgttctggaatcctatgtgagggacaaacactcagaaaccatcagcggcgctatggaatcctttgtgagggacaaacagaatccagcagccgtgttctggaaacatttgtgagggaaaaacattcagacactcaaagcagtgttccggaatcccatgtgaggggcaaacactcagaacccagcagcagtgttctagaatcttttgtgagggacaaaccttcagacactcgaagcagtgttctggaatcctatgtgaaggaccaacactcagaaaccagcagcagtgctctgtaatcctttgtgcagggcaaacacacagaaccctgtagcagtgttcttgaatcctatgtgaggtacaaactctcagaacccaggagtagtgttgtggaatcgattgtgagggacaaacattcagaatcttgtaacagtgttttggaatcctatgtgagggacaaacactgtgaacccagtagcagtgttctggtatcctatgtgaggaacaaacacccagaacacagcagtcgtgttctggaatcctatgtgagggacacacactcagaatccagcagcagtgctttgtaatcctttgtgaggaactaacaaacagatcccactagcagtgttttggaatcctatgtgagggacaaaccctcagaacccagcagcagtgttctggaatcctttgtgaaggacaaacattcagaagctcttagcagagttctggaaacctatgtgtgggaaaaactctcttaaccctgcaacagtgttctggaattccttgtgaggaacaaacactcagcacccagcagccgtgttctggagtcttatgtgagtgacaaacactcagaacccagcagcagtgttctagaatactttgtgagggacaaacattcagacacccgaagcagtgttctggaatcctatgtgaggaacaaacactaggaacccagcagcagtgttctggaatcctatgtgtggtgaaaacactcagaaccctgcagcagtgatttggaatcctgtgcaagtgacaaagattcagaacttcgtagcagtgttctgcaatcctatgtgagggacaaagactcagaactcagcagcagtgttctgtaatcctttgtgagggacaaacactcagaactcagcagcagtgtcctagaatcctaggtgagggacaaacagtcagaacccaaccactgtgatctggaatcctatcttagagacaaacattcagacactcatagaagtgttctggaatcctatgtgagggaaaaacatgtagaacccagcagctgtgctctggaatcctttgtgaggaaaaacaaacaaaaccagtagcagtgtttaggaatcatttttgagggaaaaacattcggaccctcgtagctgtgttctggaatcctatgtgagggacaaactctcagaacccaacagcagtgttctggaaacctatgtaagggacaaacactcagaacacagcagcagtgctgtggaatccttcatgagggaaaaacattcagaacctggtggcaatgttctttaatcctatgagagggacaaacactcagaatcctacagaagtgttctcgaatcctatgtgagggacaaacacatagaacactacagcagtgttctggaatcctatgtgagcgacaaacattaagaacttcgcagcaatgctctggaatcgtatatgagggacaaagactcaaaacccagcctctgtattctggaatcctatatgcgggacaaacattcagacactcggagaattgttctgcaatccttcgtgagggacaaacactgagaaactagcaccagtgctctggagtcctttgtgagggataaacaaacagaacctagcggcagtgttccggaatgctttctgagagaaaaacattaagaccctcgtaacagtgttctgggatcctatgtgagggacgaacactcaggaccctgcagcactgttttggaatcctgtgtgagcgaccaagattcagaaattcgtagcagtgttcacgaattccatgtcagggacaaacactcagaacccagctgcagtgttctggaatcctttgtgagggaaaaatattcagaacctcgtagcagtgttttggaatcctacgtgagtgacaaacactcagaagcctgcaacagcgttctagaatcttttgtgagggacaaacactcagaacctcatagcagtgttctgtaatcctatgtgagggacaaacactcaaaatccagccactgtgtactggaatcctgtgtgagatcaaacattcagaagctcgtagaattgttctgcaatgctatgtgagggccaaacactaagaaatctgctgcagtgctctggaatcctttgttagggaaaaacaaacagaacccagtagcagtgctctacagtcttttgtgagggaaaaacattcagaccctagtagcagtgttctggaatcctatgtgagggaaaaacattcagaccctcgtagcagtgtcctagaatcctatatgagggacaaacactcagaacccagcagcagtattctgaaatcctttgggagggaaaaacattcacaccatcgtaacagtgttttggaatcctacgtgagagaaaaatattcagactatcgtagcgttgttctgaaatccagtataaggaataaacactcagaacccagtagcagtgttctggaaccctttgtgatggataaacattctgaccctcgtagtagtgttctggaatcctacgtgagggacaaacactcagaacccagcagcactgttctggaatgctatgtgagggacaaacactcagaacgcagtagcagtgttccagaatcctatgtgagcaacaaactttcagaacttcgtagtagtgttctggaatcgtaagtgagggacaaacgctcagaacccagcagcagagttctggaatcccatgtgatggacaaacactcagaacccagcagcagtgttctagaatctttgtgagggacaaacattcagaatcttgtagcagtgttctagaatcctatttatgggacaaacagtcagaatacagccactgtgtactggaattctatctgagggcaaacattcagaaccttgtagaagtgttctggaatcatatgtgagggacaaacacttagaaatctccaacagtgctctggaatcctctgagggacaaacccacagaacccagtagcagtgttctacaatccttggtgaggaaaaaacattcagaccctcgtagcagtgttctggaatcctatctgagggacaaacacacagaacccagtagcagtgttctacaatccttggtgaggaaaaaacattcagaccctcgtagcagtgttctggaatcctatctgagggacaaacactcagtacccagcagcagtgttctagaatcctttgggagggaataacattcacaccgtcataacagtattctggaattctgtgtgagggaaaaacattcagaccctcgtagcattgctctggaatcccatatgagggactaacactcagaacccagcagcaatgttctggaaccctttgtgaggaaaaaacattcagaccctcgtagcagtgttctagaatcctatgtgagggacaaacactcagaacccagcagcagtgttctggaatcctaagtgagggagaagcactcagaatccagacactgtgtacaggactcctgcctgaggggaaacattgagaacctctagaagtgttctgcaatcctatgtgagggacaaacactaagaaatctgcagcagtgttctgtagtttttttgtgaggaagaaacaaacagaacccagaagcagtgttctacaatcctttctgagtgaaaaacattccgatccttgtaacagttttctggaatcttatatgaggcacaaactctcagaagccagcagcagtgttctggaatcctttgggagtgaaaaacattcacaccctcgtaacagtgttctggaatcctgtgtgagcaaaaaacattcagaccgtcgtagcatttttctggaatccaacatgaggcagaaactctcagatcccagtagcagtgttctggaaacctttgtgagggataaacattcagaccctagtagccgtgttctggaaacatatgtgagggacaaacacacagaacccagcagctgtgttcttgaatcttatgtgagggacaaacactcctgacccggcagcagtgttctggaatcctaagagagggacggacactcagaaaacagcaacagtgttcaggaatcatatgtgagtgaaaaacactcagaatccagtaactgcatactggaattctatctgagggcaaatatttagaacctcgtagaagtgttctggaatcctatgtgagggaaaaacattcagaccatcatagcagtgttctgaaatcctatatgagggacaaacactcagaacccagcatcagtgttctggaatactttggaagggaaaacctttcacatcttcctaacagtgttctggaatcctatgtgagggaaatacatttagaatctcgtagcattgttctggaatccaatatgagggacaaacaatcagagcccagtagcagtgttctggaaccctttgtgagggataaacattcagagcctcgtaacagcgttctgaaatcgtatgtgagagacaaacactcagaacccaggagcagtgttttggaaagctatgtgagtgacaaactttcagaacttcgtagcagtgttctggaattctatgtgaggaagaaacactcagaacgcagcagcactgtcctggaatcctaagtgagggacaaacactcagaacacagcagcagtgttctggaatcctatctgagggacaaacactcagaacccagaagcagtgttctagaatcctttgtgagggacaaacactcagaacccagcagcagtgttctagaatcctttgtgagggacaaacattgagaaccttgttgcactgttctggaattctacgtgaatgagaaacactcagaattcagccactgtgtactggaatcatatctgagggcaaacattcagacccttgtagcagtgttctggaatcctatgtgagggcaaacactcagaacccagcagtagtgttctggaatcccatgagagagacaaacactcagaaaccagcagaagtcttctggattcctatgtgagcgaaaaccttttagatcttcgtggcattgttctggaattctatgtgagggacaaacactcagaacccagcagcaatgttctggaatcctaggtaagagacaaacgcttagaactcagcagcagtgtcctggaatcctatgggagggacaaacactcagaacccagtagcagtgttgtagaatcctttgtgagggacaaacattcataaccttgtagcagtgttctggaatcctatgtgagggagaaacactcagaatccagccactgtgtactggaatcctatctgaggacaaacattcagaacttcgtagaagtgttctggaatcctatgtgagggagaaacactaagaaacctgcagcagtagtctggaatcctttgtgagggacaaataaacagaacccagtagcagtgttctaaagtcccttgtgagggaaaaatattcagaccttcgtagcagtgttctggaatcctatgtgagggaaaaacatttagaccctcgtagcagagtcctggaatcctatatgagggacaaacactcagaacccagcagcagtgttctggaattctttgggagggaaaaatattgacaccctcataacagtgttctggaatcctatgtgagagaaaaacattcaaaccctcatagcattattctggaatccaatatgagggacaaacagtcagaacgcaataacagagttttggaaccctttgtgagggataaacgttcagaccctcgaagcagtgtgctggaatcctatgtgaggggcaaacactcagaatccagcagcagtgttctggaatcctttctgagggacaagaactctgaacccagcagaagtgttctggaatcctatgtgagggaaaaacattcaaaccctcttagcattgttctggaatccaatatgagggacaaacagtcagaacgcaataacagtgtttcggaaccctttgtgagggataaatattcagcccctcgaagcagtgtgctggaatcctatgtgagggacaaacactcagaacccaacagcagtgttctggaatcctttgggagggaaaaacatttacagcctcgtaacagtgttctggaatcctatgtgagggaaaaacattcagactctcatagcatttttctgtaatccaatatgagggacagagactgagacccagcagtagtgttttggaatcctgtgtgagggacaaaccctcagaaaccagcagcagtgttctagaatcctatgtgagtgacaaacagtctgaacccagaagcagtgttctggaatcctatgtgagggacaaacactcagaatccagcagcagtgttctggaatcctatgtgaaggacaaacactcagaatccagcagcagtgttctggaatcctatgtgagggacaaacactcagaatccagcagcagtgttctggaatcccttctgagggacaagcactccgaacccagcagaagtgttctggaatcctctgtgagggaaaagcattcagaagctcatagcagtgttgtggaatcgtttttgagagacaaacactcagaacgcggcagcagtgttctggaatcctttgtgtcagacaaacattcagacagttgtggcagtgttctggtatcctatgtgagggacaaacactcagatccagcagcattgttcctgaatcctttttgatggacaaacattcagatccccctgcagttttctggaatcctatgtaagggacaaacactcagaacccagcagcagtgttctggaatcgtatgtgagggacaaactctcagaacccagcagccgtgttctggaatcctatgtgagagacaaactcttagaacccaggggcagtgttctagagtcctttgtatgggacaaacattcagaaactctcagcagtgttctggaagcgtaagtgaaggacaaacactctgaacccagcagaagtgttttggaatcccttgtgaggcacaaacactcagaacccagcagcagtgttctggaattctatgtgagtgacaaacactcagaacccagcagcactgttctagattcctttgtgagggacaaatcttcagaccctcgaaacagtgttctgaaatcctatgtgagggaacaacactcagaacccagccactgtgtgctggaatcctgtctgagggacaaacattcaaacactcatagaagtgttctggaatcttatgtgagtgataagcaatcagaaaccagcagcggtgctctgtaatcctttgtgagggacaaacaaacagtacacaggagcagagttctggagtcctatgtgagggacaaactctcatgacccagcagcagtgttctggaatcccttgtgagggccaaacactcagaacctagtagcagtgttctggaatcttatgtgatggaaaaacactctgaacccagcagcagtgttctggaatcctatatgagggagaaaaactcagaacctgcagcagtgttctggaatccttagtgagggagaaacattcagaacctcatatcagtgttatggaatcgtatgtgagggacaaacactctgaaaccagcagcagtgttctggaatcccatgtgagagacaaacactgagaatccagcagcagtgttctggaatcctatgtgtgtgagaaacacccagaaaccagcagcgtagtactggaatcctttgttaggggctaacattcagaacctagaagctgtgttctggaatcctatgtgagggacaaacactcctatcccagtagcaatgttctgcaattctttgtgacggacaaatattcagaccctcgtagcagttttcaggaatcctaggtgagagacaaacactcagaacccagcagaaatgttctgggatcctatgtgaggggcaaatacttggaatccagcagcactgttcttgaaacctatgtgagggacaaacactcacaacgcagccactgtgtaccagaatcctatttgagtgtcaaaccttcagaccctagtagaagtgttctggaatcctatgtgaaggacaaactctaaataaccagcagcagtgctctggaatcctttgggagagaaaaacactcagacccccctagcagtgttctgggatcctatgtgagggaaaaacgttcagacccgcatagcagtgttctggaatcctatatgagtgacaaacactcagaacccaccagcagtgttctgaatcttttgtgaggtaaaaacactcagaccctcaaagcagtgttctggaatcctgcgtgatggaaaaacattcagaccttcgtagctgtgttctggaatcctatgtgagggagaaacattcagtccctcaatagcattgttctggaatccaatatgagggacaaacactcagaacccagcagctgtattctggaatgccatgtgagggaaaaagactcagaacccagcagcagtgttctggaatcctgtctgaggaataacccctgggaacccagacactgtgtactggaatcttatattagggacacatattcagacactcgtagaagtgttctggaatactatgtgagggacaaacactaagaaaacagcagcagggctttggaatcctttgtgagggacaaaaaaacagaacccatcagcagtgttctggaataattgtgagggaaaaacattcaggtcctagtaacagtgttctggaatcctatgtgaggtaaaaacattcagaccctcatagcagtggtctggaatcgtatgtgagagacaaaccctcacaacccagcagcagtgttctgcaatcctatgtgagcgacgaacattgagaacttcgtagcagtgttctgatattctatgtgagagcaaacactcacaacccagcagcactgctctggaatcgtatgtgagggacaacaactcagaacccagcagccgtgttctggaaacctacgtgagggacaaaatctcagagctcagcagcagtgttctgcaatcctatgtgcgtgacaaatactcagaacccagcagcagtgttctggaatctttgtgagggacaaacactagaacccagcagcagtgttctagagtcctttgtgagggacaaacattcagaaactctcttcagtgttctggaatcttaggtgagggacaaacacactgaacccagcagcattgttttggaatcccatgtgaggcagaaacactcagaactcagcagcagtgttctggaatcctatgtgagtgaaaaacactcagaacccagcagcagtgttctagaatcctttgtgggcaaaaaaccttcagaccctagaatcagtgttctggaatcctatgtgatgaacaaacactcagaacccagcagcagtgtttttgattcctttgttttggagaaacattcagaccattgtagcactgttccactatcctatgtgagggacaaactctcagaacccagtagcagtgctctagaatcctatgtgagggacaaacactcagaacccagcagcagggttctggaatcctatgtgagggtcaaacactcagaaggcagcagcagtgttctggaatcctatgtgagggagaaacactcagaacccagtcactgtgtgctggaatcctatgtgagggagaaacattcagaacccagtcactgtgtgctggaatcctatctcaaggacaaacattcagaccattgtagcactgttccactatcctatgtgagggacaaactctcagaacccagtagcagtgctctagaatcctatgtgagggacaaacactcagaacccagcagcagggttctggaatcctatgtgagggtcaaacactcagaaggcagcagcagtattctggaatcctatgtgagggagaaacattcagaacccagtcactgtgtgctggaatcctatgtgagggagaaacactcacaactcagtcactgtgtgctggaatcctatctgagggacaaacattcagacatgtgtagaagtgtcctggaatcctatgtgagggacaaacactgagaacccagcagcagagttctagaattctttgtgaagacaaacattcagacactcgaagcagtgtcctagaatcctatgtgagggacaaacacttagaacccagcagaattgttctggaatcctttgtgatggacaaacattcaggccctcgtggcagtgttctggaaacctaagtgaggggcaaacactcagaattcagcagcagtgttctggaatcctatgtgactgacaaacactcagaaccctgcagcaatgttatgaaatcctgtgtgaggtgcaaacactcagaacccaccatcaatgctctgcaatcctatgtgaggaagaaacactcagaaacctgcagcagtgttctggaatcctatatatgggtcaataattcagaccatcatagcactgttctggaatgctctgtgagggacaaacattcagaaacttgtagcagagttctggaatcctatgtgagggagaaaccctcagaacctagcagtagtgttctggaatcatatgtgagggactaacactcagaacccagccgcagtgttctggaatgctatgtgagggacaaacactcaaaaccaagcagcagagttctgttatcctatatgagacaaacacttggaacccagcagaactgttatggaatcctatgtgagggacaaacactcacaatcaagcagctttttactggaatcctatgtgagggagaaatcttcagaacctagcagcagtgttctggaatcgtatgtgtgggactgacactcagaacccagcagcatgttgaggaatgctatgtgagggagaaacacacaaaacccaccagcagtgttctggtttaatatatgcgggacaaacacacagaacccagcagaagtgttctgtaatcccatgtgagagacaaacactcacaaaccagcagcaatgttttggaatcctttgtgaaggacaaacattcaaaacctcgtagaagtgctctgcaatcctatgtgagggacaacactctgaacccagcagcaatgttttcgaatcccatgaaagggacaaacactcagaactcggcagcatttttctggaatcctatgtgagtgacaaactctcagaacacagcagcggtgttctagaatcctttgtgggggacaaacattcagatgatcatagcagtgttctggtatctcatgtgagggacaaacactcggaaaccagcagcagtgttctggattcctttttgggggacaaacaaaccgagaaggagggttctggaatcctacactaagaacccaggagcagtgttctgcaatcctatatgagggacaaacactactaaccctttagcagtgttctagaatcctttgtgagggaaaaacattcagaccctcgaatcagtgttctggaatcctatgtgggggacaaacgctcagaacccagcagcagttttctggaatcttttcagacagacaaacctttagacgatcttagcagtgttctgttatcctatgtaagggacaaacactcagaacccagcagcagtgctctggattcctttgtgggggacgagcactcagaacccaggagcagtgttctggaatcctatgtgagggacaaacactcagaatccagcagcagtgttctggaatcttaagtgagggacagacactcacaacccagcagcagtgttctagaatcctttgtgagggacaaacatccagaccctggaagcagtgttctggaatcctatgtgaggagcaaacactcagaacacagcatcagtgttctggaatcctatgtgagtgacaaactctcagaacccaggagcagtgttctataatccattgtgagggacaaacattcaaactctcgaagcatttttctggattcctatgtgagggacacacactcagaacccagcaacagtgttctggaatcctatgtgtgggacaaacactcagaaaccagcagcagtgttctggaatcctacgtgagggacaaacactcagaacacagcctctgtgtactggaatctatctgagtgacaacattcagactcttgcagaagtgttctggaatcctatgtgatggacaaacactaacaaactagcagcagcgctctggaattctttgtgatggacaatcattcagagactcgtagcagtgttctggaatcgtatgtgaggtacaaacactcaaaactcagcagcagtgttctggaattctatttgagggacaaactctcagaacccagcagccgtgctgtgaaatgatatgtgagggacagacactcagaacccaacagcagagttctggtatcctaagtgagggacaaacactcagaaccctgcagaagtattctggaatcgtatgtgagggacaaacactcaaaatccagaagcagtgttctggaatcctatgtgagggacaaacactcacaccctcagaggagtgttctggaatcctatgtgaaggacaaacactcagaacccagtagcagtgttctggaatccggtgtgaaggacaagcgttcagacactcgtagcagtgatatggagttctttgtgagggacaaacattcagacacacttagcagtgttctggaatcctaagtgagagagaaaccctcaaaaacaagctgcagtgttctagaaatctatgtgagggacaatccctcagtatcgagcggcagtgttttggaatcctatctgagggacaaacactcagaactcagcagcagtgttctggaatcctgtgtgaaggagaaacactcagaacccaacagcagtgttctgattcccgaagtgtgggacaatcactcaaaacccagccactgtgttctggaatcctatctgagggtcaaatattgggaacctcggggaagagttctggaatcctatgtgagggaaaaacactcagaaaccagcagaagtgttctggaatcctttgtgagggacaaacactgagaaatcaagagccgtgttctggcatcctatgtaagcgacaaacactctgaacccagcagcagtgtttttgaatcccacgtgagcgacaaacactcagaacccaaaagcagtgttctggaatactttttgagggacaatcattcagaaccttgtagctgtgttctggaatcatatgtgagggccgaacactttgaacccagctgcagtgtttttgattcccctgtgaaggaaaaacactcagaacccagcagcagtgttctagaatcctttgtgtgggactaacattcagaccctccaagcagtgttttgggtctatgtgagggacaaacactgagaacccagctgcagtattctgcaatcctttgtgacggagaaacactcagaccatcgtagcagtgttctggcatcctatgtgcgggaaaaacactcagaaaccagcatcagtgctctggattcctttgtgagggacaaacaaacagaacccagcagcagagttctggaatcctatgttggggacaaacactcagaacccatcagcagtggtcagaaataatttgtgagggacaaacattcagaacctagtagcagtgttctggaatagtatgtgagggacaaacactctgaacccagtggcagtcttttggaatcacacgtgagggacaaaactcagaaccaagcagcaatgttctggaataccatgtgagagacaaacactcagaacccagcagcagtgttctggaatcttatttgagtgacaaacactgagaacccggcagcagtgttctagagtcctttatgagagacaaacttgcagacccacgcagtcttctggaatcctatgtgagagacaaaccctcagaacccagaagcaatgttctgcaatcctttttgttggacaaacattcagaccctcgtagcagtgttccagaatcctatgtgaggaacaaacactcagaacccagcagtagtgttcgggaatcctatgggagggacaaccattccgaatccagcagcagtgttgtgtaatcctatgtgagggacaaacactcagaacccagcagctgtgttctggaaacctatgtgagggaaaatcacttagaacccagtcattgtgctctggaatcctatctgagggagaaatattcaaacactcgtagaagagttctggaatcctatgtgagggaaaaaccctcagaagccagcagcagtgctctggaatcctttgtgagggacaaacaatcagaacccagaagcagtgttcttgaatctttcgtgagggaaaaacattcagaccctcgtaatagtattttggaatcctatctgagggacaaacactcggaacccagcagctgtgttctggaatcctatgtgtgggacaaacacttagaacccagcacaatattctggaatactacgtgagcgacaaactttcagaagtttgtagcagtgttctggaattctatgtgagggacaaacactgagaacccagcagcagcgttctggattcctaagtgagggacaaacattcagaacccagcagcagtgttctggtatcctatgtgagggacaaacactcagaacccagcagcagtgttctacaatcctttgtgaggaaaaaatattcaaaccctcatagcagtgttctggaatcctatgtgatagaaaaacattcataccctcatagcagtgttctgggatcctatatgagggacaaacacacagaacccaccagcagcgctcgggaaaccacactctcctaatagtgttcttgaatcccatgtgagggagaaaccttcataccctcgtagcattgttctggaatccaatatgagggacaaacactcagaacccagtagcagtgttctggaacctttattgagggataaacattcagaccgtcatagcagtgtgctggaatcctatgtgagggacaaatgctccgaacccagcagcagtggtttggagtcctatgtgagggacaaacactctgagcccagcagcagtgttctggaatcctctgtgagggacaaactttcacaacttcgtagcagtgttctggaattctacgtgaggtacaaacactcagaacccagcagcagtgttctggaatcctttgtgaggaacaaacattcggaacctcatagcaatgttcaggaatcgtacgtaagggacaaacactcagaacacagcagcagtgttctgcaatcccatatgagggacaaacactcagaacccagctgcaatgttctgtaatcctgtttgagcgacaaagactcagaaaccagcagcactgttcaagaatcctttttgtgtgacaaacattctgaacctcaaagcagtgttctggaatcctacgtgagggacaaacaccacaatccctgcagcagttttctggaatcctttgtgatggacaaacattcagaccctcgtagcagtttttcagaatcctatgtgtgggacaaacactcagaacacagcaacagtggtctagaatcctttgtgtgggacaaagattcagaacccagcagcagtgttctggaatcctatgtgaggtacaaacactcagaaacagtggctgtgtactggattccactgtgtactggaaacctatctgaaggaaaaacattccgaacttcgtagaagttttctggaatcctgtgtgacggacaaacactaagaaatctgcagcagtgttctagaatcctttctgagggacaaacaaacagaacccaggagcagtgtgctgctatccttttgagggaaaaactttcacatccttatagcagtgttctggaaacctatgtgagggaaagaaattcagaccctcgtagcagtgctctggaatcctatatgagggacaaacactcagaacccagcagcagtcttctggaatcctttgggagggaaaaacattcacaccctcgtaaaagtgttctggaatcctatgtgaaggaaaaacattcagaccctcgtagcattgttctggaatctaatatgagggacaaacagtcagaacccagttgcagtgttctggatccctctgtaagtgataaacattcagaccctcgtagcagtattctgtaatcttctgtgagggacaaacactcaaaacccagcagcagtgttctggaatcctatgtgagcgacaaactatcagaacttcgtagcattgttctggaattctatgtgaagaacaaacattcagcacccaacagtagtgttctggaatcctaattgagggaaaaccactcagaacccagcatcagtgttctggaatcctatgtgggggacaaacagtcagaacacagcagcagtgttctggaatcttatgtgagggacaaacactcagaagccagcagcagtgttctagaatccttcgtgagggacagacactcagatccctgcagcgtgttctagaatcctttttgagggataaacattcagaatgccgcagcagtgttctgtaatccaatgtgagggaaaaacaatcagaacccagcagcagtgttctagtatcccatgtgagggagaaacactcagaaccccacagcagtgttctggaatcctatgtgagtgacaaacactcagaaaccagcagcagtgttctagaatcctttgtgagggacaaacattcagaccctcgaagcagtgttctggaatcctacgtaagggacaaacactcagaaaccagcaggagtgctctggattcttttgtgagggacaaacaaccagaacccagcaggagagttctgtaatcctatgtgagggacaatcactcagaacctggaagcagtgttctggaatcctttgtgagggacaaacattgagaacctcgtagctgtgttctgtaatcttatgtgatggacaagcactgtgaacgaagcagcagggttctggatccccatgtgagggacaaacacttagaaaccaacagcagtgttctagaattctttgtgagggacaaacattcagaccctcgaagcagtgttctggaaacctacatgcgggggaaacactcagaacccagcagcaatgttctgaaatccttagggttggacagacattcagaacctcgtagcataactctggaatcctatgtgaaggacaaacactcagaacccagcagtagtgtttgggaatcctatgtgagggaaaaccactcagaacccagcagcagttttctggaatcctatgtgagtgacaaacactcagagcccaggaggagtgttctataattcattgtgagggacaagcattcaaaccctcgaagcatttttctggaatcctatgtgaaggacaaacattcacaccctcagaggagtgttctggaatgctatggaaggacaaaaattcagaacccagtggcagtgttctggaatcctgtgtgaaggacaggcattcagacacccgtagcagtgatatggaatcctttgtgagggacaaacgctcatacactcttaacagtgttctggaatactatgtgagggatattctgaccctcatagcagtgttctggaaaccaatgtaagggccaaacactcagaacccagcaatagtgttctggaatactttgtatggggaaaacattcagacaatggtagcagtgttctggaatcctaagtgagggagaaaccctcagaaacaaattgcagtgttctagaattctatgtgagggacaaaccctcagtatcgagcagcattgttttggaatcttttgtgatagacaaacactcagaacctagcagcagtgttctggaatcctatgtgaaggggaaacactcaaaacccagcagcaatgttctgttacactaagtgtgggaaaaacactcaaaacccagtcactgtgttccgtaatcctacctgagggacaaacactgggaaccccttgggagtgttctggaatcctatgtgagggacaaacactcagaactcaccagcagtgttctggaatactttgtgagggacaaacactctgaacccagcagcagtgttctggaatcccatgtgaatagataaactatcagaacccagcagcagcgttctggaatcccatgtgagtgatgaacattcagaaccatgcagcagtgttctagattcctctgtgagatagaaacattcagacccttgaagcagtgttctggaatcctatgagatggataaacactcagcacccagccactgtgctctagaatgccatctgtgggacaaacattcagagactcgtagaagtgttctggtatcctttgtgagggacaaacactcagaacacagcaacagagttctgaaatcctatgtgagcgacaaacattgagaaattcatagcagtgttctggaatcctatatgagggacaaacactcagcacccagccacagtgttttggaatcctatgtgagggacaaacgttcagaccctcgtagaagtgttctggaatcctatgtgagggacaaactctacgaatccagcagcagtgttctagaatcctttgtgagggacaaacattcagaccctagtagcagtgttctggaatcctacgtgaggcacaaactctcacaaccctgtagcagtgttctggaatcttatgtaagagacaaacactcagaacccagcagcagcattctgaaatcctttgtgatggacaaacattcagaccctcgtggcagtgttctggaatcctacgtaagtgacaaacactcagaactcagtagcagtggtctggaatcctaagggagggacaaacactcagaaaccagcagcagtgttctggaatcctcggtgagggagaaacactcagaacacaacagtagtgttgtggaatcctatgcgagggccaaacactcagaacccttccactatgttctggaatcctatgagaggaacaaacactcagaaacgcatagaattgttctggaatcttatgtgagggacaaacactcagaatgcagcagcagttttcaggaatcctatgtgttggacaaacactcagaaaccagcagcagtgttcaggaatcctatgtgagggacaaacacgcagaacagagcagcagagttctgcaatcctttgtgagtgacaaacattcggaacctcgtagcagtgttctgcaatcctatgagagggacagactgtcagaagcaagcagcagtgttctcaaatcccatatgactgacaaacactcataaaccatcagcagtgttacagaaacctctgtaagggacaaacattcagatgcaagaagcaatgctgtggaatcatacctgagggacaaacactcggatcccagcagcagtgttctggaatcctttgtgattgacaaacattgagactctcgtagcagttttctggaatcccatgtgagggacaaacactcagaacccagcagcagtgttctgtaatcctatctgagggacaaaccgtcagaacccagccactgtgtactggaaacctatctgagggacaaacgtgcagtcccaagtagaagtgttccggaatcatatatgagggacaaacactaagaaacaagcagcagagctctggaatcctttgtgagggacaaagaagcagaacacagaagcagtggtctggaatcctttgtgagggaaaaaatatttagacccttgtggcagtgttatggaatcctatgtgagggaaaaacattcagacccttgtagcagtgttttggaatcctatgtgagggaaaaacatgcagacactcgttgcattgttctggagtccaatatgtgggacaaacagtccgaacccatcagtagtgttctggatttcttactgagggataaacattcacagtctcgtagcagtgttctggaatactatatgaaggaaaaaccctcagaacccagcagcattgttctggaattctatgtgagggacaaccacccagaaaccaacagcagtgctctgtaatcccttgtgagggacaagcagagtaatcccagcagcagtgttctggaatactatgtgagtgacaacactcagaacccaggaactgggttctggaattgtctgtgcgggccagtcattcagaacctcgtggcagtgttctggaatcctatgtgagggaaaaacactgtgatctcagcagcagtgttctggaatcctatgtgagggtgaaacactctgatcccagcagccgtgttatggaatcccatgtgagagacaaacactgagatcctagcagccctgttctggaatcctatgtgaggtacaaactctcagaacccagcagcagtgttatggaatcctttgtgagagacaaacattcagaccctcgtagcagtgttctggaatcttatgtgaggcacaaacactcacaacccagtagcagtgttctggattcctatgtaggggagaaacactcagaacccaacagcagtgttctggaatcctttgtgatggacatacattcagaccctcgtaggagtgttctggaatcctacgtaagggacaaacactcagaactcagtattagtgttcttgaaagctaagtgaggtacaaacactcagaaaccagcagcagtgttctggaatccttggtgagggactaacactcagaacccaacagcagtgttctggaattatatgtgaaacaaagactcagaactcagaagcagtgttctggaatcgtatgtgaggaacaagcaatcagaacccagcagcagcattatggaatcctatgtgagggacaaacactcaaacccagccactgtgttctggaaacctatctgagtgacaaacattcagacactcgtggaagtgttctggaatcctacgtgagagacgctcagaaaccaacataggtgttctggaatcctttttgtgggagaaacaaacagaacccagcagcagtcttctggaatcctatgtgagggaaaaatatttagaaccccgtagcagtgttctggaattctatgtgagggacaaacacacaggacccagcagcagtgttctggaaccttatgtgatggacaaacactgagaacaaaacagcagtgttctgaaatcacatgtcagcgaaaaacattcagaaattcgtagcagtgttctggaatcctttgtgacagaaaacactcagactgtcgtagcagtgttctgatttcccatgtgagggacaaacacccagaagccagcagcagtgtcctagaatcctccgtgagggacaaacacacagaaccaagcagcagggttctggaatcctatgtgagggacaaacactcggaaccccgccactgtgttcttgaatcctaactgaggggcaaacattcagacactggtagaagtgttctggaatcctatgtgagggataaacactcagaaaccagcagcagtattctggaatcctttatgagggaaaaacattcagaacctcatagcagtgttctttaatcctgtgtgagggacaaaccgtctgaactgagcagcagtgttctgcaatcactcttgagagacaaacactctgaacccagcagcagtgttctgaaatcctaaatgaggaacaaaccctcagaacccagcagcaatgttctagaatcctttgtggggtacaaacattcagaacctcgaagcagtgttctggaatcctatttgagggacaaactcacagaacccagcagcagtattctggaatcccaagtgagggacaaacactcagaaaccagcagcagtgtgctggaatgctttttgagggacaaacattcagaccttcgaagcagtgttctgcaatcctatgtgattgacaactctcagaacctaggagcaatcttctgtaatctgttgtgatggagaaacattcggaacctcttcgcagtgttctggaatcctaggtgtgggagaaacactcagaatccagcagcagtgttgtagaatcctctgtgagggagaaacactcagaactcagcagtagtgttctggaatcctatgtgatggacaaacactcagatcactgcagcaggggtctgaaatcctatgtgaaggataagcactcagaacccagcagcagcgttctggaatcctttctgagggacaaacattcagaacctcgtagcagtgttctggaatcttatgtgagggacaaacactcagaacccagcagcattgttctggaatcttagatgtgggacaaacactcagaaccaggcagtaacgttctggaatcccatgtgagggacaaacactcagaacccaacagcagtattctggaatcctatgtgagtgacaaacactcagaatccagcagcagtgttctagaattctttgtgtgggacaagcattcatgccctcaaagcagtgctctggaatcctatgtgaaggaggaacagtcacaacccagcagcagtgttcaggaatcctttgtgatggacaaacattcagaccgtcggagcagtgttctggaatcctaagtgagggacaaacactcagaaccaagccactgtgttctggaatccttctgagggacaaatattcagacacccgtggaggtgttctggaatcctatgtgagggacaaacactcagaaaacagcagcggtgctatggagacctttgtgagggcaacaaacacaagccagagttttattctgtaacctttttgagggaaaacattcagaaccccgtagcagtgttctggaatcctatgtaagggacaaacattcagaacccagcagcagtgttttggaatcctgagtgaaagacaaagattcagaacttcatagcactgttctggaatcccatttgagggacaaacactcagaacccagcagcagtgttctagaatcctatgtgagagacaaaccctcagaacccagcagcagtgttctggaatcccatgtgagggacaaacactcagtacccaaccactgtgttctggaatcctatatgagggacaaacattcagacaatcgtagaagtgttctggaatcctatgtgagggacaacactcagaaaccaccagcagtgctctggaatcttttgtgagggacaaaaatctgaacccagcagcactgttctctaatcctttttagggacaaacgttcagaacctcgtaggagtgttcttgaatcctaagtgagggataaaagcccagaacgcagcagcagtgttctggaatcctgcgtgagtgacaaacactccgaaccccgcaggaatgttcttgaatcctttgtgagggacaaacattcaaaccctcgaagcagtgttctggaatcctatgtgaggtacaaacagtcataacccagcagaaatcttctggaatcctttgttatggacaaacattcaggcccttgtagcagtgttacggaatcctaatggaggcacaaacactcagaacccagcagcagtgttctggaatcttatgtgagggacaaacactcacaatccagcagaagtgttctggaatcctatctgagggacatacactcagaacccagtagcagtgttctggaattctatgtgatgaacacacactcagaaaccagcagctgttttctggaatcttgtcgagtgacaaatattcagacactcgtggaagtgttctggaatcctatgtgagggataaacactcagaaactagcagcggtgatctggaatcctttgtgaggcacaagcaaacagaacccagcagctgtgttctggaatctttgtgagggaaaaatatttagacccttgtagcagtgttctggaatcctatgtgagggacaaacactgataacccaacggcagtgttctggactcctctatgaagtcaaaccctcagaacccagcagcagttttctgaaataaaatgtgagcaacaaacattcagaatttcgtagcagagttctggaatcctatgtgagtgacaaacactcagaaaccagcagcagtgttctagaatcctttctgtgggacaaactttcagacgctcgaagcagtgttctggaatcctatgtgatggacaaacactccgatcccatcagcaatgttctgcaatcctttgtgatgggcaaacattcagaccctcgtaacagattttgggaatcctaagtgagggacaaacactcagaacccagcagcaagcagtgttctagaatcctatatgaagaacaaacactcacaacccagcagccgtgttcttcaatcctgtttgagggacaaacactcagaacccactcactgtgtacaggaatcctatctgtgggcctaacattcagaccctcgtagcagtgttctggaatcctatgtgagggagaaactctaaaaaaccaacagcagtgctctggaatcctttatgagggaaaaacattcagacctttctagcagtgttctggaatcctatgtgagggaaatattttcagagcctcgtagcagtgttctgtaatcatatatgagtgacaaacactcagaaaccagcagcagtgttctggaatcccttgagagggaaaaacatttacatcttcataacagtgttctggaatccttactgtgggaaaaatattcagaccctcgtaacaatgttctggaatcctatatgagggacaaacactcaaaaaccagcagcagtgttctggaatcctatgtgagggaaaaacactcagaacccaactgcagtgttctggagtcctgtgggagtgacaaactttcagaaattcgtagcagtattctggaatcttatgtgagggacaaacacacagaacccagtagcagtgttctggaatcttatgtgagtgacaaacactcagaatccagcaacagtgttctggaatcctatgtgagggacaaacactcagaacccagcagcagtgttctagaatactttgtgaggaaaaacactcagaacacagcagtagtgttctggtatccactgtgtgctagaatcctatctgagggacaaacattcagaacctagtagaaatgttctggaattctacgtgagggacaaatactaagaaatctgcagcagtgctctggaatctattgtgaaggtcaaacaaatagaacccagtagccttgttctacaatactttatgagggaaaaactttcagaccctcatagcggtggtctggaatcacacattagggacaaacactcagaacccagcagcagtgttctgtactcctttgtgagggacaacattcagttcctcaaggcagtgttctggaatcctatgtgaatgacaaacactaagaaaccatcagcagtgttctggaatcctatgtgaatgacaaacactaagaaaccatcagcagtgttctggaatcctttgtgagtgacaaacattcagacccccttagcagtgttctggaattctatgtgagggacattcagacatagcagtgttttgggcatagcagtgttttggaaaccaatgtgagggccaaacagtcagaacccagcatcagtgttctggaatacttggtaagggacaaacattcagaaaatcttatcagttttctggaatcccaactgagggagaaacgctcagaaaatatctgcagtgttctagaattctatgtgagggacaaaccctcattaccgagctgcagtgttctggattcctaggtgagggacaaacactcagaacaaagcagcagtgttctggaatcctatgtgatggacaaaaactcagaacccagcagcagtgttctgataccctatgggacggacaaacactcagaacccagcccctgtgttctggaatcctatctgaaggacaaacattcggagacttgaagaagtcttctggaatcctatgtgaaggacaaacagtcagaaacctgtagcaatgttctggaatcatttgtaaggaacaaacactcaaaactcaaaagcagtatcctggaatcctatgtgagggccaaacactaagaacccagcagcagtattttcgaatccttaatgagtgacaaacagtcagaaacctgcagcagtgttttagattgctttgtgatatacaaacattcagaccctcgaagcagtgttctggaattctgtttgagagacaaacactcagaacccagccactgtgttctggaatgttatctgagggaaaaatattcggagcctcgtagaagtgttctggaatcctatgtgagtgacaaatactcagaaaccatcagcagtgctccggaatcctttgtgagggataaataaacagagcccagcagcagtgttctggaatccttcgtgagggacaaacattcagaaccttgtagccgtgttctggaatcgtatgtgagggtcaaacactttgaaccagcagctgtgttctggaatcctatgtgagggacaaacactcagaacccagcaacagtgttctgtaatcctttgtgagggacaaacactaagaacccagcaacattgttctgcaatcctttgtgtgggacaaacactcagaacccagcagcagagttctggaatcccatgtgagggacaaacgttcaggcactcagaatagtgttttggaatcctatgttagggacaaacactcagaaaactgcagcagtgttctggaatcctacgtgggggacaagcattcagatcctgatagcactgttgtggaatgctctgtgagggacaaacaatcagaccctcgtagcagtgttctggaatcctgtgtgaggtacaaaccctcagaactcagcagcagctttctggaattctatgtgagggacaaaccctcagaacctaacagcagtgttctggaatcatacgtaaggtaataacactcagaaccctgcagcagtgttctggaatgctatgtaagagacaaacacacaaaacagagcagtagtattctggtatcctatatgaggtaaaaacactcagaacccaacagaagtgttctgaaatcctatgtcaggcacaaacattcagaagctcccagaagtgttctggaatattatgtgaaggacaaaaactcagaatccaggtgcagtattctggaatcctatgtgagggacaaacattcagaccctcctagcagtgttctggaatgcaatctgttgtagaaaccctcagaacacagcagcagttgtctggaatcctttgtgatggaaaacattcagaccctagtagcagtgttctggaatcctatgtgacggacaaaccttcagaatccagcaatagtgtactggaatcctctgtgagggacatacactcagaacccagcagtagtgttttggaatcctttgtgagggacaaaccctcagaatccagcagtagtgttctggaatcctctgtgagggacatacactcagaacccagcagtattgttctggaatcctatgtcagggacaaacattcagaaaccagcagcagttttctggaatcctatgtgagggacaaacactcagaaaccagcagcagtgttctgcaatcctatgtgagggacaaacactctgaacccagcagcagtgttctagaatcctatgtgagtgacaaacattcagaattttgtagcaatgttctgccattctatgtgagtgacaaacactcagaagccagcaacagccttctagaatcctatgtgagggaaaaacactcagaaaccagcagcaatgttctagcatcccttgtgagggacaaacattcagaatctcgtagaagtgctctggaatcgcaagtgagggagaaacacacagaacccagcagcaatgttttggaatcctgtttgagcgacaaagatacagaacttcgttgcaatgttctggaatcccatgtgagggacaaacactgagaatccagcagcagtgtgctggaattctatgtgaggaacaaacactcagaacccagcagcagtgttctagaatcctatgtgagggacaaacattcagaaactcgtagcagtgttctgcaatcctgtgtgagggacaaacactcagaacccagccactgtgttctggaatcctatctgagggacaaacattcagacactcttagaagtgttctagaatcctatgtgagagacaaacactcagaaacaagcagcggtgctctggaatcctttttgagggacaaacagagcccagcagcagtgtcctggaatcctttgtgaaggaaaataattgagaccctcgtctcagttttctgcaatcctatgtgagggagaaacactcagaacccagcagcagtgttctggaatcccatgtgagagacaaacactgagatcctagcagccctgttctggaatcctatgtgaggtacaaactctcagacactcgaagcagtgttctgggatcctatgtgagggacgaccggtcagaacccagcagcagtcttctggattcctatctgagagtgaaacattccgaccctcacagcagagttctggaatcctatgtgagggacaaacactcagaacctaccagcagtgttctggaatcctttgtgaggaacaaatactcagaacccagccgcagtgttctggaatcccatgtgagggactagcattcagaccctcatagcaatgttctgaaatcctatgcgttggagaaaaatacagacactcctagcagtgttctggaattctatgagagggacaaacaatcagcacccagaagcagtattctggaatacttagtcagggaccatcagtcagactctcttaacagtgttccagaatcctttgtgagggagaaacactcagaccctagtagcagtgttccggaatactatgtgagggacaaacgctcagaacccagcaggagtgttttggaattcaatgtgaagggcaaaccctcagaacctagcagcatagttctggaactcagtgagagggacacacactcagaacccagcagcagtgttctggaatactgtttgacggaaaaacacttagaaaccaacagcagtgtcctggaatccttcgtgagggacaaacatttagaaccttgtagccgtgttctggaatcgtatgtgagggtcaaacactttgaaccagcagctatgttctggaatcctatgtgagggtcaaacactcagaacccagcaacagtgttctgtaatcctttgtgagggacaaacactaagaacccagcaacattgttctgcaatcctttgtgtgggacaaacactcagaacccagcagcagagttctggaatcccatgtgagggacaaacgttcaggcactcagaatagtgttttggaatcctatgttagggacaaacactcagaaaactgcagcagtgttctggaatcctatgtggggaacaagcattcagatcctgatagcactgttgtggaatactttgtgagggtgagacatgcagaccctggtagcagtgttctataatcccatgtgagggccaaacactcagaatccagcaacagtgatctggaatcttatgagttggacaaaaactcacaacccagcaaattgttctggaatcctaagtgatggacaaacactctgaactaagcagcagagttctggaatcctatgtgagggacaaacactcagaacccagcagcagtgttaaggaatcctatgtgagggacaaaccctcagaatgttagagacacatagaattccagaacactgctgctggtttctgagggtttgtccctcacataggattccagaccactgctatgatggtctgaatgtctgccttcacaaaggattccataacactgctgctgggatctgagggtttgtccctcacataggattccagaccactgctatgatggtctgaatgtctgccttcacaaaggattccataacactgctgctgggttctgagggtttgtccctcacataggaatctagaacgctgctgctgggttctgagtgtttgtccctcacatgggattccagaacactgctgctgtgttctgagtgtttgtccctcacgtagacttccagaacagtgctacgatggtctgaatgtttgtcccacaaacaggattccagaagactgctgatgggttcggagtgtttctcccttacataggattccaaaacactactgctaggttctgatgttttgtccctcacatagaattccacaacattgcgtctgggttattagggtttgtccctcaaataggattccagaccactgatacgatggtctgaatgtttgtccctcacaaaagattccagaacactgctgttgggttctgagggtttgtccctcacgtaggattctagaacactgttgctgggttctgagtgtttatccctcacataggattccagaagaatgctgctgggttctgagtgtttgtcctcacttaggattccagaacactgctgctgggttctgagggtttgaaacacacaccggtttcgagaacactgctacaagggtctgaacgtttgtttctcacataggattccagaacactgctatgagggtctgaatgtttgtccctgctaaattattccagaatactgcttctgggttctgagtgtttgtccctcacataggattccagaacactgctacgagggtctgaatgcttttccctcacataggattccagtacactgcaacgagggtctgcatgtttgtaacttggaaaatattaaagaacactgctgctggtttcagagtgtctgtcctgtacatagaattccggaacactgctgctggatttggagtgttttttcctcacgtaagattccacagcactgctactgggttctgagggtttgtccctcccttagaattccagaacactgctactcgttgctcactgtttgtccctcacataggattccagtacactgttgctgtgttctgagtgcttgtcctcacataagattccagtacactgttaagagggtatgaaagtttgtccctcacaaaggattccagaagagtgctgcggggttctgagtgtttgcctctcacataggattcctgaatactgctgatatgttctgtgggtttgtccctcacgtagaattctagaacactgctgctggattctgagtgcttgtccctcacctaggattccagaacactgctatgagtgtctgaatgtttgtcccacacaaaggattccacaacaatgattctcgtttttgagggtttgtccctcatatagaattccggaacaccatggctaggttctgagtgtttgtcccacagagagaataccaggacactgcttccacgttctgtgtgtttgcccctcacataggattccacaacactgctctgagggtctgaatgtttgtccctcacaaaggattccagaacactgctgctgttttctgagtgtttgtcctcagattggactccagaacactgctacaactgtacgaaagtttgtcccacagaaaagattccagaacaatgctgctgggttctgagtgtttatccctaacataggattcaacaacactgctctgagggtctgaatgtttgtccctcacaaaggattccagaacactgctgctgttttctgagtgtttgtcctcagattggactccagaacactgctacaactgtacgaaagtttgtcccacagaaaagattccagaacaatgctgctgggttctgagtgtttatccctcacataggattcaagaaccttgcagttgggttctgagtgttttaccctcacataggattccagaatactgttgccaagttctgagggtttgtccctcacataatattctagaacactgctgctgggttttaagggtttgtcactcacataggattccagaacactgcttgaagggtctgaatgtttgtccttcacaaaggattatagagcactgctgccatgttctgagtgtttgctccaagcataggaatccacaacaccgctcggagggtctgaatgtttttccctcacaaaggactccagaacactgctgctgggttctgtgtgtttgtccacacaaaggattccagaacagtgttacagggttttgagtgtttgtccctcacttaggtttaaagaatattgctctgagggcctgagtgtttgtccctcatgaaacactctagaacactgctgctggtttcggagtgtttgtccctcacatagaattccagaaccctcctgagagggtctgaacgtttgaccttcacaaaggattcccaaacactgctgctgggatctgagtgtttgtccttcacataggattccagaacactgctacgggggtctgaatgtttctccctcacaagggattccagaacactgctgctgagttctcagtgtttgtccctcacaaaggattccagaacactgctgctgggttctcagtgtttgtctctcacataggactcaggacactgctacgagggtgtgaatgtgtgtcccacacttaggattatggaacactgttacaagtgtctgaatgcttgtccctcacataggactccagaacactgcaacagagttctgagtgcttgcccctcacttaagattaaaggacactgctatgagggcctgaatatttgtccctcacaaaagattccagaacactgcttccgggttcggagtgtttgtttctcatattgaattccagaacactgctacctgggtctgaatatagtccctcacaaaggattctgtaatatcgttgctgggttctgagactttgtccctcacataggattacagaacatggctacgagggtctgaatgattttccctcaaaaaggaatccagaacactgctgctgggttctgagtgtttgtccataacataggataccagaacactgctgctgggttctgagtgtttgaccctctcataggattccagaacactgctgttgggttctcagtgtttctccctcacataggattccagaacactgctacaagtttctgaaggtttttccttcacaaaggattccagaacactgctgcggggttctgtgtgtttgtcaatcaaatatgattccagaacacttctgctcggttcttagtgtttgccactcacatatgattcctgaatacttctacgagggtctcaaagtttgtcactcacataggattccagaacacttctaggagggtatgaatgtgtgtccttcacaatggatttcaaaacacactggtgggttctgaggatttctccctcacataggattccagaactctgttgctggttttccagaacactgctgatgggttctgtgtctttgccaatcaaataggattccagaacactgctgctgggttctgagtgtttgtcctacacataggtttccagaacactgctacgagtgtctgaatgtttgtcactcacataggattagagaatactgctaagagggtctgaatctatgtccctcacaaaggattccagaacactgctgctgggttcttagtaattgtccctcacttaggattacagaacactgctacgaggttctgaatatttgtccctcacatcggattccagaacactggtacaaatgtctgaaagcttttccctcacaacgttttcaagaaactgctcctgggttcttggtgttttaccctcacatagtattccagaaaacttctccaaggttctgaatgtttgtccctcacaaaggattccagaacactgctgctgggttctgagtctctgtcactcacataggattctaggacaattctgctgggttctgattgagcctcacatcttatccagaacactgctacgagggtctgaatctttgtccctcacaaaggattccagaacactgctgccgtgttctcagtgtttgtcccttacatagcaatccggaacactgcttctgggatctgagagtttgtcccacacataggattccagaacactgctgctgggttcctggtgtttgtccctcacaaaggattccagaatactgctactgggttctgattgtttgtccctctcataggattccagaacactggtacgacggtcttaaggattctccgtaacatagcattccagaacattgctacgatggtctgaatgctagtccctcacgtgggattccagaatactgttgctgggttctgagtgtttgtccttcacataggattccagaacactgctgctgggttctgaatgtttttccctctcacaggattgcagaacacagctatgagggtctgaatgtttgtctctcacatatgattccagaacactgctatgatggtctgaatgcttgcccctcatgtaggataccagaacacagctgctgggttttgggtgtttctctgtcacataggattccagaacactgctttgagggtctgaatgtttttctctcacaaaggattccaaaacactgctgctgggttcggggtgtttgtccctcatataggattcgagaacactgttacgaggctctgaatgtttgtgcctcaggaaggaaaccagcacactgctgctgggttctgagggttggtccctcacataggattccataacactgataagaaggcctgaatgtaagtccctcacaaacactgctgcagggttctcagtgtttgtccctcacatagtattacagaacatggctgctgggttctgattatttgtccctcacatagcattcgagaacactgctacgggggtctgaaggtgtatatagcacatgggattccataacattgctacgagggtctgaatatttgtccctcacaaaggattccagaacactgctgccggtttctgagtgtttgtccctcccataggattccagaacattgctgctgggttctgagggtttgtcaatcccataggattccagaacactgatgcagggttctgagtgattctccctaacataggattcaagaacactgctaagagggtctgaatctttgtccttcacaaagaattccagaccactcctgatgggtcctgagtgtttgtcccacaaattggatttgagaacactgctgctgggttctcagggtttgttcctcacattggattacagaacactttaggagggtctgaatgtttttccctctgttagaattccagtacacagtggctgggttctgagtgtttgtccctcccataggattgcagaacattgctgcaggtttctgagtgattgtccctaacataggattccagaacactgctacgagtgtctgaatgtttgtccctcacaaagaattacagatcaatcctgttgggttctgagtgtctgtcccaccaattggattcgagaacactgctgctgggttctgagggtttgttcctcacataggattacagaacactgctacgaggttctgaatgtttttccctcacaaaggattcccgaacactgctgctgtgttctttgtttgtccaccacatcgtatttcagaacactgctgcagggttctgagtgtttttccatgacataggattccagaacagtgccacgacggtctgaatgattgtccctcacataagattccagaacactgctatgagggtctgaatgcttgtccctcacatagcattccagaacactgctgctgggttctgaatgtttgcccctcacataggtttccagaacactgctactgggttctgaatgtttgtccttcacataggattatagaacactgctccgacggtctgaatgtttgtccctcacttaagatttcagaacactgctgctgatttttgaatgtttctccctcacataggaatccagaacacttctgctggattctgagtgtttgtcccttatataggataccagaacacttctactggattctgagtgtttgtcccttatatagaataccagaacactgctgctgggttttgtttgtccctcacatagcattccagaacactgctgctgggttctgaatgttagtacctcacgtacgattccagaacactgctgcaaggttctgagggtttgtccttcacatagaattgcagaacactgtttctgagttctgagggtttgtacctcacacaggattccagaacactgctacaagggtctgaatgtttgtccctcacagagcattccagaacagtgttatgagggtctgaatgcttgtcccacacataggattccagaaccctgctgcagggctctgagtgtttgtccctcacataggattccaaaacactgctctgagtgtctgaaagtttgtccctcaaaaaggattccagaacactgctgctgggttctgacggtttgtccctcacatagaattcccgaacactgctgctgggttctgagtgcttgttccaaacccgggattccagaatactgctcggaggttctgaaagtttgctcctcaccaaggataccagaacactgctgctgggttctgaatgtttgtccctcacatataatcccagagcactgctacgagtgtctgaatgtttgtccctcaaagcgataccagaacactgcttttgagttctgagtgtttgtccttcacaaagtattccagaacactgctactgggttctgagtgtttgtccctcacatagggttccagaacactgctactgggttctgagtgtttgtccttcacataggattatagaacactgctccgagagtctgaacgtttgtccctcacttaagatttcagaacactgctgctgatttttgaatgtttgtccctcacatgggaatccagaacacttctgctggattctgagagtgtttgtcccttatatagaataccagaacacttctactggattctgagtgtttgtcccttatataggataccagaacagtgctgctggcttttgtgtgtttgtccctcacatagcaatccagaacacttctgctgggttttgaatgttagtaactcacatacgattccagaacactgctgcaaggttctgagggtttttccttcacatagaattccagaacactgcttctgagttctgagggtttgtacctcacacaggattccagaacactgctacaagggtctgaatgtttgtccctcacagagcattccagaacagtgctatgagggtctgaatgcttgtcccacacataggattccagaaccctgctgcagggttctgagtgtttgtccctcacataggattccaaaacactgctctgagtgtctgaaagtttgtccctcaaaaaggattccagaacactgctgctgggttctgacggtttgtccctcacatagaattcccgaacactgctactgggttctgagtgtttgtccctcacataggactacagaaaactgctgctgttttctgaatgtttgtccctcacataggatttcggaacactgctacgagggtctgaatgtttctccctcacatagcattatagaacagtgctatgagtgtctgactgtttgttccccacaaagtattccacaacattgctgctgggttctgagggtttgttcctcacatggaattcctgaacattgctgctgggtactgggtatttgtccctcacataggatttcagaacacgactgctgggttctgagtttttgtcccacacctaggatttcagaacagtgctacaagggtctgaatgtttgtccctcgcatagcattccagaacactgctgctggtttccaaatgttttcactcacataagattccagaacacttctgatgggttctgtgtgtttgtacatcatttagaatacaaaacactactgctgggtttttagtgtttgtccctcacataggattccagagcactgctgcagggttctgagtgtttgtccttcacataacaatccagaacactgctgctgtgttccgagtgtgtgtccttcacatagaattccagaacactgctgctgggttctgagggattgtacctcacataggattctagaacactgctactagggtctgaatgtttgtccctcacatagcattccagaacagtgctatgagggtctgaatgtttgcacctcacgtaggattccagaacactgctgcagggttctgagtgtttgtctctcacctaggattccagaacagtgttacaggggtctgaatgttgctgcctcacaaacgataccagaacactgctgctgggttcagagtgtttgtccctcacaaaggattccggaacactggtaccgttttctgagtgtttgatcgtcgcataggattccagaacactgacacgagggtccgaatgtttgtccctcacataggtttccggaacatagctgctgggttctgagtgattgtccctcaccttggattccagaaaactgctgcagggttctgagtgtttgtccctcacataggaatccagaacactgctgctgggttctctgtgttcgtccctcacataagactccagaagactgctgctaggttctgagggtttgtccctcacgtagaattccagaacaccgcttctgggttctgaggttttgtacctcacttaggattccagaacattgctaagagggtctgaatgtttgaccctcacataacattacagagcagtgctcggagggtctgaatgattgtccctcccgaaggattccggaacattgccgcggggatctgaaagtttgtccctcacataggattccagaaaaaggctccgagggtctgaatgtttgttcttcagaaaggattccagaacacagcttctgggttctgagtgtttgtccctcacataggattccagaaaactacagctgggttctgagtgtttgtctctcacctaggattccagaacactgctatgagtttctgaatgttaggtcctcacaaacgattccaggacactgctgctaggttcagaatctttgcccctcacttagtattccagaacactactagtgttttctgagtatttgtccttcacataggattccagaacactcctacgagggtctgaatgtttgtccctcacagagcattccagaacagtgctatgagggtatgaatgcttgtcccacacataggattccagaaccctgctgcctggttctgagtgtttctcccttacattggattctggaacactgctgctgcatactgagtgtttgtccctcacatagcgttccagaacactgctgcttggttctgagtgttagtccgttacttatgattccagaacactgctgctgtattgtgagtgtttgtcccttacataggattccagaacactgcaacaagggtctgaatgtttgtccctcacataggattccagaaccctactgctgggttgtgagtgtttgtcactcatacaggatttcagaacacttctgctgggttctgtgtgtttgtccatcaagtaggatacaagaacacttctgctgggttttcagtatttgtccctcacatgggattcccaaacgctgctgcaggtttctgagtgcttgtccctcacataggaatgcagaacactgctgctgggttctgagtgttcgtccctcacataggattccagaacactgcagctaggttctgagggtttgtccgtcatgtagaattccagaacaatgctgctgggttctgaaggtttgtacctcacataggatcccagaacactgctacgaggttctgaatgtttgtccctcacagagcattcgagaacagtgctatgagggtctgaatgcttgtccctcacttaggatcccagaacactgctgaagggatctgaatgtttgtccgtcactttggattcccgaacactgctgctgggttctgagtgtttgtccctcacttaggagtccagaactctgctgctgggttctgagtgtttgtccctcatagaggattccagaccactgctgttgggttctgagtgtttgtccctcaaaaaggattcgagaacacggctccaagggtatgaaagtttgtctctcacaaaagattgcagaaaaatgctgctgggttctgagtgtttgtccctcacaaagtattccagaacactgctgctgtgttctgagcgtttgtccctcacataggattccagaaaattgctacaaggttctgaatgtttgtccatcagaaagcactccctatcactgctactgggtcctgagtgtttgtccttcacataggattccagaacactgctattgcgttctgagtgtttgtccttcacataggattccagaacactgctccgagggtctgaatgtttgtccctcatttaggattcctggacactgctgctagtttttgaatgtttgtgtctcacataggaatccaggacacctctgctgggttctgagtgtttgtcccttatataggataccagaacactgctgctgggttttgtgtgtttgccctcacatagcattccagaatactgctgctggattctgagtgttagtccctcacatacgattccagaacactgctgcaaggttctgagggtttgtccttcacatagaattccagaacactgcttttgacttctcagggtttgtacctcacgcaggattccagaacactgctatgagggtctgaatgtttgtccctcacagaacattacagaacagtgttatgagggtctgaatggttgtcccacacataggattccagaaccctgctgcagggttctgagtgtttgtccttcacatagtattccaaaacactgctctgagtgtctcaatatttgtccctcacaaaggattccagaacactgctgttgggttctgaggctttgtccctcacatagaattcctgaacactgctgctgggttctgagtgtttgttcctcacataggacaacagaacactgctgctgttttctgagtgtttgtccctcacataggatttcagaatactgctatgagagtctgaaagtttctccctcacatagcattatagaacagtgctatgagtgtctgactgtttgtccccaaaaagttttccagaacacaggtgctgggttctaagggtttacgtcacatagaattcctgaacactgctgctgggctctgagtatttgtccctcacataggattccagaacaacagtgctgggttctgagtttttgtcccacacctaggatttcagaacagttctacaatggtctgaatgtttgtccttcacaaaggattccagaacactgctgctgggttttgagtgtttgtcactcttgtaggattccagaacacttctgatgggttctgtgtgtttgtcaatcatgtaaggtacaatacattactgctgggtttttagtgatggtccctcagatgggattccagagcactgctgcagggttctgattgtttgtccttcaaataggaatcgagaacactgctgctgtgttccgagtgtttgtaattcatgtagatttgcagaattctactgagttctatgggtttgtacctcacataggactccagaacactgctatgaggctctgaatgtttgtccttcacatagcgttccagaacagtgctatgagggtctgaatgctcgtccctctcataggattccagagcactgctggggggttttgagtgtttgtccctcacatatgattccagaacaatgctgcgaagttctgaatgtttgtccctcacaaaggatttcagaacactgctgctgggttctgagtgtttgtccctcactcaggattccagaacactgcagatgggttctgagtgtttatctctcacctaggattccagaacagtgctatgagggtctgaatgttagtccctcacaaacgataccagaacactactgttgggttcagagtgtttgtccctgacataggattccagaacactactactgttttctgagtgtttgatcatcacataagattccagaacactgctacgagggtctgaatgtttgttccacacataggattccagaacactgcagctgggttctgagtgattgtacctcacctaggattccagaaaactgctgcaaggttctgagtgtctgtccctcatataggaatccagaacactgctgctgggttctgagtgttcatccctcacataggattccagaacacagtggctggcttatgtgtgtttgtccatcacataacattccagaaccctgcggctgggttctgagtgtttgtcccacacataggattccggaacgctgctgctgggttctcagtgtttttccctcacataagattccagaacactgctttgaaggtctcatagtttgtccctcacaaaggattctggaacattgcttctgggttctgagtgtctttcatttatgtaggattccagaacactgctgctgggttctgagtgtctgtccctcacatgggattccaaaacactgcagctggtttcagagtgtttgtccctcacatatgattccagaacactgctatgaatttctgaatgtttgtcatgcacaaaggattccagaacactgctgctgggttctcagtgtttgtccctcagataggattccagaacactgctgctgcgttcttagtgtttgtctctcacataggatttcagaacactgctacgagggtctgaatgtttctccctcacttagcgttacagaatagtgctctgagtgtctgaatgcttgtcactcacaaaagattttagaacactgctgctggtttcggagtgtttgctcctcacatagaattgccgaacaatgctgccgagtcctgggtatttctccctcacataggattccagaacactgctacagttttctgagtgtttgtccttcacataggattccagaacactactacgagagtctgaatgtttttccctcacaaaggattgtaggacactgaacctgggttctgtttgtttgtccctcaaaaaggattacagagcgatgctccagatttcttagggtttgtccctcacataggataccagaacaattctccgaggttctgaatgtttgccctcaagtaggattccagtacacagtctctggattctgagtgtttgtccctcacataggattctagaacacttctacgagattctgattgtttgtccctcacaaaggattctagaacactgcttctgggttctgagtgtttgtccctcacaaaggattctagaacagtgttgctgtgttctctgggttagttcctcacataggattcgagaacactgctgctgggttctgaatgtttgtccctcacataggattccagaacactgcagctggcttctgagtgtttgtccctcacatagaattccagaacaccgctatgaaattctaaaactgtgtcgcatacataggatttcagaacactgctgcttggttctgagtgtctgtccctcacttaggattccagaacactgctacgagggtcggaatgtttatccctcacaaaggtttccagaacaatgctactgggttctgagtgtttgtccctcatgttggatttgagaacactgcagcgagggtctgaatgtttttccctcacataggattccagaagactgctaagagatctgaatatttttccctcacaaaggattgtacaatgctgctactgagttctgttagtttgtcccacacaaaagatcccagaacacagctacagatttcttagtgtgtgtccctcacttaggattccagaacacttctcagaggttctgaatgtttagcctcagataggattccagtacatagtggttggattttgagtgtttgcccctcacataggattccagaacagtgttacgaggttctgaatgtttgtccctcacaaagtattctagaacacttctgctgagttctgagtgtttgtccctcacaaaggatgctggaacactgctgctgggttccggtgtttgtccatcacataggattccagaacactgctgttggtttctgagtgtttgtccatcacttaggaatccagaacactgctgccatctcagtgtttgtccatgacatagaaatccacaacactgctacgaagttctgaaagtttgtcacacacataggattccagaacactgctgctgggttctgagtgattgtccctcacacaggattccagaacactgctgctgggttctgagtgtttgtccctcacacaggattccagaacactgctgctgggttctgagtgtttgtccctcacataagattccagaacagtgctacaagggtctgaatgtttatcagtcacaaagtgtttcagatcactgctactgagctgttagcatttgtccctcatattggattccagaacaatatcaagagggtccgaatgtctttccatcacataggtttccagaacactgtttcgatagtttgaatgtttttccctaccaaaggattccagaagattgctgctgggttctgagtgtttgtcccacatataggattccaaatcactgcaacgagggtctgaatgcttttccctcacaaaggattcaagaacactgctaagatggtctgaatgtctttccctcagaaaggattgtagaacactgctactgggttatgtttgtttgcccctcacaatggattccagagcactgctgcagatttcttagagtttgtcccacacataggattccagaacacttctatggggttctgaatgtttgccctcagctagaattcaagtacacaatggctggattctgagtgtttgtccctcacctaggattccagaacactgttacgaggttctgaatgtttgactctcacaaaggattctagaacaatgatgctgggttctgagtatttgtccctcacaaaggattccagaacactgctgatgggttctgagtgtttgtccctctcataggattccagaacactgctgctgggttctgagtgtttgtccctcacttaggattcaagaacactgctgctggcttctcagagtttgtccctcacatagaattccagaacactgctaggaagttcagaaagtttgtcgctcacatgggattccagaacactgctgctgggttgtgagtgtttgtttctctcataggattccagaacactgcttctgcattctgagtgtttgttcctcacataggattccaaaacactgctacgagggtctgaatgtttatccctcacaaaggtttccagaacactgctagtgggttctgagtgtttgcccttatattggattccagaacaatgctacgagtgtctgaatgtttttccctcacataggattccagaacactgttacgagggtgtgaatattttccctcctaaaggattccagaacactgctgctgggttctgagtgtttgtccctcaggtaggattccagaacacagcttctagggtctgaatgttttccctcacataggattccagaacactgctacgaggttctgaatgtttttctctcacagagcattgtagaacattgctactgggttctgtttgcttgtccctcacaaaggaatccagagcactgctgcagatgtcttagtttttatccctcacatacgattccagaacacttctatgaggttctgaatgtttgcactcatatattattccagtacacagtggctggattctgagtatttgtccctcagataggattccagaacactgctacgaggttctgaatgtttgcactcatatattattccagtacacagtggctggattctgagtatttgtccctcagataggattccagaacactgctacgaggttctgaatgcttgtccctaataaaggattctagaacactgggactgggttcggagtgtttgtctcacaaaggattctagaacaataatgctggattccgaacgcttgtccctcacttaggattccagaacactgctgctgggttctgagtgtttgtccatcacttaggattccaaaacactgcagctgggttctgagtgtttctccctcacatagaatttcagaacactgctacaaatttctgaaagtttgctgctcacttaggattccagaacactgctcctgggttctgagtgtttgtctctcacttaggattccagaacactgctgctgtgttctgagtgtttgtccctcactttggattccagaacactgctacgagggtctgaatgtttatccctcacaaatgtttccagaacactactactggattctgagggtttgtccttcatattggattccagaacaatgctgcgaatgtctgaaagtttttccctcacataggattccagaactcagttacgagggtgtgaatgtttttccctcccaaaggattccagaacactgctgctctgttctgagtgtttgtccctcatatagggttccagaacgctgctatgaggatctgaatgtttttccctcacaaaggattttagaacactgctactgagttatgtttttggtcccacataaagaattccagggcactgctgcagacttcttagtgtttgtccttcacataggattccagaacactgtgatgaggtttggaatgttggctctcagataggattccagtacactgtggctggatactgagtgtttgtccctcacatagaattccagaacactgctacgaggttctgaatgtttgtccttcacaaaggattctagaacacttagtctgggttctgagtgtttgtccctcacaaaagattctagaacattgctgctaggttctgaggatttgtatctcacataggattccagaacactgctaggagggtctgaatttttgtccctcacatagaattccagaacactgctgctgatttctcactgcttgtccctcacatagaattccagaacattgctacgaaattcagaaagtttgtcactcacataggattccagaacactgctgctgggttctgagtgtttctccctctcataggattccagaacactgctgctgggttctagtgtttgtccctcacataagattgcaaaacactgctacgaggttctgaatgtttatccctcataaaggtttccaggaaactgctgctgggttctgagtggttgccctcatattgtcttccaaaacaatggtacgagtgtctgaatgtttttccctcacctaggattccagaacactgttatgagggtgtgaaagtttttccctcctaaaggattacagaacactgctgtcgggttctgagtgtttgtccctcacaaaagattctagaacacttctgctgggttctgtgtgtttgtccatcacatatgattcaggaacactgctgttggtttctgaatgtttgtccctcacttaggaatccagaacactgctgctggctactgagtgtttgtccataacatagaaatccagaacactgctatgaagttctgaacgtttgttgctcatataggattccagaagactgtggctgtgttctgagtgtttgtccctcacataggattccagaacactgctgctgggttctgagtgtttgtcccccgcataagattcccgaacagtgctacaaaggtctgaatgtttatccctcacaaagcatttcagaacactgctactgggttcatagcatttgtccctcatattggattccagaacaataatatgagggtctgaatatctttctattacataggaatccagaacaccgtttcgagggtgtgaatgttttcccctcccaaaggattgcagaagactgctgctgggttctgagtgtttgtcccacatataggattccagatcactgctacgaggttctgaatgcttttccctcagataggatcccagaagactgttatgaggttctgaatgtttttccctcacaaaaggattgaagaacactgccactgggttctgactgtttttccctcaaaaaagattccagagcagtgctgcagatttcttactgtttgtccctcacataggattccagaacacttctgtgaggttctgaatgtttgccctcggataggattccagtacacagtggctggattctgagtgtttgtccctcacataggattccagaacactgctacaaggttatgaatgcttgtcacacaaaaaagattctagaacactgctgctgatttctgagtgtttgtgcctcacaaataattctagaacactactgctgagttctgagtacttgtgcctcacataggattcgagaacactgctgctgggttctgagtgtttgtccctgacttaggattccagaacactgcttcttggttctgagtgtcagtccctcacatagaattccagaacaggctatgaagttctgaaagtttgtcgcttacataagattccaaaacactgctgctggattctgagggtttgtcccttgcataggattccacaacactgctgctgtgttctgaggatttctccctcacgtaggattccagaacacagctacgaggttctgaatgtttattcctcacaaaggtttacagaacactgctatggggttctgagtgtttttccctcatattggattccagaacaatgctgcgagtttctaaatgttttcccctcatataggattcgagaacactgttacgagggtgtgaatatttttccctcccaaataattccagaacactgttgctgtgttctgagtgtttttccctcatataggattccagaacagtgctacaaggttctgaatgtttttccctcacataggattccagaagactgctatgagggtctgaaagattttccctcactaaggattgtagaacactgcaactgggttctgtttgtacctcacaaaggatttcagagcactgctgcagatttcttagtgttattccctcacataggattccagaacacttctacgacgttctgaatgtttgtgcttggataggattccagtacacaatggctagattctgaatatttgtccctcacatagaatttcaggacactgctacgagtttcttaatgtttctccctcacaaaggattacagtacactgctgctgggttctgagtgtttgtccctcacattggattccagaacactgatgctgggtgctgagtgtttgtctctcagttaggattccacaacactgctgctgggttctgagtgtttgtccctcacatagaattccagaacactgctacaaatttctgagagcttgtctccacataggtttccagaacactgctgcttttttctgagagtttgtccctcacataggattccagaacactgctgctgggttctgagtgtttgtcccacacataggattccagaacattgctacgagggtctgaatgtttatgcccaacaaagggttccagaacactgctactgggttctgagtgttcatacttcatattggattccaaaacaatgctatcaggatctgaatctttttccctcacataggattccagaatactttaacgagggtgtgaatatttttccctcccaaatgtttccagaacactgctgctgggttcggagtgtctgtcactcatatagaactccaaaacactgctacaagggtctgaatatttttccctcacataggattccagaaccctgctacgagggtctgaatgtttttccctcacaaaggactgatcaacactgctacagggttctgtttgcttgtccctccaaaggattccagagcactgttgcagatttcttagtgtttgtccctcataggattccagaacacttctctgaggttctgaatatttgccctcagataggattccagtgcacggtggctggattctgagtgtttgtccctcacataggattccacagcactgctgctggcttctgagtgtttgcccctcacatagaattccagaacactgctacgaagttctgaaagtttttcgctcacttaggttgccagaacactgctgctgggttctgagtatttgtcctacacataggattccagaacactgctgctgggttctgactgtttgtccctcacataggattccagaagactgctacaagggtctgaatgtttatccctcagaaagggattcagaaccctgctacaaggatctgagtgtttttccctcacataggattccagaacactgttatgagagtgtgagtgtttctccctcccaaagggtttcagaacactgctaatgggttctgagtgtttctccctcgtacaggattccagaactctgccacgatgttctgaaagttttcccctcacataggattccagaacactgctacgagagtctgaatgtgtttccctcacaaaggattgtagaacagtgctactgtgttctgtgtgtttgtccctcacaaaggattccagagcagtgctgcagatttcttagtgttgtccatcagataggattccagaacacttctacaaggttctgagtgtttgccctcagataggatggcaattctcattggctggattctgactgtttgtccctcacatgggatttcagaacacagctacgatgttctgaatgtttgtccctcacaaaggattccagaacactactgctgggttctgagtgtttgtccctcacaaaggattctacaacactgctgctgggttctgtgtgtttgtccctcacatagaattccagaacactgctgcttttttatgagtgtttctccctcacataggattctagaactctgctgctggcttctgagtgtttgtccctctaatagaattccagaacagtgctacgaagttctgaaattatatcactcacataggattcctgaacactgctaggaatgtctgaatgtttatccctcacaaagggatccagaacactgctattgggttctgagtgtttgtccctcatatgggattaaagaataatgctacgaggttctgaatgtttttccctcatagagaatgtagaacactgctaccggattctgttgtttgtccctcagaaaggattatagaacagtgctgcagatttcttagtgtttgtccctcacatagaattccagaacacttctacgaggttctgaatgtttgccgtcgataggattccagtacacagtggctggattctgagtgtttgtccctcacatcgcattccagaactcttctacaagtttctgaatgtttgtacctaacaaaggattctagaacactgctgctgcattctgagtgtttgtccctcacaaaggattctagagcactactactgtttcctgaatgtttgtccctcacataggattccagaacactgctgctgggttctcagtgtttgtccctcatatatgattccagaaaactgctacgagggtcagaatgtttttctctgacataggatccaagaacactgctaggaggttctgagtgtttttccctcccaaaggattccggtacactgctgctggtttcttagagtttgtccctcacaaaggattccagaacacttctatgagggtgtgaatgtttgaccctcagataggactccagtactcagtggctgcattgtgagtgtttgttcctcacataggactcaagaacactgttgctgggttctgagtgtttgtccctcacataggattccagaacactgctgctgggttctgagtgttcctcactcacataggattcccgagagatgttacgaggatgtgaatgtttgtctgtcagaaagaattgcagaacactcctgttgtgataagagtgtttgtccctcacattggattccagaacacagcttctagggtctgaatgtttgtccctcacaaatgattccagaacactgctgctggtttttgagtgtttgtcactcacataggattctagaacactgctgctgggttctgagtgtttgtccctcacatcagattccagaacaatgtcattggcttcacagtatttgtccctcacatatgattccagaacactcctatgaggttctgaatgtttcttcctcacaaaggattccagaacactgctgctttgttctgagtgtttgtcgctgacataggattccagaaaaattgctgctgggttctgagtgtttgtccctcacataggattccaaaacagtgctacgaggctctgaaggtttgtccctcacataggattccagaacactggttcgagagtctgaatatttgtccctcacaaaaaattacagacaactgctgctgggttgttagagtttgtccctcacttaggattccagaacacttattttgggttctgaatctttgtccttcacataggataccacaacagtgctgctaacttctgagtgattgtccggcacataggattccagaacactgctatgagggtcagaatgtttttccctcacaaaggcttccagaacactgttgctggtttctgtttgtttgtctctcaaaagtgattccggaacactgatgctggtttttcagtgtttgtcctgcacataggattccagaactcttctgcaaatttctgaacatttgtccctcagataggattccactgcacagtggctggtttctgagtgtttgtctctcacgtaggattccaggacactgctgctgggtaatgagtttttgtgcctcacaaaagattccataaaactgctacgatggtctcaaagtttgtctatcacaaagcatttcagaacaatgctgcttgatctgattgtttgtccctcacaaggaataacagaatactgctgctgatttctgagggtttgtacctcacatagtattccagaacaatgcgacgagggtctgaatgtttgtccctcacagagaattctagaacagtgctatgagggtctgaatgcttgtccctcacattggaatgcagaacactactgcagggttctgagtgtttgtccgtctcataggattccagagcactgctctgagggtatcagtatttgactctcacaaaggattctagaacactgctactgggctctgagtgtttgtcactaacatgggattccagaacactgctgcagcattcttagtgtttgtctctcacataggattcgagaacactgctatgaaggtctgaatgtttgtccctcacaaacgattacagaacactgccactgggttctaagtgtttgtccctcacattagattccagaacactgctgctcggttctgagggtttgttcctcacataggattccaaaacactgctgctgggttctgactgtttgtccctcacataggatttcagaacactgttaagattgtctgaatgtttgtccctcacaaagtattccggaacactgctgctgtgttctgagtgtttgtccctcacataggattccagaagattgctgctgcattctgagtgtttgtccctcacataggattccacaaaactgctacgaaggtctgaatgtttgtccctcagataggattccagaatactgcaatgagggtctgaatcgttgtccctcacataggattctgtcactcctatgagtgtctgaaagctgagctctcccataggattccagaaaacttctactgggttctcagtgtttttcctcacataggatttcagaacactgctgctgcattctgagtgtttgtccctcagataggattccagaacactgctgctgggttctgagtgtttgtccctcatatagaattctagaacaatgctgctgggttctgagggtttgtccctcatatagaattccagaacacagctgatatgttcggagtgtttgttcctcacctaacattccagaacactgttgctgtgttctgagtgtttgtccctcactttgtattccagaactccgcctctaggttctgaggcttatccttcacatcgaattccagaacactgctgctccattctgaggatttgtacctcacataggattccagaacactgctaggagggtctgaatttttgtccctcacatagaattccagtgcagtgctatgaggttctgaacgcttgtccctcacataggattccagaacactgctgcagggttccctgtgtttgtcctccacataggattacagaacactgctgctgggttctgagtggttgtccctcacattggattgcagaacactcctcgtgggtactgagtgtttgtccctcacttaggacacccgaacactgttgctgtgttctgagggtttgtccctcacagaggattccagaccactgctgctttgttctgagtgtttgaccctcacatagtattccagaacacttctacaagtgtctgaatgtttgtccctcagataggattccagaatacagtggctgggttatgagggttgtccctcacatagaattccagaacactgctgccaggttctgactgtttgtccctcaaataggattccagagcccagcttctgggttctgagtgtttatccctcacatacgattccaaaacactgcatcgagggtctgaaagtttgtcccacacaaaggattctagaacactgcttctgcgttctgaatgattttcactcacataggattacagaacactgctgctgggttctgagtgtttgtccctcacatgggatttgaaaacactgctgctgggttcagagtgtttgttcctcacataggattaccgaacactgctactgggttcagagtgtttgtccctcacatgggatttgaaaacactgctgttgggttcagagtgtttgtccctcacataagattccagaacactgctacgaggttctgaatgtttgtccttcaaaaaggattctagaacactgctgctgggttctgagtgtttgtccctcacataggattccagaacactgctgctgggggtgagtgtttgtccctaacatagaattccagaacactgctatgagggtctgaatgtttctcttcagaaaggattccagaacactgctacaaggttctgaatgtttgtccctcacaagagatttcataacactacttctgggtcctgagaggttttccctcacataggattccagactactgctgctgtgtactgtttgtttgtccctcacaaatgattcgagagcactgctgctgttttctgagtgtttgtccctcatacaggtttccagaacactttttcccgtgtctgaatgtttgtacctcacataggattccagaacagagtggctgggttctgagtgtttttccctcatataggattccagaacactgctgctgcattccgagtatttgttcctctcataggattccagaaccctactgcggggttctgagtgtttttccctcacataggattctagaaccctactgcggggttctgagtgtttttcactcacataggactctagaacactgctccgcggttctgagtgtttttcactcacataggattctagaacactgctcctgcattctgagtgtttgtccctcacataggataccaaaacactgctgcaacggtctgaatgtttgtctgacacaaaggattctagaaaatttctactgggttctgagggtttgtcccacacataggattccagaacactgattcgagggtctcaaggtttgtccctcacaaaggattgtcgaacactgctgctgggttctgagtgtttgtcactcacataggattccagaacactgctgatgggttctgagtgtttgtgcctcacaggttattccaaaacactgctgctgtgttcacattgtttgtcccaaacttatgatttgagaacactgctgagaggttctgcatgtttgtccctcacaaaggactctagaacactgctgctgggttctgagtgtttgcccctcacaaagatactggaacactgctgttgtgttcggagtgtttgtcactcacgtaggataccagaacactgctgatggattctgagagtttgtccctcacataggattccagcacacggctgctgggttctgagtgtttgtccctcacttacgattccagagcactgctgctgtgttctgagtgtttgccctcacatagaatatcagaacattgctacaaagttttgaatgtttgttgctcacataggattccagaacactgctgctgggttctgagtgtttgtccctcacataggattccagaacactgctacgagtgtttgaatgtttttccctcacaattattctggaacactgctgctgggatctgtatgtttgtccctcacaaaggattctagagcactgctgctggtttcctgtgtttgtccctcacataggattccagaacacttctacgaatgtctgaatgtttgtccctcagattcgactccagttcacagttactgtgttccgaggggttgtccctcaaataggattccagaacactgctgctgggatctgagtctgtgtccctcacatgagattccagaatacagcttttgggttctgagtgtttgtccctcattttggattccagaacaatgctacgagggtctgaatgtttttccctcacgtgggattccagaacactgctgctgggttctgagggtttgtccctcatgtaggattccaggacactactacgagggtttgaatgtttttccctaacatcgaatcacagaacactgataggaggttctgagtgtttttccctcccaaaggattccagagcactgctgctggtttcttagagtttgtccctcacataggactcccgaacacttctacgagggtgtgaatgtttgtccctcagatagtattccagtacactgtggctgggttttgagtgtttgtgcctcacatgggattgaaggacactgctgctgggttctgagtgtttgtcactcacataggattccagaacactgctgctgggttctgagtgtttatccctcacatcagattccagaacaatgccgttggcttcacagtatttgtccctcacatatgattccagaacactcctatgatgttctgaatgtttgtccctcacaaaggattccagaacactgctgctggattctctgtgtttgtccctcacgtaggattgcagaacactgctttgagtgtctgaatgtttcccctcactaaggattctagaacactgctgctttgttctgagtgtttgtcactcacataggattccagaacacacctgctggtttctgagtgtttgtctctcacatgggaatgcagaacactgctcctggtttaagaatgtttgtccctcacatagcattccagaacactgctgcgagattctgaatgtttttccctcacaaaggattccataacactactgctgggttccgagtttttgagccccacataggattccagaacactgctgctgtgttctgtttgtttgtctctcacaaaggattacagagcactgcttctgggttctgagtgttttttcctcacataggatacagaacactgctgcaggtttctgagtgtttgtcactaacataggattcgaaaacactgctgctgagttctgtatgtttgtccatcacaaaggattcctgagaactgcttctggtatctgagtgtttcctcctcacataggattccagaacaattctacgagtgcctgaatgtttggtcctcaggattccagaacacagtggctggaatgtgactatttgtcctccacataggattccagaatactgctacttatatctgaatgtttgtcactcacatacgatttcagaacactgatgcttggttctgaatgtttgtcactcacataggattccagaaaagtgctacgaggttctgaatgtttgtccatcacaaaggattccagaacaatgatgctgggatctgagtgtttgtccctcacataggatttcagaactctgcttcgatgttctgaatttttttccctcaatgaggattctagaacacttctgctggttccttagtatttgtccctcacataggattccagaacacagcaaagagggtctgaatatttgcccctcacaaaggattccagaaaactgctactgcattctgagtgtttgtccctcacaaaggattgcagagcatggtgctgaattctgagtgtttgtccctcacataggattccagaacacagtgtctgggttctgagtgtttgtctatcccataggattccaaaacactggtacgagggtctgaatgttggtctaatccaaagtttccagaacactgctgctgggttctgagtttttgtccctcacataggattccagaacactgctttgaggatatgaatgtttgtccctcatgaaggattctagaacactgcttctgggttttgagtgtttgtccctcaataggattccagaacactgctcctgggttctgagtgtttgtctctcacttaggattccagaacagtgctataagattctgaatgttggtccctcagaaagtattccagaacactgctgctgggttctgagtgtttgtccctcacatgggattccagaacactgctgctgggttcagagtgtttggccctcacataataatccagaacactgctttgaggttctgaatgtttgtccctcacaaacgattactgaacactgctgctgggttctgagtggccctcacataatattccagaacactgctttgaggttctgaatgtttgtccctcacaaacgattactgaacactgctgctgggttctgagtgtttgttcctcacataggattccagagactcctacgagtgtctgaaagtttgtccctcagataggattccagaacacagtggctgggttctgagtgtttgtcccccacataggattccagaacactgctacgaagttctgaatgtttgtcgctcacataggatttcacatcactactgctgggaattgagggtctgtccctcacatagtagtccggaacactgctgtcgtctctgagtgtgtgtttctcacacagcattccagaacattgctacgagggtctttatatatttacctcacaaaggattccagaactctgcttctcggttctgtttatttgtccctcacaaatgtttccataacacagctgctggtttctgagtgtttctccctcacataggctaccagaacacttctacgagtgtctgaatattgtccctcaggtaagattccagaacacagtggcttggttctgagggtttgtgcctcacataggattccagaacactgctgctgggtacttagtgtttgtcgctcacataggattccagaacactgctactgatttctgcgtgtttttcctcacatatgattccagaacactgctgcaggtttctgagtgtttgtccctcacttacgattacagaacactgctatgagtgtctgaatgtttgtccctaacaaaggattccagaacaatgctttgaggatatgaatatttgtccgtcacaaatgattccacaacactgctgctgggttcttagtgtttgtccctcacttaggattgcataacactgctacgaaattctgaatgtttgtccctaagaaaggattccagaacagtgctgctgtgttctgagtgtttgtcactcctgaatgattccagatcactgctgctggtatccgagtgtttgtccctcacataggattacagaacacttctacgagtgttcgaatgtttgtcactcagacaggattctggaacacagtggctgggttctgagtgtttgtcccttgcataggattccaaaacactgctgctgggctctgagtgtttgtcactcacataggattccagaacccagctgctggattctgagtgcttgtcactcagatacgattccagaacactgcttcgagggtctgaaactttgtctctcataaaggattctagaacactgcttctgggttctgagtgtttttcactcataaaggattccagaacatggctatgaagttatgaatctttgttgatcacacggtattccaagacactgctgctgtgttctgagtgttttttcctcacataggattccacaacactgctgctgagttcttgttgtttttccctcacataggattcgagaacacggctacgagggtctgaatgtttgcccatcacaaaggattcctgaacactgctgctgggttctgagtgtttgtccctcacaaaggattggaggacacttctgttgggtactgagtgtttgtcccccacaaatgaatccagagcactgttgttggtttttgagtgtttgtccctcacatagtattccagaacacttctttgagtgactgaatgtttgtccctcacatagtattcgagaacacaggggatgaaaacttagtgtttgtccctcaataggattccagaacgctgctgctgggttctgagtgtttgtccgtcatatacgattccagaacactgcttcaaggttctgaaggtttttccctcacaacggattctagaacactgctgctgggttctgagtgtttttcactcacataggattccaaaacactgccatgaggttctgaacatttgtccctcataaaggattccagaacactgctgctgggttctgagtgtttgtgcctcacaaaggattctagaacactcctgcttggttctgagtgtttgtccctcacataggattccagcacactgctgttgggttctgagtgtttgtccctcaaataggattccagcacactgttattgggttctgagtgtttgtcactcacctaggattccagaacactgctgctgggttctgagtgtttgtccctctcttaggaatccagaacaatactgctgttttctgagtgtttgaggctgacatagaattccaaaacacagctgctgagttttgtatgtttgttcctcacaaaggattcctgagcactgcttctggtttctgagtgtttgtccctcagtttggattccagaatacttctacgactgtctgaatgtttgtccctcagataggattccagaacacactggctgggttctgaacgtttgtcccccacataggattccagaatactgctactaatatctgaaagtttgttgctcacatacgatttcagaacactgctgctggcttctgaaggtttgcgactcacataggattctaggaaactgctactggggtctgaatgtttgtccatccaaaggattccagaacactgctgctgggatctgaatggttgtctctcacataggattccacaaccctccttcgtttttctgaatatttgtccctcacagaggattctagaacactgcttctggtttcttagggtttgtcactcacataggattccagaacaatgctgctgggttctgagtgtttgtccctaacttgggattccagaacactgctgctgagttcagagtgattttccctcacataggattccagaaaactggtgctgggatctgagagcttgtctctgtcaacgagttccagaacactgctgctgtgttcagagcgtttgtccctcacataggattgcagaatactgctgctagtttctgagggtttgtccctcactagaattctagaactctcctgctgtgttctgagggtttctccaacacatgggattctgaaacactgctacaagggtcagtaagtttgtcggtcacaacggattccagagcaccgctagtgggttctcaatgtttgtccctcacatcggattgcagaacacagttgctatgttctgagtgtttgtcccaaacataggattccagaactctgcttggagggtctgaaagttttttcctcaccaaggattccggaacactgctgggttctgaatggttgtccctcacctacgattccagaacaatgctgggatggtctcaaagtttgttcctcagaaggcattctgtattactgctacgagtgtctgaatccttgtctctcacataggattccagagcactgatactgggttctgagtgtttgtccttcacataggattccagaacactgctccgagagtctgaatgtttgtccctcacataggattccaaaacactgctgctggtttgtgagtgtttgtccctcacataggattccagaacaattctgctgggttctgaaagtttgtccctcatataggaaaccagaacactgctgctgggttttttgtgtttgtccctcacatagcattccagaacactgctgcagggttctgagtattggtccctcacatgggattccagaatactgctgctagtttctgagggtttgtccctcacatagaattcaagaacactgctgctgagttctgagggtttgtgcctcacataggattacagaatactgctacgagggtctgaatgtttgtccctcacagagcactccagaacagtgctttgaggttctcaattattgtccctcacataggattccaaaaactgctgcggggttctgagtgtttgtccctcacttaggattccaaaacagtgttctgagtgtctgaatatttgtccctcacgtagaattcccttacactgcggctgggttctgagtgtttgtccctcacataggattccagaacactgctgctgttttctgagtgtttgtccctcacataggatttcagaacactgatacgagggtctgaatgtttttccctcatatagcattacaggacagtgctatgagtgtctgaatgtttgtcctcacaaaggattttataacactgctgcttctttctgagggtttgtcccccacataaaattcccaaacagttgctgggttcttgctattcgtccttcacataggattccagaacactgctgctggtttctgtgtatgaccctcacatataattccagaacactgctaggagggtctgaatgttagtccctcacaaaggattccagaacactgctgctgggttgtgagtgtttatcactcacttaggattccaggacactttgtcagggttctgtgtgtttgtgcatcatgtgggatacaagaacactgctgctgtgtttttaatgtttatcaatcacataggattccagaacactactgcagggttctgagtgtctgtccctcacataggaatccagaaaactgctgcaatgttctgagggattgtccctcacgtagaattccagaacacacatgcagggttctgatggcctgtggctcacatacgattctagaatcctgctacgagggtctgaatatctgtccttcacagagcattccaaaacagtgctatgagggtctgaaagcttgtccctcacataggattccagaacactgctgcaggtttctgagcttttgtccctcacattggattccacaacaatgctccgagggtttgaatgattgtccttcacaaaggattccagaaatctgctgctgggttctgcttgtttgtacctcacaaggcaatccagagcactgcttctggtttctgaaggtttgtccttcaaataggataccaccacactgctacgacagtctgaatgtttgtccgtgacaaatgaatccagaacactgttgcagggttccgagtgtttgtccctcacgtaggattccagaacacagctgcggatttcggagtgtttgtccctcacatgggactcaaaaacactgctgctgctcggttcacagttgtcccttacatacgattgctgaacactggtatgaggttctgaatgcttgtccctcacaaaggattccagaacactgctgctgggttctgagtgtttgacactcacatagcattccagaacactgctgctgggttctgagtgtttgtccttcacataggattgaagaacactgcagctgggttctgagtgtttgtccctcacattggattccagaacactcctaagaacttctgaatgtttgtccctcacataggattccagaacattgctgctgggttctgagtgtttgtccctcacataggattccagaacaatgttgctgggttctgagtgtttttccctcacataggactccagaacactgcttcgaaggtctgaatgtttttccctcacaaaggattcaagaacactgctgctgggttctgtgtgtttgtccctcacaaaggattacagaggattgttgctgggttctgactgtttgtcctttacataggattccagaacaatgttgacgggttctgagtgtttgtcactcacataggattccacaacactgctgctgggttctgagtgtttgtccctcacaaaggattccagaacactgtttcaagggtctgaatgttcgtccctcacataggattccagaacagtgtttctaggtttgagtgcttgtccctcacatgggattccagaacacagttgctgggttctgagtatttgtccctcacacaggataccagaacactgctgctagtttcagtgtgtttgtccttcacataggattccagaacactgctacaagattctgaatgtttgcccctcaaaaacgatcccacaacactgctgctggattctcagagtttgtccctcacatacgaatccagaacacagctgctgggttctgtttttcccacacaaaagattacagagcactgctgctggttactgagtgtttgtccctcacatgggattccagaacactccttcgagtgtctgaaggtttgtccctcacaaaggattttagaacactgctgctggattctgagtatttgtccctcacatgggattccagaacactgctgctgggttctgaatgtttggccctctcataggattccagaacactggtgagaggttttgaatgttttatcctcacaaaggatttcagaacactgctgctgggttatgtttgtctctcacaaagtattgccgagaaccgctgctagtttctgagtgtttgtccctcacataggattccagaacacttctcctagtgtatgaatgtttgtccgtcacaaaggattcgagaaaactgttgctggtttctgagtgttgatcactgacataggattccagaacacggctgctgggttctgagtttcagtccgtcacatgagattctagaacactgaagccgggttaagaatgtttgtccctcacataggattccagagcactgatacgtggttctcattgtttgtccctcacagaagattccagaacactcctgctggtttctgaaagtttttccatcacataggattccagaacgctgctgctgggttctgttttttcctcacaaataattccagggcaccgctgcttgtttctgagtgtttcttcctcacataggattccagaacacttctacaagtgtctgaatgtttgtccctctgataggattccagaacacattggctgggttctgagtgtttgtcctgcacaaaggattccagaacactgctgctgggttctgagtgtttgtcccttacatgggattccagaacactgccactgggttctgagtggttgtccgtcatatagaattccacaatactgctgctgggttctgagtgtttgtccctcacataggattccagaaaacctctactagtgtctgaatgtttgtccctcaagtaggatcccagaaaacagtggctgggttctgagtgtttgtctcccacataggattccagaacactgttatgaagttctgaaggtttgtcgctctcataggattccagaacactgcagctgggttctgaatgtttttccctcacacagaattccagaacactgctgctgtgttctcagtgtttgtccatcacctatgattccagaacactgctactgcgttctgagtgtttgtccatcacaaaggattccggaacactgctgctggtttctgtgtgtttgtccctcagaatggattccagaacactgctacaagggtctgaatgtgtgtccatcacaaaggattccagaacactgctgctggtttctgattgtttgcccctcacataggattccagaaaactgcttcgaatgtctgaatgtttgtccctcacagaggattctagaacactgctactgggttctgagtgtttgtcccccacatgtgattccaaaaaactgctggtgggttaaaagtgcttgtgtctcacataggattccagaacactgctacgaggttgtgaatatttgtccctcactatgaattccagcacactgctgctgggttctgagtgtttctccctcacattggattccagaccactgctactaggttctgaatgtttttcactcagaaagattccagaacactgctggtgggttctctttgtttatccttcacaaaggattccagaggactgctgctgatttctgagtgtttctccatcacttaggattccagaacatttctatgagtgtctgaatatttatcagacagataggattccagaacacggtggctgggttctgagtgtttgtccctcacataggatgccagaacactgctgctgggttcagagtgtttgtccatcatgtaggattccagaacactgctgatgggttctgagtgtttgtccctcacatagaattcaagagcattgctgttgggttctgagtgtttgtccctcaacgagcattccagaacagtgctgctggattctgagtgtttgttcctcactaaggattccagaacactgctactgggttctcagtgtttgtccctcacataggattccagaactctgctacgagtttctgaatgtttgtccaacacaaaggattccaggacacttctgtaggattctgagtgtttgtcgttcacataggattccacaacactgcttctagtgtctgaatatttgtccctcacaaaggattccagaacactgctgctgggttctcagtgtttgacactcacatacgattccagaacacggctgctgggttctgagtgtttgtccttcacataggaattacagaacactgctggtcggttaagagtgtttgtctctcacatagcgttccggaacactgctatgaggttgagaaagtttgtcactcacaaaggattccagaacactgttgctgggttctgagtgtttgccctcacataggattgcagaccactgctgctgggttctgtctgtttttccctcacaaaggattacagagcactgcttctgggttctgagtgtttgtccctcacataggattccagaacactgcttcgagtgtctgcgggtttgtccctcacaaaggagtctagaacactactgctgggttctgagtgtttttctctcacatgttattccagaacattgctgatgggttctgagtgtttgtccatcagataggattgcagaactctcctgtgagagtctgaatgtttttccctcagaaaggtttccagaacactgctgctatgttctgtttacgtgtccctctcaaaggattctagagcatctctgctggtttctgagtgtttgtccttcccagaggattccagaacacttctatgagtgtctgaatagttttgcctcacataggattccagaacacagtggctgggttctgagtatttgtccctcacataggattccagaacactgctgctgcgttctgggtgtttgtccctcacataggattccagaacactgctgctgtgttctgagtgcttttccttcatataggatagcagaacacgtctgctgagttctgagtgtttgtccctaacataagatgccagaacagtgctacgagggtctgaatgtttgtctgtcagaaatgattccagaacactgctgcttgtttccgagtgattgtctctcaagtatgattccagaacagtgctttgagggtctgagtgtttgtcactcccaaaggattctagaaacctgctgctgggttctgggtgtttatcactcacatgtgattccagaacactgctgcgacgttctgagtgtttgtccctcacatacaattccagaacacttccaggaggttataaatgtttgtccctcacgtaggattccaaaacactgctgctgtattctgtttgtttgtccgtcacaaaggattccagaacacctctgttggtttctgattgtgtgtccctcacataggattccagaaaacctctacgaatgtctaaatgtttgtccctcagataggattccagaatacagtggctgggttctgagtgtttgtcccacacataggattccagaacactgctacaaagttctgaatgtttgtcactcacatatgattccacaacactgctgctgggttctgagtgtttgtccctcacctaggattctagaaggcttctgctgggttctgagtgtttgtccctcacatagaattccagaacactgctggtgggtactgagtgtttgtccctcacgtaggattccataacactgctgatgggttctgagcgtttgtccctcactaaggattccagaacactgctactgggttctgagtgtttgtccctcacataggattccagaacactgctatgagggcgtgaatgtttgtccatcacaaagaattccaggacactactgctgggttctgagtgtttgcccttcacatataattccagaaaattacttcgtgtctgaatgtttgtcccacacaaaggattctagaacacttctgctgggttctgagtgtttgtcactcacataggatgccagaatatggctgctaggttcctagtgcttgtccctcagatggtattccaaaacactgctgtggtttaagagtgtctgtgcctcacataggattccagaacactactgcgaggttctgaatgtttgtccctcacaaaggattccagaaggcttctgctgggttctgagtgtttctccctcacttaggattccagaactctgctacgagggtctgaatgtttttccctcagaaaagattctagaacactgctgctggtttctgagtggttgtctctcacttaggattcccaaacacggctgctgggttctcagtgtttgtccctcacatgagattcgtgaacaccgctgctatgttaagagtgtttgtccctcacataggtttccagaacactgctacgaggttctgaaagtttgtcccacacaaacaattccagaacactgctgctggatttttagagtttgtccctcacataggattccagaaaactgcttgtggtttctgagtgtttgtcccctgcaagggattccaaaacactgctgctgggttcagaatgtgtgtccctcacataggattccataacactactacgagggtctgaatatttttccctcacaaagattccagagaactgctg

SEQ ID NO: 486 - DNA, 1325 bp, Homo sapiens
  source 1..1325: mol_type = other DNA
ataacgccgcatatctacaactatctgatctttgacaaacctgagaaaaacaagcaatgggaaaaggattccctatttaataaacggtgctgggaaaactggctagccatatgtagaaagctgaaactggatcccttccttacaccttatacaaaaatcgattcaagatggattaaagacttaaaacgttagacctaaaaccataaaaaccctagaagaaaacctaggcattaccattcaggacataggcatgggcatggacttcatgtctaaaacaccaaaagcaatggcaacaaaagccaaaattgacaaatgggatctaattaaactaaagagcttctgcacagcaaaagaaactaccatcagagtgaacaggcaacctacaaaatgggagaaaattttcgcaacctactcatctgacaaagggctaatatccagaatctacaatgaactcaaacaaatttacaagaaaaaaaaaaccccatcaaaaagtgggcgaaggacatgaacagacacttctcaaaagaagacatttatgcagccaaaaaacacatgaaaaaatgctcaccatcactggccatcagagaaatgcaaatcaaaaccacaatgagataccatctcacaccagttagaatggcaatcattaaaaagtcaggaaataacaggtgctggagaggatgtggagaaataggaacacttttacactgttggtgggactgtaaactagttcaaccattgtggaagtcggtgtggcgattcctcagggatctagaactagaaataccatttgacccagccatcccattactgggtatacacccaaaggactataaatcatgctgctatacagacacatgcacacatatgtttattgcaccattattcacaatagcaaagacttggaaccaagccaaatgtccaacagtgatagactggattaagaaaatgtggcacatatacaccatggaatactatgcagccataaaaaatgatgagttcatgtcctttgtagggacatggatgaaattggaaaccatcattctcagtaaactatcgcaagaacaaaaatccaaacaccgcatattctcactcataggtgggaactgaacaatgagatcacatggacacaagaaggggaacatcacactctggggactgttgtggggtgggtggagcggggagggatagcattgggagatatacctaatgctagatgaggagttagtgggtgcagcacaccagcatggcacatgtatacgtatgtaactaacctgcacaatgtgcacatgtaccctaaaacttaaagtataacaataaataaataa

SEQ ID NO: 487 - DNA, 4275 bp, Homo sapiens
  source 1..4275: mol_type = other DNA
ataagggggcacaacatcagactaacagcggatctctcggcagaaaccctacaagccagaagagagtgggggccaatattcaacattcttaaagaaaagaattttcaacccagaatttcatatccagccaaactaagcttcataagtgaaggagaaataaaatactttatagacaagcaaatgctgagagattttgtcaccaccaggcctgccctaaaagagctcctgaaggaagcgctaaacatggaaaggaacaaccggtaccagccgctgcaaaatcatgccaaaatgtaaagaccatcgagactaggaagaaactgcatcaactaatgagcaaaatcaccagctaacatcataatgacaggatcaaattcacacatagcaatattaactttaaatgtaaatggactaaatgctccaattaaaagacacagactggcaagttggataaagagtcaagacccatcagtgtgctgtattcaggaaacccatctcacgtgcagagacacacataggctcaaaataaaaggatggaggaagatctaccaagccaatggaaaacaaaaaaaggcaggggttgcaatcctagtctctgataaaacagactttaaaccaacaaagatcaaaagagacaaagaaggccattacgtaatggtaaagggatcaattcaacaagaggagctaactatcctaaatatttatgcacccaatacaggagcacccagattcataaagcaagtcctcagtgacctacaaagagacttagactcccacacattaataatgggagactttaacaccccactgtcaacattagacagatcaacgagacagaaagtcaacaaggatacccaggaattgaactcagctctgcaccaagcagacctaatagacatctacagaactctccaccccaaatcaacagaatatacatttttttcagcaccacaccacacctattccaaaattgaccacatagttggaagtaaagctctcctcagcaaatgtaaaagaacagaaattataacaaactatctctcagaccacagtgcaatcaaactagaactcaggattaagaatctcactcaaagccgctcaactacatggaaactgaacaacctgctcctgaatgactactgggtacataacgaaatgaaggcagaaataaagatgttctttgaaaccaacgagaacaaagacaccacataccagaatctctgggacgcattcaaagcagtgtgtagagggaaatttatagcactaaatgcctacaagagaaagcaggaaagatccaaaattgacaccctaacatcacaattaaaagaactagaaaagcaagagcaaacacattcaaaagctagcagaaggcaagaaataactaaaatcagagcagaactgaaggaaaaagagacacaaaaaacccttcaaaaaatcaatgaatccaggagctggttttttgaaaggatcaacaaaattgatagaccgctagcaagactaataaagaaaaaaagagagaagaatcaaatagacacaataaaaaatgataaaggggatatcaccaccgatcccacagaaatacaaactaccatcagagaatactacaaacacctctacgcaaataaactagaaaatctggaagaaatggatacattcctcgacacatacactctcccaagactaaaccaggaagaagttgaatctctgaatagaccaataacaggctctgaaattgtggcaataatcaatagtttaccaaccaaaaagagtccaggaccagatggattcacagctgaattctaccagaggtacaaggaggaactggtacctttccttctgaaactattccaatcaatagaaaaagagggaatcctccctaactcattttatgaggccagcatcattctgataccaaagccgggcagagacacaaccaaaaaagagaattttagaccaatatccttgatgaacattgatgcaaaaatcctcaataaaatactggcaaaccgaatccagcagcacatcaaaaagcttatccaccatgatcaagtgggcttcatccctgggatgcaaggctggttcaatatacgcaaatcaataaatgtaatccagcatataaacagagccaaagacaaaaaccacatgattatctcaatagatgcagaaaaagcctttgacaaaattcaacaacccttcatgctaaaaactctcaataaattaggtattgatgggacgtatttcaaaataataagagctatctatgacaaacccacagccaatatcatactgaatgggcaaaaactggaagcattccctttgaaaactggcacaagacagggatgccctctctcaccaatcctattcaacatagtgttggaagttctggccagggcaatcaggcaggagaaggaaataaagggtattcaattaggaaaagaggaagtcaaattgtccctgtttgcagacgacatgattgtttatctagaaaaccccctcgtctcagcccaaaatctccttaagctgataagcaacttcagcaaagtctgaggatacaaaatcaatgtacaaaaatcacaagcattcttatacaccaacaacagacaaacagagagccaaatcatgggtgaactcccattcacaattgcttcaaagagaataaaatacctaggaatccaacttacaagggatgtgaaggacctcttcaaggagaactacaaaccactgctcaaggaaataaaagaggacacaaacaaatggaagaacattccatgctcatgggtaggaagaatcaatatcgtgaaaatggccatactgcccaaggtaatttacagattcaatgccatccccatcaagctaccaatgactttcttcacagaattggaaaaaactactttaaagttcatatggaatcaaaaaagagcctgcattgccaagtcaatcctaagccaaaagaacaaagctggaggcatcacactacctgacttcaaactatactacaaggctacagtaaccaaaacagcatggtactggtaccaaaacagagatatagatcaatggaacagaacagaggcctcaaaaataatgccgcatatctacaactatctgatctttgacaaacctgagaaaaacaagcaatggggaaaggattccctatttaataaatggtgctgggaaaactggctagccatatgtagaaagctgaaactggatcccttccttacaccttatacaaaaatcaattcaagatggattaaagatttaaacgttagacctaaaaccataaaaaccctagaagaaaacctaggcattaccattcaggacataggcgtgggcaaggacttcatgtccaaaacaccaaaagcaatggcaacaaaagacaaaattgacaaatgggatctaattaaactaaagagcttctgcacagcaaaagaaactaccatcagagtgaacaggcaacctacaacatgggagaaaattttcgcaacctactcatctgacaaagggctaatatccagaatctacaatgaactcaaacaaatttacaagaaaaaaacaaacaaccccatcaaaaagtgggcgaaggacatgaacagacacttctcaaaagaagacatttatgcagccaaaaaacacatgaagaaatgctcatcatcactggccatcagagaaatgcaaatcaaaaccgctatgagataccatctcacaccagttagaatggcaatcattaaaaagtcaggaaacaacaggtgctggagaggatgcggagaaataggaacacttttacactgttggtgggactgtaaactagttccaccattgtggaagtcagtgtggcgattcctcagggatctagaactagaaataccatttgacccagccatcccattactgggtatatacccaaatgagtataaatcatgctgctataaagacacatgcacacgtatgtttattgcggcactattcacaatagcaaagacttggaaccaacccaaatgtccaacaatgatagactggattaagaaaatgtggcacatatacaccatggaatactatgcagccataaaaaatgatgagttcatatcctttgtagggacatggatgaaattggaaaccatcattctcagtaaactatcgcaagaacaaaaaaccaaacaccgcatattctcactcataggtgggaattgaacaatgagatcacatggacacaggaaggggaatatcacactctggggactgtggtggggtcgggggaggggggagggatagcattgggaa

SEQ ID NO: 488 - DNA, 6064 bp, Homo sapiens
  source 1..6064: mol_type = other DNA
caagatcgcggaataggaagagctccagtctacagttcctagtgtgagcgacacagaagatgggggatttctgcatttccaactgaggtactgggttcatctcactggggcttgtcagacagtgggtgcaggacagtgggtgcagcccactcagcgtgagctgaagcagggagaggcatcacctcacccaggaagtgcaaggggtcagggaattccctttcctagccaagggaagctgtgacagatggcaactggaaaatcgggtcactcccaccataatactgcgcttttccaatggtcttagcaaacagcacaccaggagattatatcccgtgcctggctcggagggtcccacgcccacagagcctcgcttattgctggcacagcagtctgagatcgaactgcaaggcaggagtgaggctggggttaggggtgcccgccattgctgaggcttgagtaggtaaacaaagcggccaggaaactcgaactgggtggagcccaccgcagctcaaggaggcctgcctccacctctgagggcagggcatagccaaacaaaaggcagcagaaacctctgcagacttaaatgtccctgtgtgacagctttgaagagagtagtggttctcctagcaccgagttttagatctgagaatagacagactgcctcctcaagtgggtctctgacccccgagtagcctaactgggaggaaccccccagtaggggcacactgacacctcacatggccggttacccctctgagacgaagcttccagaggaaccatcaggcagcaacatttgctgttcagcaatatttgctgttctgcagcctctgctgctgatacccaggcagacagggtctggagtggaattccagcaaactccaacagacttgcagctgagggtcccaactgttaaaaggaaaactaacaaacagaaaggacatccacaccaaaaccccatctgtaagtcaccatcatcaagatgaggaagaaacagagcagaaaagctgaaaattctaaaaatcagagtgcctctccccctccaaaggaacgcagctgctcgccagcaatggaacaaacctggacggagaatatctttgacgagttgagagaagaaggcttcagacaatcaaacttctccaagctaaaggaggaaattagaacccatcgcaaagaagctaaaagctttgagaaaagattagatgaatggctaactagtataaccagtgtggagaagtccttaagtgacctgatggagctgaacaccatggcacaagaactatgtgatgaatgcacaagcctcagtagctgattcaatcaactggaagaaaggatatcagtgattgaagatcaaatgaatgaaatgaagtgagaagagaagtttagagaaaaaagagtaaaaagaaatgaacaaagcctccaagaaatatgggactatgtgaaaaggccaaatctacatctgattggtgtacctgaaactgacggggagagtggaaccaagttggaaaacactctgcaggatattatccaggagaacttccccaacctagcaggcaggccaacattcaaattgaggaaatacagagaacaccacaaagatactcctcgagaagagcaactccaagacacataattgtcagattcaccaaagttgaaatgagggaaaaaatgttaagggcagccagagagaaaggtcgggttacccacaaagggaagcccatcagactaacagcagatctctcggcagaaactctacaagccagaagagagtggaggccaatattcaacattcttaaagaaaagaattttcaacctaaaatttcatatccagccaaactaagcttcataagtgaaggagaaataaaatcctttacagacaggcaaatgctgagagattttgtcaccaccaggtctgccctacaagagctcctaaaggaagcactaaacatggaaaggaacaaccactactaaccactgcaaaaacatgtcaaaatgtaaagaccatcgatgctaggaagaaactgcatcaactaatggacaaaataaccagctaacatcacaatgacaggatcaggttcacacataacaatattaaccttaaatgtaaatggactaaatgctccagttaaaagacacagtctggcaaattggattaaaagtcaaggcccatcagtgtgctgtattcaggaaacccatctcatgtgcagagtcacacataggctcaaaataaaggatggaggaagatctaccaagcaaatggaaaacaaaagaaggcaggggttgcaatcctagtctctgataaaacagactttaaaccaacaaagatcaaaagagacaaagaaggccattacataatggtaaagggatcaattcaatgagaagagctaactatcctaaatacatatgcacccagtacaggagaagccagattcataaatcaagtccttagagacctacaaagagacttagactcccacacaataataatgggagacttcaacaccccactgtcaacattagacagatcaacgagacagaaagttaacaaggatatccaggaattcaactcagctctgcaccaagcagacctaatagacatctacagaactctccactccaaatcaacagaatatacattcttctcagcaccacatcacacttattccaaaattgaccacatatttggaagtaaagcactccttagcaaatgtaaaagaacagaaattataacaaactctctcagaccactgtgccatcaaactagaactcaggattaagaaactcactcaaaaccgctcaactacatggaaactgaacaacctgctcctgaatgactactgggtacataacgaaatgaaggcagaaataaagatgttctttgaaaccaatgagaacaaacataccagaatctctgggacacatttaaagctgtgtgtcgacggaaatttatagcactaaatgcccacaagagaaagcaggaaagatctaaaattgacacactaacatcacaattaaaagaacttgagaagcaaaagcaaacacattcaaaagctagcagaaggcaagaaataactaagatcagaacagaactgaaggagatagagacacaaaaaactattcaaaaaatcaatgaatccaggagctggttttttgaaaagatcaacaaaattgatagactgccagcaaggctaagaaagaagaaaacagagaagaatcaaatagatgcaataaaaaatgataaaggggatatcaccaccgatcccacagaaatacaaactaccatgagagaatactataaacacctctacacaaataaactagaaaacttagaagaaatggataaattccttgacacatacaccctcccaagactaaaccaggaagaagttgaatccctgaagaaaccaataacaggctctaaaattgaggcaataattagtagcctaccaaccaaaaaatgtccaggaccagacagattcacagccgaattctaccagaggtataaggaggagctggtaccattccttctgaagctattccaatcaatagaaaaagagggaatgaggccagcatcatcctgataccaaagcctggtggagacacaacaaaaaaagagaattttagaccaatatccctgatgaacgtcgatgcaaaaatcctcagtaaaatactggcaaaccgaatccagcagcacatcaaaaagcttatccaccgtgatcaagtgggcttcatccgtgggattcaaggctggttcaacatacgcaaatcaataaatgtaatccagcatataaacagaaccaatgacaaaaaccacatgattatctcaatagatgcagaaaaggcctttgacaaaattcagcagcccttcatgctaaaaactcttaataaattaggtattgatgggatgtatctcaaaataataagagctatttataacaaacccacagcaatatcatactgaatgggcaacaactggaagcattccctttgaaagctggcacaagacagggatgccctctctcaccactcctattcaacatagtgttggaagttctggccagggcaatcaggcaggagaaagaaataaagggtattcaattaggaaaagaggaagtcaaattgtccctgtttgcagatgacatgactgtatatttggaaaaccccatcgtctcagcccaaaatctccttaagctgttaagcaacttcagcagtctcaggatacaaaatcaatgtgcaaaaatcacgagcattcttatacactaataacagacaaacagagaggcaaatcatgagtgactcccattcacaattgctttgagaagaataaaatacctaggaatccaacttacaagggatgtggaggacctcttcaaggagaactacaaaccactgctcagtgaaataaaagaggacacaaacaaatggaagaacattccatggtcgtggataggaagaatcaatattgtgaaaatggccatactgtccaaggtaatttatagattcaatgccatccccatcaagctaccaataactttcttcacagaattggaaaaaactactttaaagttcatatggaacctaaaaagagcccgcattgccaagtcaatcctaagccaaaaggacaaagctggaggcatcacactacctgacttcaaactatgctacaaggctgcagtaaccaaaacagcatggtactggtaccaaaacagagatctagaccaatggaacagaacagagccctcagaaataacaacacacatctacaaccatctgatctttgacaaacctgacaaaaacaacaaatggggaaaagattccctatttaataaatggtgctgggaaaactgactagtcatatatgtaaagctgaaactggatcccttccttacaccttatacaaaaattaattcaagatggatcaaagacttaaatgttagacctaaaaccgtagaaaccctagaagaaaacctaggtaataccattcaggacataggcatgggcaaggacttcatgtctaaaacaccaaaagcaatggcagcaaaagccaaaattgacaaatgggatctaattaaactaaagagcttctgcacagcaaaagaaactatcattagcgtgaacaggcaacctacagaatgggagaaaatttttgcaatctactcatctgacaaagggctaatatccagaatctacaaagaactcaaacaaatttacaagaaaaaaacaaacaaccctatcaaaaagtgggcaaaggttatgaacagtcacttctcaaaagaagacatttatgcagccaacagacacatgaaaaatgctcatcatcactggccatcagagaaatgcaaatcaaaaccacaatgagataccatctcacaccagttagaatggtgatcattaaaaagtcagggaacaacaggtgctggagacgatgtggagaaacgggaacacttttacattgttggtgggaatgtaaactagttcaaccattgtggaagacagtgcggcgattcctcagggatctagaactagaaataccatttgacccagccatgccattactgggtatatacccaaaggattataaatcatgctgctatgaagacacatgcacacgtatgtttattggggcactattcacaatagcaaagacttggaatcgacccaaatgtccatcagtgatagactggattaagaaaatgtagcacatatacaccatggaatactatgcagctacaaaaaaggatgagtttttgtcctttgtagggacaaggatgaagctagaaaccatcattctgagcaaagtatcacaaggagaacaaaccaaataccgtatgttctcactcacaggtgggaaatgaacaatgggaacacttggacatgggaaggggaacatcacacaccggggcctgttgtggggtgggggaagggggagggatagcattaggagatatacctaatgtaaatgacagtttaatgggtgcagcacaccaacatggcacatgtatatatatgtaacacacctgcacattgtgtacatgtaccctagaacttaaagtataaaaaaaaaaaa

SEQ ID NO: 489 - DNA, 551 bp, Homo sapiens
  source 1..551: mol_type = other DNA
tggaagattgtgttttccaaaactggcggaaccaatttatgcatcccccatgctcttcttacaaagtgatgttgacagtccttcatcaagcagtaggatctatgttccctttccttgaaactgggcacaactttgtgtcagccatttccaataaaatatgttgtaagtgacattatatgacttctgaggtaggttactgcacctggctttctttgtcttaggaccttgactcttggaagttagccaccatgctgtgaggaggccaaatagtcacgtggagagaccacaggtaggtgttccagtcaaagtcctagatgagatctcagctgataggcagggtcaatcagcagaaatatgttggagtgtggctgcagactattccaaacccaagcccttgagctggccccctgatgccaagtgaagctgagaaaacctacccaggccaaacactacccaaactgcagatttaaaagtcaaataaacggtgtcattaattcagccctataagtttaaaggtaattttttttaatgcagcaacagataatcataac

SEQ ID NO: 490 - DNA, 6031 bp, Homo sapiens
  source 1..6031: mol_type = other DNA
gagggaggagccaagatggccgaataggaacagctccggtctacagctcccagcgtgagcgacgcagaagatgggtgatttctgcatttccatctgaggtaccgggttcatctcactagggagtgccagacagtgggcgcaggccagtgtgtgtgcgcaccgtgtgcgagccgaagcagggcgaggcattgcctcacctgggaagtgcaaggggtcagggagttccctttccgagtcaaagaaaggggtggcagacagcacctggaaaattaggtcactcccacccgaatattgcgcttttcagaccagcttaagaaacggcgcaccacgagactatatcccacacctggctcagagggtcctacgcccacggaatctcgctgattgctagcacagcagtctgagatcaaactgcaaggcggcaacgaggctgggggaggggcgcccgccattgcccaggcttgcttaggtaaacaaagcagccaggaagctcgaactgggtggagcccaccacagctcaaggaggcctgcctgcctctgtaggctccacctctgggggcagggcacagacaaacaaaaagacagcagtaacctctgcagacttaagtgtccctgtctgacagctttgaagagagtagtggttctcccagcacgcagctggagatctgagaactggcagactgcctcctcaagtgggtccctgacccctgacccccgagcagcctaactgggaggcaccccccagcaggggcacactgacacctcacacggcagggtattccaacagacctgcagctgagggtgctgtctgttagaaggaaaactaacaaccagaaaggacatctacaccgaaaacccatctgtacatcaccatcatcaaagaccaaaagtagataaaaccacaaagatggggaaaaaacagaacagaaaaactggaaactctaaaacgcacagcacctctcctcctccaaaggaacgcagttcctcaccagcaacagaacaaagctggatggagaatgattttgacgagctgagagaagaaggcttcagacgatcaaattactctgagctacgggaggacattcaaaccaaaggcaaagaagttgaaaactttgaaaaaaatttagaagaatgtataactagaataaccaatacagagaagtgcttaaaggagctgatggagctgaaaaccaaggctcgagaactacgtgaagaatgcagaagcctcaggagccgatgcgatcaactggaagaaagggtatcagcaatggaagatgaaatgaatgaaatgaagcgagaagggaagtttagagaaaaaagaataaaaagaaatgagcaaagcctccaagaaatatgggactatgtgaaaagagcaaatctacgtctgattggtgtacctgaaagtgatgtggagaatgaaaccaagttggaaaacactctgcaggatattatccaggagaacttccccaatctagcaaggcaggccaacgttcagattcaggaaatacagagaacgccacaaagatactccttgagaagagcaactccaagacacataattgtcagattcaccaaagttgaaatgaaggaaaaaatgttaagggcagccagagagaaaggtcgggttaccctcaaaggaaagcccatcagactaacagcggatctctcggcagaaaccctacaagccagaagagagtgggggccaatattcaacattcttaaagaaaagaattttcaacccagaatttcatatccagccaaactaagcttcataagtgaaggagaaataaaatactttatagacaagcaaatgctgagagattttgtcaccaccaggcctgccttacaagagctcctgaaggaagcgataaacatggaaaggaacaaccggtaccagccactgcaaaatcatgcttaaatgtaaagaccatcgagactaggaagaaactgcatcaactaatgagcaaaatcaccagctaacatcataatgacaggatcaaattcacacataacaatattaactttaaatataaatggaataaattctgcaattaaaagacacagactggcaagttggataaagagtcaagacccatcagtgtgctgtattcaggaaacccatctcatgtgcagagacacacataggctcaaaataaaaggatggaggaagatctaccaagccaatggaaaacaaaaaaaggcaggggttgcaatcctagtctctgataaaacagactttaaaccaacaaagatcaaaagagacaaagaaggccattacataatggtaaagggatcaattcaacaagaggacctaactatcctaaatatttatgcacccaatacaggagcacccagattcataaagcaagtcctcagtgacctacaaagagacttagactcccacacattaataatgggagactttaacaccccactgtcaacattagacagatcaacgagacagaaagtcaacaaggatacccaggaattgaactcagctctgcaccaagcagacctaatagacatctacagaactctccaccccaaatcaacagaatatacatttttttcagcaccacaccacacctattccaaaattgaccacatagttggaagtaaagctctcctcagcaagtgtaaaagaacagaaattataacaaactatctctcagaccacagtgcaatcaaactagaactccggattaagaatctcactcaaagccgctcaactacatggaaactgaacaacctgctcctgaatgactactgggtacataacgaaatgaaggcagaagtaaagatgttctttgaaaccaacgagaacaaagacaccacataccagaatctctgggacgcattcaaagcagtgtgtagagggaaatttatagcactaaatgcctacaagagaaagcaggaaagatccaaaattgacaccctaacatcacaattaaaagaactagaaaagcaagagcaaacacattcaaaagctagcagaaggcaagaaataactaaaatcagagcagaactgaaggaaatagagacacaaaaaacccttcaaaaaatcaatgaatccaggagctggttttttgaaaggatcaacaaaattgatagaccgctagcaagactaataaagaaaaaaagagagaagaatcaaatagacacaataaaaaatgataaaggggatatcaccaccgatcccacagaaatacaaactaccatcagagaatactacaaacacctctacgcaaataaactagaaaatctagaagaaatggatacattcctcgacacatacactctcccaagactaaaccaggaagaagttgaatctctgaatagaccaataacaggctctgaaattgtgtcaataatcaatagtttaccaaccaaaaagagtccaggaccagatggattcacagccgaattctaccagaggtacaaggaggaactggtaccattccttctaaaactattccaatcaatagaaaaagagggaatcctccctaactcattttatgaggccagcatcattctgataccaaagccgggcagagacacaaccaaaaaagagaattttagaccaatatccttgatgaacattgatgcaaaaatcctcaataaaatactggcaaaccgaatccagcagcacatcaaaaagcttacccaccatgatcaagtgggcttcatccctgggatgcaaggctggttcaatatacgaaaatcaataaatgtaatccagcatataaacagagccaaagacaaaaaccacatgattatctcaatagatgcagaaaaagcctttgacaaaattcaacaacgcttcatgctaaaaactctcaataaattaggtattgatgggacgtatttcaaaataataagagctatctatgacaaacccacagccaatatcatactgaatgggcaaaaactggaagcattccctttgaaaactggcacaagacagggatgccctcactcaccgctcctattcaacatagtgttggaagttctggccagggcaatcaggcaggagaaggaaataaagggtattcaattaggaaaagaggaagtcaaattgtccctgtttgcagacgacatgattgtttatctagaaaaccccattgtctcagcccaaaatctccttaagctgataagcaacttcagcaaagtctcaggatacaaaatcaatgtacaaaaatcacaagcattcttatacaccaacaacagacaaacagagagccaaatcatgggtgaactcccattcacaattgcttcaaagagaataaaatacctaggaatccaacttacaagggatgtgaaggacctcttcaaggagaactacaaaccactgctcaaggaaataatagaggacacaaacaaatggaagaacattccatgctcatgggtaggaagaatcaatatcgtgaaaatggccatactgcccaaggtaatttacagattcaatgccatccccatcaagctaccaatgactttcttcacagaattggaaaaaactactttaaagttcatatggaaccaaaaaagagcccgcattgccaagtcaatcctaagccaaaagaacaaagctggaggcatcacactacctgacttcaaactatactacaaggctacagtaaccaaaacagcatggtactggtaccaaaacagagatatagatcaatggaacagaacagagccctcagaaataatgccgcatatctacaactatctgatctttgacaaacctgagaaaaacaagcaatggggaaaggattccctatttaataaatggtgctgggaaaactggctagccatatgtagaaagctgaaactggatcccttccttacaccttatacaaaaatcaattcaagatggattaaagatttaaacgttaaacctgaaaccataaaaaccctagaagaaaacctaggcattaccattcaggacataggcggggcaaggacttcatgtccaaaacaccaaaagcaatggcaacaaaagacaaaattgacaaatgggatctaattaaactaaagagcttctgcacagcaaaagaaactaccatcagagtgaacaggcaacctacaacatgggagaacattttcgcaacctactcatctgacaaagggctaatatccagaatctacaatgaactcaaacaaatttacaagaaaaaaacaaacaaccccatcaaaaagtgggcgaaggacatgaacagacacttctcaaaagaagacatttatgcagccaaaaaacacatgaaaaaatgctcatcatcactggccatcagagaaatgcaaatcaaaaccactatgagatatcatctcacaccagttagaatggcaatcattaaaaagtcaggaaacaacaggtgctggagaggatgcggagaaataggaacacttttacactgttggtgggactgtaaactagttcaaccattgtggaagtcagtgtggcgattcctcagggatctagaactagaaataccatttgacccagccatcccattactgggtatatacccaaatgagtataaatcatgctgctataaaaacacatgcacatgtatgtttattgtggcactattcacaatagcaaagacttggaaccaacccaaatgtccaacaatgatagactggattaagaaaatgtggcacatatacaccatggaatactatgcagccataaaaaatgatgagttcatatcctttgtagggacatggatgaaattggaaaccatcattctcagtaaactatcgcaagaacaaaaaaccaaacaccgcatattctcactcataggtgggaattgaacaatgagatcacatggacacaggaaggggaatatcacactctggggactgtggtggggtcgggggaggggggagggatagcattgggagatatacctaatgctagatgacacattagtgggtgcagcgcaccagcatggcacatgtatacatatgtaactaacctgcacaatgtgcacatgtaccctaaaacttagagtataataaaaaaaaaaaa

SEQ ID NO: 491 - DNA, 262 bp, Homo sapiens
  source 1..262: mol_type = other DNA
tgtgaacttgggttagttatttgacctctctgtgctttagttttctcatctggaaaatggagataatcagaccattcaccaaggactgttgcgaagatgaaaggaatgatagacacaaagcccttaaaacagagcctggccagaataacctaattaatgtgagtttttggcacatgttaaatggcgctagtaatttctgactagatccagggtggtgatgaggactggatgacagaatgaatgtatgagaaagccttttgta

SEQ ID NO: 492 - DNA, 305 bp, Homo sapiens
  source 1..305: mol_type = other DNA
gccaggcacagtagcttacgcctgtaatcccagcactttgggaggccaaggcaggcagatcacctgagttcaggggtttgagaccagcctggccaacatggtgaaaccccatctgtactaaaactacaaaaatcagctgggcgtgtggcgggcacctgtaatcccagctacttggaaggctgaagcaggagaatcgcttgaacccaggaggcagaggttgcagtaagctgagatcataccattgcactctagcctgggtgacagagcgaaactccatctcaaaaaaaaaaaaagaaaaaaaagaa

SEQ ID NO: 493 - DNA, 300 bp, Homo sapiens
  source 1..300: mol_type = other DNA
ggtcacgcatggtggctcacgcctgtaatctcagcactttgggaggctgaggcaggcggatcacgaggtcaggagtttcagaccaccctggccaacatggtgaaacccccgtctctactaaaaatacaaaaatgggtgtggtggcgggcacctgtaatcccagctacttgggaggctgaggcagaagaatcgtttgaacctggaggcagaggttgcagcgagccaagatcacgccattgcactccagcctgggtgacagggcaagactctgtctccaaaaaaaaaagaaaaaaggaaaaa

SEQ ID NO: 494 - DNA, 6031 bp, Homo sapiens
  source 1..6031: mol_type = other DNA
aggagggagccaagatggccgaataggaacagctccggtctacagctcccagcgtgagcgacgcagaagacgggtgatttctgcatttccatctgaggtaccgggttcatctcactagggagtgccagacagtgggcgcaggccagtgtgtgtgcgcaccgtgcgcgagccgaagcagggcgaggcattgcctcacctgggaagcgcaaggggtcagggagttccctttccgagtcaaagaaaggggtgacggacgcacctggaaaatcgggtcactcccacccgaatattgcgcttttcagaccggcttaagaaacggcgcaccacgagactatatcccacacctggctcagagggtcctacgcccacggaatctcgctgattgctagcacagcagtctgagatcaaactgcaaggcggcaacgaggctgggggaggggcgcccaccattgcccaggcttgcttaggtaaacaaagcagccgggaagctcgaactgggtggagcccaccacagctcaaggaggcctgcctgcctctgtaggctccacctctgggggcagggcacagacaaacaaaaagacagcagtaacctctgcagacttaagtgtccctgtctgacagctttgaagagagcagtggttctcccagcacgcagctggagatctgagaacgggcagactgcctcctcaagtgggtccctgacccctgacccccgagcagcctaactgggaggcaccccccagcaggggcacactgacacctcacacggcagggtattccaacagacctgcagctgagggtcctgtctgttagaaggaaaactaacaaccagaaaggacatctacaccaaaaacccatctgtacatcaccatcatcaaagaccaaaagtagataaaaccacaaagatggggaaaaaacagaacagaaaaactggaaactctaaaacgcagagcgcctctcctcctccaaaggaacgcagttcctcaccagcaatggaacaaagctggatggagaatgattttgacgagctgagagaagaaggcttcagacgatcaaattactctgagctacgggaggacattcaaaccaaaggcaaagaagttgaaaactttgaaaaaaatttagaagaatgtataactagaataaccaatacagagaagtgcttaaaggagctgatggagctgaaaaccaaggctcgagaactacgtgaagaatgcagaagcctcaggagccgatgcgatcaactggaagaaagggtatcagcaatggaagatgaaatgaatgaaatgaagcgagaagggaagtttagagaaaaaagaataaaaagaaatgagcaaagcctccaagaaatatgggactatgtgaaaagaccaaatccacgtctgattggtgtacctgaaagtgatggggagaatggaaccaagttggaaaacactctgcaggatattatccaggagaacttccccaatctagcaaggcaggccaacgttcagattcaggaaatacagagaacgccacaaagatactccttgagaagagcaactccaagacacataattgtcagattcaccaaagttgaaatgaaggaaaaaatgttaagggcagccagagagaaaggtcgggttaccctcaaaggaaagcccatgagactaacagcggatctctcggcagaaaccctacaagccagaagagagtgggggccaatattcaacattcttaaagaaaagaattttcaacccagaatttcatatccagccaaactaagcttcataagtgaaggagaaataaaatactttatagacaagcaaatgctgagagattttgtcaccaccaggcctgccctaaaagagctcctgaaggaagcgctaaacatggaaaggaataaccggtaccagccgctgcaaaatcatgccaaaatgtaaagaccatcgagactaggaagaaactgcatcaactaatgagcaaaatcaccagctaacatcatcatgacaggatcaaattcacacataacaatattaactttaaatataaatggactaaattctgcaattaaaagacacagactggcaagttggataaagagtcaagacccatcagtgtgctgtattcaggaaacccatctcacgtgcagagacacacataggctcaaaataaaaggatggaggaagatctaccaagccaatggaaaacaaaaaaaggcaggggttgcaatcctagtctctgataaaacagactttaaaccaacaaagatcaaaagagacaaagaaggccattacataatggtaaagggatcaattcaacaagaggagctaactatcccaaatatttatgcacccaatacaggagcacccagattcataaagcaagtcctcagtgacctacaaagagacttagactcccacacattaataatgggagactttaacaccccactgtcaacattagacagatcaacgagacagaaagtcaacaaggatacccaggaattgaactcagctctgcaccaagcagacctaatagacatctacagaactctccaccccaaatcaacagaatatacatttttttcagcaccacaccacacctattccaaaattgaccacatacttggaagtaaagctctcctcagcaaatgtaaaagaacagaaattataacaaactatctctcagaccacagtgcaatcaaactagaactcaggattaaaaatctcactcaaagccactcaactacatggaaactgaacaacctgctcctgaatgactactgggtacataacgaaatgaaggcagaaataaagatgttctttgaaaccaacgagaacaaagacaccacataccagaatctctgggacgcattcaaagcagtgtgtagagggaaatttatagcactaaatgcctacaagagaaagcaggaaagatccaaaattgacaccctaacatcacaattaaaagaactagaaaagcaagagcaaacacattcaaaagctagcagaaggcaagaaataactaaaatcagagcagaactgaaggaaatagagacacaaaaaacccttcaaaaaatcaatgaatccaggagctggttttttgaaaggatcaacaaaattgatagaccgctagcaagactaataaagaaaaaaagagagaagaatcaaatagacacaataaaaaatgataaaggggatatcaccaccgatcccacagaaatacaaactaccatcagagaatactacaaacacctctacgcaaataaactagaaaatctagaagaaatggatacattcctcgacacatacactctcccaagactaaaccaggaagaagtcgaatctctgaatagaccaataacaggctctgaaattgtggcaataatcaatagtttaccaaccaaaaagagtccaggaccagatggattcacagccgaattctaccagaggtacaaggaggaactggtaccattccttctgaaactattccaatcaatagaaaaagagggaatcctccctaactcattttatgaggccagcatcattctgatatcaaagccgggcagagacacaaccaaaaaagagaattttagaccaatatccttgatgaacattgatgcaaaaatcctcaataaaatactggcaaaccgaatccagcagcccatcaaaaagcttatccaccatgatcaagtgggcttcatccctgggatgcaaggctggttcaatatacgcaaatcaataaatgtaatccagcatataaacagagccaaagacaaaaaccacatgattatctcaatagatgcagaaaaagcctttgacaaaattcaacaacccttcatgctaaaaactctcaataaattaggtattgatgggacgtatttcaaaataataagagctatctatgacaaacccacagccaatatcatactgaatgggcaaaaactggaagcattccctttgaaaactggcacaagacagggatgccctctctcaccgctcctattcaacatagtgttggaagttctggccagggcaatcaggcaggagaaggaaataaagggtattcaattaggaaaagaggaagtcaaattgtccctgtttgcagatgacatgattgtttatctagaaaaccccatcgtctcagcccaaaatctccttaagctgataagcaacttcagcaaagtctcaggatacaaaatcaatgtacaaaaatcacaagcattcttatacaccaacaacagacaaacagagagccaaatcatgggtgaactcccattcacaattgcttcaaagagaataaaatacctaggaatccaacttacaagggatgtgaaggacctcttcaaggagaactacaaaccactgctcaaggaaataaaagaggacacaaacaaatggaagaacattccatgctcatgggtaggaagaatcaatatcgtgaaaatggccatactgcccaaggtaatttacagattcaatgccatccccatcaagctaccaatgactttcttcacagaattggaaaaaactactttaaagttcatatggaaccaaaaaagagcccgcattgccaagtcaatcctaagccaaaagaacaaagctggaggcatcacactacctgacttcaaactatactacaaggctacagtaaccaaaacagcatggtactggtaccaaaacagagatatagatcaatggaacagaacagagccctcagaaataatgccgcatatctacaactatctgatctttgacaaacctgagaaaaacaagcaatggggaaaggattccctatttaataaatggtgctgggaaaactggctagccatatgtagaaagctgaaactggatcccttccttacaccttatacaaaaatcaattcaagatggattaaagatttaaacgttagacctaaaaccataaaaaccctagaagaaaacctaggcattaccattcaggacataggcgtgggcaaggacttcatgtccaaaacaccaaaagcaatggcaacaaaagacaaaattgacaaatgggatctaattaaactaaagagcttctgcacagcaaaagaaactaccatcagagtgaacaggcaacctacaacatgggagaaaattttcgcaacctactcatctgacaaagggctaatatccagaatctacaatgaactcaaacaaatttacaagaaaaaaacaaacaaccccatcaaaaagtgggcgaaggacatgaacagacacttctcaaaagaagacatttatgcagccaaaaaacacatgaagaaatgctcatcatcactggccatcagagaaatgcaaatcaaaaccactacgagatatcatctcacaccagttagaatggcaatcattaaaaagtcaggaaacaacaggtgctggagaggatgtggagaaataggaacacttttacactgttggtgggactgtaaactagttcaaccattgtggaagtcagtgtggcgattcctcagggatctagaactagaaataccatttgacccagccatcccattactgggtatatacccaaaggactataaatcatgctgctataaagacacatgcacacgtatgtttattgcggcactattcacaatagcaaagacttggaaccaacccaaatgtccaacaatgatagactggattaagaaaatgtggcacatacacaccatggaatactatgcagccataaaaaatgatgagttcatatcctttgtagggacatggatgaaattggaaaccatcattctcagtaaactatcgcaagaacaaaaaaccaaacaccgcatattctcactcataggtgggaattgaacaatgagatcacatggacacaggaaggggaatatcacactctggggactgtggtggggtcgggggaggggggagggatagcattgggagatatacctaatgctagatgacacattagtgggtgcagcgcaccagcatggcacatgtatacatatgtaactaacctgcacaatgtgcacatgtaccctaaaacttagagtataataaaaaaaaaaaaa

SEQ ID NO: 495 - DNA, 303 bp, Homo sapiens
  source 1..303: mol_type = other DNA
gctgggggtggtggctcacacctgtaatcccagcactttgggaggccaaggcaggcagatcacctgaggtcgggagttcgagaccagcctgaccaacatggagaaaccctgtctctactaaaaatacaaaattagccaggcatggtggcgtatgcctgaaatcccagctactcaggaggctgaggcaggagaattgcttgaacccgggaggcagaggttgcagtgagccaagatcacgccattgcactctagcctgggcaacaagagtgaaactccatctcaaaaaaaaaaaaaaaaaaaaaa

SEQ ID NO: 496 - DNA, 909 bp, Homo sapiens
  source 1..909: mol_type = other DNA
gcctctgcccagccgccccatctgggaggtgaggagcacctctgcccggccgcccatcgtctgggatgtgaggagcgcctctgcctggccgccaccccatctgggaggtgaggagcgcctctgtccggccgccaccccatctgggaagtgaggtgcgcctctgcccggccgccccatctgggaagtgaggagcgcctctgccaggccaccccgtctgggatgtgaggagcgcctctgcccggccaccaccccatctgggaggtgaggagcgcctctgtccagccgccaccccatctgggaagtgaggtgcgcctctgcccggccgccccatctgggaagtgaggagcgcctctgccaggccgccccgtctgggaagtgtacccaacagctccgaagagacagcgaccatcgagaacgggccatgatgacgatggcggttttgtcaaaaagaaaagggggaaatgtggggaaaagaaagagagatcagattgttactgtgtctgtgtagaaagaagtagacataggagactccattttgttctgtactaagaaaaattcttctgccttgggatgctgttaatctataaccttacccccaacccggtgctctctgaaacatgtgctgtgtccactcagggttaaatggattaagggcggtgcaagatgtgctttgttaaacagatgcttgaaggcagcatgctcgttaagagtcatcaacactccctaatctcaagtacccagggacacaaacagggccgaaggccgcagggacctctgcctaggaaaaccagagacctttgttcacttgtttatctgctgaccttctctccaccattatcctatgaccctgccacatccccctctctgagaaacacccaagaatgatcaataaatactaaaaaaaaaaaa

SEQ ID NO: 497 - DNA, 22124 bp, Homo sapiens
  source 1..22124: mol_type = other DNA
gaaaaggaaatacctgcacgtaaaatctagacagaagcaatatgagaaaatactttgtgatgtgtgcattcatctcagagagataaacattgcttttggcagagcattttctaaactctgtttttgtagaatctggaagtctacatttggagcggtttgaggacaatgtggaaagaaaatatcttcacataaaaaccagattgaagaatactgagaaacttctttgtgatgtgtgcgttcatctcacagactggaacatttcttttgattgagctgtttggaaacactctttttgtagaatctgcaagtggacatttggagcactatgtggcctatggtagaaaaggaaatatcttcacataaaattcagacagaagcaatctgagaaactactttgtgatgtgctcattcatttcacagagttaaacttttcttttgattcaggtgtcttgaaactctattttgtagaatctgcaagtggacatttggagcgctttgaggcctatggtagtaaaagaaacatcttcacataaaatctagacaaaagcaatctgagaaacttctttgtgatgtgtgctttcatctcacagagttagaactttttttggattgagcagttttgaaattctctttttgtagaatctgcaagtggacatttggagcgctttgaggcctatggtagtaaaagaaacatcttcacataaaatctagacaaaagcaatctgagaaacttctttgtgatgtgtgctttcatctcacagagttaaaactttttttggattgagcagttttgaaattctctttttgtagaatctgcaagtggacatttggagtgcttttagacctaaggtggaaaaggaaacatcttcccataaaaactagacagaagaattctgagaaactcctttgtgatgtatgtgttcatctcacagagttgaaacttccttttgattgagcagtttggaaaaactgtttttgtaaaatctacaagtggacacttggagcgctttgcagcctaaggtagaaaaggaaatgtcttcacataaaagctagacagaagcaatctgagaaacttctttgtgatatgtgcattcatctcacagagttgaaccttcctttgattgagcagtttggaatcactctgtttgtagaatgtgcaagtggacatttggagtgctttgaggtctatggtggaaaaggaaatatcttcacataaaaactagacagaagatttctgacaaacttctttgtgatgtgtgtgttcatatcactgagttgaaactttatattgattgagtagtttggaaaaactctttttgtagaatctgcaagtggagatttagagtgctttgtggcctatggtagaaaaggaaataccttcacataaaatgtagacagaagtaatatgagaaaattctttgtgatatgtgcattcatctcacagtgttaaacattgcttttgaatgagcattttgaaactctgttttgtagaatctggaagtgtacatttggagcagtttgaggccaatgtggaaaaggaaatatcttcacataaaaactagacagaagaatactgagaaacttctttgtgatgtgtgcattcatcacacagagtggaacgtttcttttgattgagctgtttggaaaccatctttttgtagaatctgcaagtggccatttagaacactttgtggcctatggtagaaaaggaaatatctttacataaaactcagacagaagcaatctgagaaactgctttgtgatgtgtgcatccatctcacagagttaaacatttcttttgattgagctgtcttgaaactctattttgtagaatctgcaagtggacatttggagtgctttgaggcctatcgtagaaaaggaaatatcttcacataaaatctagacaaaagtaatctgagaaacttctttgtgatgtgtgcattcatctcacagagttaaaactgttttttgattgagcagttttgaaactctctttttgtagaatctgcaagtggacatttggagcacttttaggcctatggtggaaaaggaaatatcttcccataaaaactggacagaagaattctgataaacttcttgttgatgtgtgcgttcatctcacagagttgaaactttcttttgattgagcagtttgaaaacaatctttttgtagaatctgcaagtggacatttggagggctttgcgggctatggtagaaaaggaaatatcttcacttaaaatgtagaaataagcaatctgagaaacttctttgtgatgtgtgcattcatctcacagagttaaacctttcttttgattgagcagttttgaaactctctttttgttgaatctgcaagtggacaattggagcacttgaggcctatggtggaaaaggaaatatcttcacataaaagctagacagaagaactctgagaaacttctttgtgatgtgcgcattcatctcacagagttgaacatttcttttcattgagaattattgaaacactctttttgtagattctgtaagtgggcattttgagcactttgccgcctatgttagaaaaggaaatagcttcacacaaaatctagacagaagcaatctgagaaacttctttggaatgtgtgcattcatctcacagggttaactcttacttttgattgagcagttttgaaactctatttttgttgaatgtgcaagtggacatttggagtgctttgagtcctatggtggaaaacgaaatatcttcacataaaaactagacagaagcatttttagaaacttctttgtcatgtgtgcgctgatctcaaagggttaagcctttgttttgattgagcagttttgaatctctctttttgtagaatctgcaatttaacatttggagcgctttgaggcctgtggaggaaaaggaaatattttcacatcaaaactacacagaagaattcagagaaacctcttcgtgatacatgcgtttatctcacagagttgaatctttcttttgattaagagtttggaaacactctttttgtggaatctgcaagtggacatttggagcgctttgcagcctatgttagaaaaggaaatatattcccataaaatctagatagaatgaatctgagaaacttctttgtgatgtgtgcattcatctcacagagttaaaactttcttttgattgagctgtcttgaaactctctttttgtaaaatctgcaagtggacatttggagtgctttgaggcctactgtggaaaagtaaatatttacacataaaaactagacagaaaaattctgagaaacttctttgtgatttgtgcttacatctcacagagttgaacctttcttttgattgagcagtttggaagcactctttttgtacaacatgcaagtggacatttggagcgctttgtgacctctggtagaaaacgaaatatcttcacagaaaatctagataaaagcagtctgacaaagtactttatgatgtgtgcattcatatcacagagttaaacatttcttttgattgagcagttttgaaactctctttttgtagaatctacagtgtacatttggagtggtttgaggcctatggtggaaaaggaaatatcttcagataaaaactagacagaagaattctgagaaacttctttgtgatgtgtgcattcatctcacagagttgaacctttcttttgattaagcagtttggaatcactctttttgtagaatctgcaagtggacatttggagtgctttgcggcctacgttagaaaatgacatatattaaaataaaatctagacagaagcaatctgagaaacttctttgtgatgtgtgcatgcatctcacagagttaaaactttcttttgattgagctgtcttgaaactctctttttgtaaaatctgcaagtgaacattaggagagctatgatgcctatgatggaaaaggaaatatcttcacataaaaactagacagcagaattctgagaaactactttgtgatgtgtgcgttcatatcaaagagttgaaccttactttttattgagcagtttgtaaacactctatttgtagaatttgcaactggacatttggagtgctttgtggcctatggtagaaaacaaaatatcttcacataaaatctagatgaaagcaatctgacaaacatctttgtggcgtgtgcattcatctcaccgagtcaacctttcttttgactgagcactttggaaactctatttttgtagaatctgcaagtggacatttggaacactctgaggcttatggtggaaaaggaaatatcttcacataaaaactagacagaagaattctgacaaatttctttgtgatgtgtgcattcagctcatggacttgaacacttcttttgtttgagcagtttggaaacactctttttgaaggatctgcaagtggacatttggagctctttgcggcctatggtggaaaaggaaatatcttcatataaaatgtagacagaagtaatctgaaaaccttctttatgatgtgtgcattcatctcacagagttaaacatttcttttgatttagcagtcttgaaactctctttttgtagaatctgcaagtggacatttgtagcgctttgaggcctatggtagaatagaatatatcttcacataaaaactagacagaggaattatcatatacttctttgtgatgtgtgcgttactctcacagagttgaaactttcttttgattaagcagtttggagacactctttttgtagaatctgcaagtggacattaagagcgctttgtagcctacgttagaaaaagtaatatcttcacaaaaaatctagaaagaagcaatctgagaaacttctttgtgatgtgtgcattcatctcacagagttaaacctttattttgattgaacagttatgaaactctttttttgtagaatctacaagtggacattttcagcgctttgaggcctatggtggaaaaggaaatatcttcacataaaaaatagatagaagcatttttagaaacatctttgtgatgtgtgcattcatctaatgggttgaaacctttcttttgatagaggagttttaaagctccctttttgtataatctctaagtggacatttgaagggctttcaggcctatggtggaaaatgaaatatctacacataaaaagtacatagaagcattctgagaaactactttgtgatgtgtgcattcaacccccagagttgaacattcctttgaaggaacagttttgaaatactctttttgtagaatctgcaagtgtaccattcgagtgccttggggcctatggtacaaaaggaaatatcttcacataaaaactagaaagaagaattctgagaaagctctttgtgatgtgtgcattcatctagaaagttgaacatttctttggttgagcagtttggaaacactcttttggtagaatctgcaagtggacatttggagcactctgtggcctatgttagaacaggaaacatcttcacataaaatgtagacagaagcaatctgagaaacttctttgtgatgtgtgcattcatctcaaagaggtaaagctttcctttgatagagcagatttgaaactctctttttgtagaatctgcaagtggacatttggagcaatatgatgcatgtggtggaaaagttaatatcgtcatataaaaactagacagaagaattctgagaaacttctttgagatgtctgtgttcatctcacagagttgaaactttcctttgattgagcagtttggaaatactctttttgtagaatctgcaagtggacatttggagagctttgcagccaatggtagaaaaggcaatatcttcacgtaaaatctagacagaaggaatctcagaaacttccgcatgttgtctgcattcatttcacagagttaaacttttcttttgattgagcagtttggaaactctttttgtaggatctgcaagtggacatttgtagtgctttgaggccaatggtggaaaaggaaatatcttcacataaaaactagacagaagaattctgagaaacttctttgtgatgtgtgtgttcatctcacagagttgaacgtttcttttgattgagctgttggaaacactctttctgtagaatctgcaagtggacatttggagcactttgcgacctatggtggaaaaggaaatatcttcacataaaaactagacagaagaattattagaaacctctttgtgatgcgagtgttcaactcacagagttgaacctttcttttgattgtgcagtttgcaaacaactctttttgtagattctgcaagtgcacatttggagccctttgcggcctatggtagaaatggcaatatcttcacgtaaaatctagacaaaagcaatctgagaaatttctttatgatgtatgcattcatctcacagagttaatcattcttttgactgagcagttttgaaactctctttttgtataatctgcaagtgaaaatttgtggcgctttgaggtatatggtggaaaaggaaatatcttcacagaaaaactagacagaagaattctgagaaactcctttgtgatgtgtgtgttcatctcacagagttgaaactttcttttgattcagcagtttggaaacactctttttgtagaatctacaagtggacatttggagcgatttgcgggctgtggtagaaaaggaaatatcttcacttaaaatctagaaagaagcaacctgagaaacttctttgtgatgtgttcattcatctcacagagttaaagatttcttttattgaacagttttcaaactctctttttgtagaatctgcaagtggacatttggagggctttgcgggctatggtagaaaaggaaatatcttcacttaaaatgtagaaataagcaatctgagaaacttctttgtgatgtgtgcattcatctcacagagttaaacctttcttttgattgagcagtttaaaaacactctttttgtagaatctggaagtggacatttggagcgcactgaggccatggtggaaaaggaaatatcttcacataaaaactagacagaagaattctgacaaactcctttgtgatgtgtgccttcatctcacagagttgaaactttctttttattgagcagtttgcaaaaccacttttagtagagtctgaatgtggacatttggagcactttgtggactatggtagagaagggaatatcttcatgtaaaatctagacagaagtaatctgagaaacttctttgtgatgtgcgcattcatctcacagagttaaacctttcttttgatttagcagttttgaaactctcttttagtagaatctgcaagtggacatttggagagctttgaggcctaaaaaagtttacagagttaaacttttcttttgattgagcagttttgaaaatgtctttttgtagaatctgtaagtggacatttggagagctttgaggcctatggtgtaaaaggaaatatcttcacataaaacctagatagaagtattatgagaaactgctttgtgatgtgtgcattcatctccccgagttgaccctttcttatgaaggaccagttttgaaataagctttttgtagaatctgcaagtggacattttaagtgtcttgaggtctatggtggaaaaggaaatgtcttcacaaaaactagacagaagaattctgagaaacctctttgtgatgcaagcattcatctcacagagttgagcctttcttttgattgagcagtttggaaacagtctttttgttgaatctgcaagtggacatttggagaactttgcggcctatggtagaaaaggaaatatcttcacataaaatctagacagaagtaatctgagaaacttctttgtgatgtgcgcattcatctcacagagttaaaactttcttttgattgaggaattttgaaattctctttttgtagaatctgcaagtggacatttggagtgctttgtggcctatggtagaataggaaatatctttacataaaaactagacagaagaattctgagaaacttcttcttgatgcatgcgttcatctcatagagttcaacctttcttttgattgaccggtttagaaacactctgtctttaaattctgcaagtgaacatttggagcgctttgcggcctatggcataaaaggaaatatcttcacattaaatctagacacaagcaatctgagaaacttctttgtgatgtgtgcattcatctcacggagttaaacatttcttttgatttagcagttttgaaactctctttttgtagaatctgtaagtggacatttggagcgctttgaggcctacaatggaaaacgatttatcttcacagtaaaactagaaagaagtattttgggaaacttctttctaatgtgtgcgttcatctcacagagttaaacctttcttttggttgagcagtcttgaagctctctttttgtagaatctgcaagtggacatttggagcgctttgaggcctatggtggaaaaggaaatatctccacttaaaaactagacagaagaattctgagaaacttctttgtgatgggtgcgttcatctcacagagctgaacttttgtttgggtggagcagtttgaaaacactctttttctagaatttgcaggtggacctttggagtgctttgcggcctatggtagaaaaaagaaatatcttcgcataaaatctagacagaagcaatctgagaaactgctttgtcatgtttgcattcatctaacaggcttgaacatttcttttgattgagcactttggaaacactctttttgcagaatctggaagtggacatttggagcgctttgaggcctattttagaaaaggaaatatcttcacataaaatctagacagaagaaatctgagaaacttctttgtaaatgtgtgcattcatctcacagagttaaacatttcctttgattgagaagttttgaaactctctttttttagaatcagaaagtggacattttgagtactttgaggcatatggtggaaaaggaaatatccgcagatgaaatctagaaagaagcaatctgagaaacttctttatgatgtgtgcattcatctcacacagtaaaacctttcttttgattgagcagttttgaaactctctttttgtagaatctgtaagtggacatttggagggctttgaggcctttggtggaaaaggaaatatcttcacataaaaacaagacagaagaattctgagaaacgtattcgtgatgtgtgtgttgatctcacagagttgaacttttcttttgattgagcaatttggaaaccctctttttgtaaaatctgcaagtggacatttggaacactttgcagcctatgttagaaaaaagaaatatcttcatataaaatctagacagaagcaatctgagaaacttctttgtgatgtgtcctttcacctcacagaattgaaactttcttttcattgagaaatttggagaccctctttttgtggaattggcaagtgaaaattttgagcactttgcgacctatggtagaacaggaaatatcttcacataaaatctagacagaagcaatctgagaaacttctttctgatgtgtgcattcatctcacagagttaaatctttttttttttttttgagcagttttgaaactctctttttgtagaatctgcaagtggacatttggagcgctttgaggcctacggtggaaaaggaaatatcttcatataaaaactagacagaagaattctgagaaacttctttgtgatgtgtgcattcatctcgcagagttgaacctttcttttgattaaggagtttggaaacactctttttgtaaaatctgcaagtggacatttgtagcgctttgtagcctattgtagaaaaggaaatatgttcacataaaatctagacagaagcaatctgggaaacttctttgggatgtgtgaattcatctcacagatttcaacctttcttttgtttgagcagttttgaaactctctttttgtagaatctgaaagtggacatttggagccatctgaggcctatgttggaaaaggaagtatcttcaaataaaaactagacagaagaattctgagaaacttctttgtgatgagtgtgctcatctcacagagttaaagattcttttgattgagcagtttggaaacactctttttgaagaatctgcaagtggatatttggagtgttttgagaaatgtggtggaaaaggaaatatcgtcatataaaaactagacagaagaattctgagaaatttctttgtgatgtgtgcattcatctcacagagttgaagctttcttttgattgagcagtttggaaactatctttttgtagaatctgcaagtggatacttggagcgctttgtggcctgtggtagaaaaggaaatatcatcacataaaatctagacagaagaaatctgagaaacttctttccgacgtgtgtggtcatctcacagagctaaaactttcttttaattgagcattcctgaaactctctttttgtagaatctataagtggacgtttggagcactttaaggcctacggtggaaaaggaaataacttcacattaaaaactagacagaagaattctgagaaacttccttgtgatgtgtgtgttcatctcacagagttgaagctttcttttgattgagcagtttggaaacagtctttttgtagaatttgcaagtggacatttggatcgctttatggcctatgttagaaaaggaaatatcttcacataaaatctagacagtagcaatcggaaaaatttctttgggatgtgtgcattcatctcacaaagttaaaactttcttttgatagagcagttttgaaactctctttttgtagaatctgcaagtggatttttggagcactttggggcctatggtggaaaaggaaatatcttcacataaaaactagacagaaaaattctgaccatgttctttgtgatgtgtgcattcatctcacagagttgaacctttcttttcattgagcagtttggaaacactctttttgtagaatctgctagtggacatttgcaacgctttgtggtctatggtagaaagggaaatatcttcacataaaaactagactgaagcaatctgataaacttctttgtgatgtgtgcattcatcccacacagttaaaattttcttttgattgagcagtttgaaactctctttttgtagaatctgcaactggacatttggagcgctttgagtactgtggtggaaaaggaaacattttcatataaaaactagacagaagaattccgacaaacttctttgtgatgtgtgcattcatctcacagagttgaacttttcttttcgttgagcagttgggaaacactctttttgtacaatctgcaagtggacatttggagcgatttgaagcctgtggtgaaaaaggaaatatcttcacaaaaaaaaactagacagaagaattctgagaaacttctttgtgatgcgtgcattcatctcacagagttgaacctttcttttgatagaacaggttggaaacactcttttttagaatctgcaagtggacattaagagcgctttgcagcctacagtagaaaaagaaatatcttcatataaaatctagacagaagcaatctgcaaaacatttttgtgatgtatgaattcgtttcacagagggcaaccttccttttgattgagcagtcttgaaactctctttttgtagaatctgcaagtggacatttggagcgctttgtggcctatggtggaaaaggaaatatctacacataaaaactagagagaagaattctgagaaacttctttgtgatgggtgcggtcagctcacagagttgaaactttcttttgattgagcagtttggaagcactcttcttgtagaatctgcaagtggacatctggagtgctctgcggcctgtggtagaaaaggaaataccttcacataaattctagacagaagcaatctgagatacttctttgttagtgtgcattcatctcacagagttaaacctatcttttgattgagcagtttggaaacactctctttgtagaatctgcaagtgaacatttctagagctttgtggcctctggtagaaaaggaaatattaaaaataaaatctagatggaaggaatctgagaaacttgtgatgtgtgcattcatcttacagagataatccttccttttgattgagcagttttgaaactctttctgaataatctacaagtggacatttggagcgttttgaggtatatggtgtaaaaggaaatatcttcacataaaaaccagacagaagaattctgagaaacttctttgtgatgcgtgcattaatctcacagagttcaagctttctttagattgagcagtttggaaatactgtttttgaggaatctgcaagtggacatttagagcactttgcagcctatgttagaataggaaatatcttcacttaaaatctagacagaagcagtctgtgaaacttctttgtgatgtgtgcattcatctcacaaagttaaaactttcttttgattgagcagttttcaaactctcttttcatagaatctgcaagtggacatttggagagctttgaggcctgtggtggaaaaggaaatatcttcacataaaaactagacagaagaattctgagaaacttctttgtgatgtacgctttcatctcacagagttgaattcttctttttattgagcagtttggaaacattctttttttagactctgcaggtggacatttttattgctttatggtctatggtagaaaaggtaatatcttcacataaaatctagacagaagctctctgagaaacttctttgtgatgtgtgcactcatctcacagcgttaaaacttccttttgattggagcagttttgaaacgctctttttgtagaatctgcaagtggatatttggagtgctttgaggcctatggtggaaaagaaaatattttcacataaaaagtaaacagaagagttctgagaaacttctttgggatgtgtgcgttcatctcacagagttgaacctttcttttgattgaggagtttggaaacactctttttgcagaatctgcaagtggacatttggagaactttgcagcctatggtagaaaaggaaatatcttcacataaaatctagacagaagcaatctgagaaacttatttgtgatgtgtgcattcatctcacagcattaaaacttccttttgattggagcagttttgaaacaccctttttgtagaatctgcaagtgggtatttggagcactttgaggcctatgttggaaaaggaaatatcttcacgtaaaaactagatggaagcatttggtaaacttctctgtgatgtgtgccttcatctcccagaggtgaacctttcttttgaaagaccagttttgaaatactctttttgtagaatctgcaactggacatttcgagcgccttgaggcctatggtggcaaaggaaatatattcacataaaaactagacagaattctgataaacttttttgtgatgtatgcatttatctcccagaattgaacctttcttttgaaggaccagttttgaaatactctttttgtggaatctgcaagtggagatttcgagtgccttgaagcctatgtgggaaaagaaaacatcttcacgtatcaactggacagaagaattctgagaaacttctttgtgatgtgtgggttcatctcacagagttgaacctttcctttgagcagcttgtaaaaactctttttgtagtatctgtaagtggacacttggaacgctttgcagcctatggtagaaaagggactatattcacataacatctagacagaaacattctgagaaaattctttgtaatgtttgcattcattcaacagagctgaacctttcctttgatggaccagttttgaaatactctttttgtggaatccgcatgtggacatttcgagtgctttgaggcctagggtggaaaatgaaatatcttcacataaaagctatgcagaagaattctgagaaacttctttgaaatgtgttcattcatctcacagagttgaacctttcttttgattgagcagtttggaaaaatttttttcgtagaatctcaagtggacatgttgagcgctttgtggcatatagtagaaaaggaagtatcttcacataaaatctagacagaagcaatctgagaaacttctttgttatgtgtgtactcatctcaaagaggtaaacctttcttttggttgagcagttttgaaactctctttttgtagaatctgcaagtggacagttggagcactttgaggcctatggtgggaaaggaaatatcttcacataaaaactagacagaagaattctgacaaacttctttgtgatgtgtgcattcttctcacagagtggaactgttcttttgattgagcagtttggtaccactctttcttgtagaatctgcaagtggacatttggagcgctttgcggtctatagtagaaaagtaaatatcttcacataaaatctacacagaaacaatctgagaaacttgtttgggatatatgcattcatctcacagagataaccctttcttttgattgagcagttttgaaactctctttttgtagaatctgcaagcggacatttagagagtcttgaggcctatggtggaacaggaaatatcttcacataaaaattagacagaaggattctgagaaacttctttgtgatgagtgcgttcatctcacggagttgaacctttcttttgattgagcagtttggaaacacactttttgtagcatctgcaagtggacatttggaactctttgcagccaatggtagaaaaggaaatatcttcacataaaatccagacagaagcaatctgagaaacttctttgtgatgtgtgcattaatctcacagagttaaacttttcttttgattgagcagattggaaactctcttttcgtagaatctgcaagtggacatttggagtgtttgaggcctgtggtggagaaggaaatatcttcacataaaaagtagatagaagcattcttattagcttctctgtgatgtctgcattcatctcccagagttccacctttctttagaagaaccagttttcaaatactctttttggagaatctgcaaagggacttttcaagcaccttgaggcttaagttggaaaaggaaatatcttcacaaaaaaaacagatagaagaattctgagaatcttctttatgatatgtacgttcatctaacgttgaacctttcttttgaacgtgtagtttggaaacaccctttttgtagaattggcaagtgggcatttggagcactttgcggcctatgatagaaaaggaaatatcttcacataaaatctagaaggaagcaatctgagaaacttctttgtgatgtgtgcattcatctcacagagttgaaactttcttttgattgagcagttttgaaacactctcttcgtagaatctgcaagtggatatttggagccctttgaggcctattgtggaaaaggaaatatcttcacataaaaactactcagaagcattctaagaaacaccattgtgatgtttggattcaactcacagagtggaaactacattttgattgagcagttttgaatctctccttttgcagaatctgcaagtggttgtttggaaagctttgaagcctattgtggaaaaggaaatatctttacataaaaactacacagaagcattctgagaaactactttgtgaggtgtgcattcaactcacagagttgaaattatcttctcattgaggagttttctatctctctttttgtagaatctgcatgtcgatatttgaagaactttgcatcctatggtggaaaaggaaatatcttgaaataaaaactacacagaagcattcacagaaacttctttgtgatgtgtgcactcaactcacagagttgaacctatctttagattgagcagttttgaatctctcttcttgcacaatctgaaggtggatatttcgagccttttgaggcctacagtggaaaagcaaatatcttcacagaaaaactacacggaagcattgtgataaacttctttgtgatgtgtgcattcaactcacaaagttgaacttatattctcattgagcagttttgaatatctcttttggtagaatctccaagtggatatttggagccctttgcaccctatggtggaaaaggaaatatcttcaaataaaaactacacagaagcattcagagaaactgctttgtgatgtatgcattcaactcacagagttgaacatatcttttgaatcagcagttttgaatctctcttttggcagaatcttcaggtggatatttggagccctttgaggcctactgtggaaaagaaaatatcttcacataaaaactacacagaagcattctgagaaacttctttgtgaggtgtgcattcagctcacagagttgatcttatcttctcattgagcagttttgaatctctctatttgtagaatctgcaagtggatatttggagccctttgagccctatggtggaaaaggaaatatcttgaaataaaaactacacagaagcattcagacaaacttctttgtgatgtatgcattcaactcacagagttgaacgtatcttttcattgagcagttttgaacctctctttttgcagaatctgcaggtggatatttggagcgctttgaggccttcggtggaaacgggaataccttcacataaaaactagacagaagcattctcagaaacttcgttgtgatgtgtgcattcaactcacagagttgaaccttccttttgatagagcagttttgagacactgtttttgtagaatctgcaagtggacattttgatcgctctgaggcctacggtgtaaacgagatatctttacataaaaactagacagaagcattcccagaaacttctttgtgatgtgtgcattcaactcacagagttgagtcttccttttgatagagcagttttgaaacactctttttgtggaatttgcaagtggatatttggaatgctttgaggcctatggtagaaacagaaatatcttcatataaaaactacacagaagtattctcagaaaatactttgtgatgtgtgcattcaactcacagagttgaaaattccttttgatagagaagttttgaaacactctttttgtagaatctgcaagtggatattgggagcgctttgaggttttcgatggaaatgggaatatcttcacataaaaactagacagaatcattctcagaaacttgtttgtgatgtgtgcattcaaatccaagagttaagcctttcttttgatatagcagttttgaaaccctctttctgtacaatctgcaagtggacatttggagtgctttgggtcctgtggtggaaaagggaatatcttcagataaaaactagacagaagcattctcagaaacttctttatgatgtgtgcattcatgtcacagagttgaaacttcgttttgatagagcagttttgaaacactctttttgaagaatatgcaggtggataattggagcgctttgagggctatggtggaaagggaaatatcttcacataaaaagtagacagaagcattctcagaaacttctttgtgatgtttgcattcaactaacagagctgaacataccttaacatagatcagttttgaaacactcttttagtagaatctgcaagaagatatctgtaaggctttgaggccttctttggaaacgggaatatcttcacataaaaactggagagaagcattctaagaaacttctttgtgatgtgtgcattcaactcacagagttgaacctttcttttggtagagcaggtttgaaacattcattttgtaggatctgaagtgtacatttggagagcttcgaggcctatggtggaaaaggaagtatcttcacataaaaactagagagaagcgttctcagaaacttctttgtgatgtgtgcattcaactcacagaattgaacctctcttttcattgagcaggcttgaaacactctttttgtagaatctgcaagtagacatttggagagctttgaggcctatggtggaaaaggaaatatcttcacacaaaaaacagacagaagcattctcagaaacgtctttgtgatgtttgcattcaactcacagagttgaagatacctttccatggagcagttttcagacactctttttgtagaatctgcaggtggatatttggaccactatgaggccttcgttggaaacgggaatatcttcacataaacacttgacagaagcattctcaaaaacttctttgtcacgcgtgcattaaactcaaagagttgaacctttcttttgatagagcagctttgaaacactctttttgtagaatctgcaagttgacatttggagagctttgaggcctatggtggaaatgttatatcatcatataaaaattagagagaagaattctcagaaaattctttgcaatgtttgcattcaactcagagttgaagatgccttttcatagagcagttttgaaacactgttttggtagattatgcaagtggatatttggaacactttgaggccttcgttggaaacgggaatatgttcacacaaaaacaggcagaagcattctgagaaacttctttgtgatgtttgcattcacctcaaagagttgaaactttcttttgatatagcatgtttgaaacactctttttgtagaatctgcaagtggacatttggagagcattgaggcctatggtggaaaagtaaatatcgtcacataaaaactagagagaagcattctcagaaacttctttgtgatgtgtgcattctactcacagaggtgaacctttcttttgatagagcagttttgaaacaccctttttgtagaatctggaagtgtatatttggaccgcttggaggcctttgttggaaacaggaatatcttcacataaacactagaaagaagcattctccaaaacttctttgtgctgtgtgcattgaactcacagagttgaatctttcttttgatagagcaggtttgaaacactctttttgtagaatcggcactggacatttttagacctatgaggcctatggtggaaaaggaaatatctttaaataaaagccagacagaataattctaaggaactactttgtgatgtttgctttcaaatcacaggattgtacatacctcttcatagagcagttttgaagcactctttttgcagaatctgccagtggatatttggagcactttgaagccttcgttggaaatgggaatatcttcaaataaacactagatagaagcattctcagaaacttctttgtgatgtgtccattcaactcacagagttgaagctttcctttaataaagcaggtttgatacactctttttgtagaatctgcaagtggatatttgaaccgctttgacgccttccttggaaaagtggatatcttcacataaacactagacagaatcattctcagaaacttctttgtgatgtgtgcattccactcacagaattgaacctttcttttgatagagcaggtttgaaacactttttttgtagaatctgcaagcagacatttggagagcttggaggcctatggtggaaaaggaaatatctatgaataaaaactagacagaagcattgtcagaaacttctttgtgatgtttgcattcaactcacagagttgaacctcccttttcatagagcagttttgaaacactattttcgtggaatctgcaagtggatatttggaccgctttgaggtcttcgttggaaacgggaatatcttcgcataaaaactagacagaagcattctcagaaactactttgtgatgtgtgcattcaactcacagagttgaaccttccttttcgtagagcagggttgaaacactctttttgcaggatctgcaagtggacatttggagctctttgaggcctatggtggaaaaggatatatcttcacataaaagctacacagaagcattctcataaacttatgtgtgacgtttgcattcaactctcagagtctaacatactttatcatagattagttttgaaacactcttttagtagtatctgcaagtggataattggagggctttgaggccttcgttgaaaacgggagtatcttcacataatgaagctttctcagaaacttctttgtgctgtgtgtattcaactcacagagttgaacctttcttttgatagagcaggtttgaaacactcttttgcagaatctacaagtggacattaggagcactttgtggcctatggaggaaaaggaaatatcttcacataaaaactagacagaagcattctcataaacttatttgtgacgtttgcattcaactttcagagcttaacatactttatcatagatcagttttgaaacactcttttaatagtatctgcaagtggataattggaccactttgaggccttcgttggaaacgggagtatcttcacacaatgaagctttctcaaaaacttctttgtgctgtgtgcattcaactcacagagttgaaattttctttcgatatagcagatttgaaacactctttttgtagaatttgaaagtggatatttggacagctttgaggccttccctggaaacgggagtttcttcacataaaaactagacagaagcattctaggaaacttctttttgatgtgtgcattcaactcagagagttgaccctttcttttgatagagcagatttaacactctttttgcagaatctacacgtggacattatgagcgatttgaggcctatggtggaaaaggaaatatcttcacataaaaactaaacagcagcattctcagaaacttctttgtgatgtttgccttcaattctcagagttgaacatactttatcctagagcagttttgaaacactcttttagtagtatctccaagtggatatttggaccgctttgaggacatcattggaaacgggagtacctacacataatcacgacacagaagttttctcagaaacttccttctgctgtgtgcattcaactcaaagatttgaaatttcttttgatagagcaggtttgaaacactctttttgtagaatctgcaagttgacattttgagcgctttgaggcctatggtgcaaaaggaaatatcttcacataaaaactagacagaagcattctcagaaacttctttgtgatgtgtgcattcaactcatggatttgaaccgttcttttgatagagcaattttgaaacactctttttgtacaatctgcaagtggacatttggagtgttttgaggcctacggcagaaaaggaaatatctccacataaaaaatagacagaagcattcacagaaacttctttgtaatatatgcattcaactcacagagttgaacttttcttttgataaagcaggtttgaaacactctttttgtggaatctgcaagtggacctttggagagctttgaggcctatggcagaaaaggaaatatctccacacaaaaactagacagaagcattctcagaaacttctatgggttgtgtgcattcaactcacagagttgaacatatcttttcatggagcagtttagaaacactctttttgtaaaatctacaagtggatatttgaaccgctttgagaccttcattggaaacgggaatatcttcacataaacactagacagaagaattctcagaaaattatttgtgatgtgtgcattcaactcacagagttgaacctttctttcgatagagcaggtttgaaacactctttttgtagaatctgaaactggacatttggggtgctttgaggcctatggtggaaaatgaaatatcttctcataaaaactagacagaagcattctatgaaacttctttgtgatgtttgcattcaactcacagagttgaacattccttatcatagagcagttttgaaacactcttttcgtagaatctgcaagtggatatttggaccaatttgaggccttcgttagaaacaggaataccttcacattaaaactagacaggagcattctctgaaactgctttgtgatgtgtgcattcaactcacagagttgaactttcgttttgagagagcacgttttgaaacactctttttgcagaatctgcatgtgtgaatttggagagctttgaggcgtttggtggaaaagggaatatcttcacacaaaaatt

SEQ ID NO: 498 - DNA, 1224 bp, Homo sapiens
  source 1..1224: mol_type = other DNA
tagccatatgtagaaagctgaaactggatcccttccttacaccttatacaaaaatcaattcaagatggattaaagatttaaacgttaaacctaaaaccataaaaaccctagaagaaaacctaggcattaccattcaggacataggcgtgggcaaggacttcatgtccaaaacaccaaaagcaatggcaacaaaagacaaaattgacaaatgggatctaattaaactaaagagcttctgcacagcaaaagaaactaccatcagagtgaacaggcaacctacaacatgggagaaaatttttgcaacctactcatctgacaaagggctaatatccagaatctacaatgaactcaaacaaatttacaagaaaaaaacaaacaaccccatcaaaaagtgggcgaaggacatgaacagacacttctcaaaagaagacatttatgcagccaaaaaacacatgaagaaatgctcatcatcactggccatcagagaaatgcaaatcaaaaccactatgagatatcatctcacaccagttagaatggcaatcattaaaaagtcaggaaacaacaggtgctggagaggatgcggagaaataggaacacttttacactgttggtgggactgtaaactagttcaaccattgtggaagtcagtgtggcgattcctcagggatctagaactagaaataccatttgacccagccatcccattactgggtatatacccaaatgagtataaatcatgctgctataaagacacatgcacacgtatgtttattgcggcactattcacaatagcaaagacttggaaccaacccaaatgtccaacaatgatagactggattaggaaaatgtggcacatatacaccatggaatactatgcagccataaaaaatgatgagttcatatcctttgtagggacatggatgaaattggaaaccatcattctcagtaaactatcgcaagaacaaaaaaccaaacaccgcatattctcactcataggtgggaattgaacaatgagatcacatggacacaggaaggggaatatcacactctggggactgtggtggggtcgggggaggggggagggatagcattgggagatatacctaatgctagatgacacattagtgggtgcagcgcaccagcatggcacatgtatacatatgtaactaacctgcacaatgtgcacatgtaccctaaaacttagagtataataaaaaaaaaaaa

SEQ ID NO: 499 - DNA, 6133 bp, Homo sapiens
  source 1..6133: mol_type = other DNA
ttccaagatggccgaataggaacagctccagtttacagctcccagtgtgagtgacgcagaagacagttgatttctgcatttccaactgacgtaccaggttcatctcactggggcttgttggacagtgggtgcagcccatggagtgtaagccgaagcaggacgaggcatcacctcacctgggaagtgcaagaggtcagggaattccctttcctagccaagggaagcgtgacagatggtacctggaaaattgggacactcccaccctaatactgtgcttttccaactgtcttagcaaacggcacaccaggagattatatcccgtgcctggcttggagggtcccacatccacggagccttgctcactgctagcacagtagtctgagatcaaactgcaaggcagcagtgaggctgggggaggggcatccaccattgctgaggcttgagtaggtaaacaaagcggctgggaagctcgaactgggtggagcccaccacagctcaaggaggcctgcctgcttccgtagactccacctctaggggcagggcatagcagaacaaaaggcaacagaaacttctgcagacttaaacatccctgacagctttgaagagagtagtggttctcccagtacagagtttcagatctgagaacagacaggctgcctccttaaatgggtccctgacccccaagtagcctaactgagagacacctcccagtaggggctgactgatacctcatacagctgggtgcccctctgagacgaagcttccagaggaaggatcaggcagcaacatttgccgttctgcaatatttgctgttttgcagcctccactggtgatacccaagcaaacagggtctggagtggacttccagcaaactccaacagacctgcagctgaggatcctgactgttagaaggaaaactaacaaagagaaaggacatccacaccaaaaccccatctgtacgtcaccatcatcaaagaccaaaggtagatgaaaccacaaagatggggagaaaccagagcagaaaaactgaaaattctaaaaatcagagcacctcttctcctccaaaggaatgcagctccctgccagcaatggaacaaagctggacggagaatgactttgacgagctgacagaagtaggcttcagatgatcgctaataacaaacttctctgagctaaaggatgaggttcaaacccatcgcaaagaagctaaaaaccttgaaaaaagattagatgagtggctaactagaataaacagcatagagaagaccttaaatgacctgatggagctgaaaccatggcacaagaactacgtcacacatgcacaagcttcagtagccgatttgatcaagtggaagaaagggtatcagtgattcaagatcaaatgaatgaaatgaagcaagaagagaagtttagagaaaaaagagtaaaaagaaacaaagcctaaaaaagtaaaaaagtaaaacaaagtaaaaaagaaacatgggactatgtgaaaacaccaaatctacgtctgattggtgtacttgaaagtgatggggagaatggaaccaagttggaaaacactctgcaggatattatccaggagaactcccccaacctaggaaggcaagccaacattcaagttcagaaaatacagagaatgccacaaagatactccttgagaagcgtaactccaagacacataattgacagatacaccaaagttgaaatgaaggaaaaaatattaagggaagccagagagaaaggtcaagttacccacaaagggaagcccatcaaactaacagcaaatctctcagcagaaactctacaagccagaagagagtgggggccaatattcaacattcttaaatgaaagaattttcaacccagaatttcatatccagccaaactaagcttcataattgaaggagaaataaaatactttacagacaagtaaatgctgagagattttgtcaccaccaggcctgccctacaagagctcctgaaggaagcactaagcatggaaaggaacaaccagtaccagccactgcaaaaacatgccaaattgtaaagatcactgatgctaggaagaaactgcgtcaactaacgagcaaaataaccagctaacatcacaatgacaggatcacattcacacataacaatattaaccttaaatgtaaatgggctaaattctccaattaaaagacacagactggcaaattggataaagagtcaagacccatcagtgtgctgtattcaggagacccatctcatgtgcagagacacacataggctccaaataaagggatggaggaagatctaccaagcaaatggaaaacaaaaaaaagcaggggttgcaatcctagtctctgatgaaacagactttaaaccaacaaagatcaaaagagacaaagaaggccattatgtaatagtaaaggggtcaattcaacaacaagagctaactatcctaaatatacatgcacccaatacaggagcacccagattcataaagtaagtccttacagacctacaaagagacttagactcccacacaataataatgggagactttaacaccccactgtcaacattagacagatcaacaagacagaaagttaacaaggatatccaggaattgaactcagctctacaccaagcagacctaatagacatctacagaactctccaccccaaatcaacagaatgtacattcttctcagcaccacatcgcacttattccaaaattgaccacatagttggaagtaaagcactcctcagcgaatgtaaaagaatagaaattataacaaactgtctctcagaccacagtgcaatcaaactagaactcaggattaagaaactcactcaaaaccactcaactacatggaaactgaaaaatctgctcctgaatgactactgggtacataatgaaatgaaggcagaaataaagatgttctttgaaaccaatgagaacaaagacacaacataccagaatctctgggacatatttaaagcagtgtgtagagagaaatttatagcactaaatgcccacaagagaaagcaggaaagatctaaaattgacaccctaacatcacaattaaaagaactagggaagcaagagccaacattttcaaaagctagcagaaggcaggaaataactaagattggagcagaactgaaggagatagagacacaaaaaacccttcaaaaaatcaatgaatccaggaactggttttttgaaaagataaacaaaattgatagaccactagcaagactaataaagaagaaaagagagaagaatccaatagatgcaataaaaaatgataaaggggatatcaccaccaatcccacagaaatacaaactaccatcagagaatactataaacatctctatgcaaataaactagaaaatctagaagaaatggataaattcctggacacatacaccctcccaagactaaaccaggaagaaggtgaatctctgaatagaccaataacaggctctgaaattgaggcaataattaatagcctaccaaccaaagaaagtccaggaccagagggattcacagctgaattctgccagaggtacaaagaggagctggtaccatgccttccgaaactattccagtcagtagaaaaatagggaatcctctctaactcattttataaggccagcatcatcctgataccaaagcctggcagagacacaacaaaaaagagaattttagaccaatatccctgatgaacatcgatgcaaaaatcttcaataaaatactggcaaaccgaatccagcaacacatcaaaagctaatccaccacgatcaagttggcttcatccctgggatgcaaggctggttcaacatacacaaatcaataaacataatccatcatataaacagaaccaaagacaaaaaccacatgattatctcaacagatgcagaaaaggcctcgacaaaattcaacagcgcttcatgctaaaaactctcactaaactaggtgttgatgggacgtatctcaaaataataagagctgtttatgacaaacccacagccaatgtcatactgaatgggcaaaaactggaagcattccctttgaaaactggcacaagacaggaatgccctctctcaccgctcctattcaacttagtgttggaagttctggccagggcaatcaggcaggagaaagaaataaagggtattcaattaggaaaagaggaagtcaaattgtccctgtttgcagatgacatgattgtatatttagaaaaccccatcgtctcagcccaaaatctccttaagctgataagcaacttcagcaaagtctcagaatacaaaatcaatgtgcaaaaatcacaagcattcctatacaccaataacagacaaacagagagtgaaatcatgagtgaactcccattcacaattgcttcaaagaataaaatacctaggaatccaacttacaagggatgtgaaggacctcttcaaggagaactacaaaccactgctcaacgaaataaaagaggacacaaacaaatggaagaacattccatgctcatggataggaagaatcagtatcgtgaaaatggccatactgcccaaggtaatttatagattcaatgccatccccatcaagctaccaatgactttcttcacagaattggaaaaaactactttaaagttcatatggaaccgaaaaagagcctgcattgccaagtcaatcctaagccaaaaggacaaagctggaggcatcacactacctgacttcaaactatactacgaggctacagtaaccaaaacagcatggtactggtaccaaaacagagatatagaccagtggaacagaacagacccctcagaaataataccacatgtctacaaccatctgatctttgacaaacctgacaaaaataagaaatggggaaaggattccctatttaataaatggtgctgagaaaactggctagccatatgtaaaaagctgaaactggatcccttccttacaccttatacaaaaattaattcaagatggattaaagacctaaatgttagacctaaaaccataaaaaccctagaagaaaacctaggcaataccattcaggacataggcatgggcaaggacttcatgactaaaacaccaaaagcaatggcaacaaaagccaaaataaacaaatgggatctaattaaactaaagagtttctacacagcaaaagaaactaccatcagagtgaacaggcaacctacagaatgggagaaaatttttacaatctactcatctgacaaagggctgatatccagaatctagaaagaagttaaacaaatttacaagaaaaaaatcaaccccatcaacaagtgggcaaaggatatgaacagacacttctcaaaagaagacatttatgcagccaaagacacatgaaaaaatgctcatcatcactggccatcagagaaatgcgaatcaaagccacaatgagatcccatctcacaccagttagaatggcaatcattaaaaagtcaggaaacaacaggtgctggacaggatgtggagaaataggaatacttttacactgttggtgggatggtaaactagttccaccattgtagaagacagtgtggcaattcctcaaggatctagaactagaaataccatttgtcccagccatcccattactgggtacatacccaaaggattatatatcatgctactataaagacacatgcacatgtatgttcattgtggcactattcacagtagcaaagacttggaaccaactcaaatgtccatcaacgatagactggattaagaaaatgtggcacatatacaccatggaatactttgcagccataaaaatggatgagttcaagtcttttgtagggacatggatgaagctggaaaccatcattctcagcaaactatcgcaaggacaaaaaaccaaacactgcatgttctcactcataggtgggaattgaacggtgagaacacttggacacagggtggggaacatcacacacgagtggctgccgtggggtggggggaggggggagggatagcattaggagatatacctaatgtaaatgacgagttaacgggtgcagcacaccaacatggcacatgtatacatatgtaacaaacctgcacgttttgcacatgtaccctagaacttaaagtat

SEQ ID NO: 500 - DNA, 1443 bp, Homo sapiens
  source 1..1443: mol_type = other DNA
agtgctcaatggtgcccaggctggagtgcagtggcgtgatctcggctggctacaacctccacctcccagccgcctgccttggcctcccaaaatgccaagattgcagcctctgcccggccgccaccccgtctgggaagtgaggagtgtctctgcctgaccgcccatcgtctgggatgtgaggagcccctctgcctggctgcccagtccggaaagtggggagcgtctctgcccggccgccatcccatctaggaagtgaggagcgcctcttcccggccgccatcacatccaggaagtgaggagcgtctctgcccggccgcccattgtctgagatgtggggaccgcctctgccccgccaccccgtctgggatgtgaggagcgtctctgcccggccgccccgtctgagaagtgaggagaccttctgcctggcaactgccccatctgagaagtgaggagcccctccgcccggcagccaccccgtctgggaagtgaggagcctctccgcccggcagccaccccgtccgggagggaggtgggggggtcagccccccgcccggccagccgccccgtccgggagggaggtaggggggtcagccccccgccgggtcagccgccccgtccgggagggagttgggggttcagccccccgcccggacagccgccccgtccgggagggaggtggggggtcagccccccgcccggccagccgccccgtccaggaggtgaggggcgcctctgcccggccgcccctactgggaagtgaggagcccctctgcccggccagccgccccgtctgggagggaggtgggggggtcagccccccccgcccggccagccaccccgtcctggaggtgaggggcgcctctgcccagccgcccctactgggaagtgaggagcccctctgccaggccaccaccccgtctgggaggtgtacccaacagctcattgagaacgggccatgatgacaatggcggttttgtggaatagaaaggggggaaaggtggggaaaagattgagaaatcggatggttgccatgtctgtgtagaaagaagtatacatggcagacttttcattttgttctgtactaagaaaaattcttctgccttgggatcctgttgatctgtgaccttacccccagccctgtgctctctgaaacatgtgctgtgtccactcagggttaaatggattaagggcggtgcaagatgtgctttgttaaacagatgcttgaaggcagcatgctcgttaagagtcatcaccactccctaatctcaagtacccagggacacaaacactgcggaaggccgcagggacctctgcctaggaaaaccagagacctttgttcacttgtttatctgctgaccttccctccactattgtcctatgaccctgccaaatccccctctgcgagaaacacccaagaatgatcaataaaaaataaataaataa

SEQ ID NO: 501 - DNA, 1824 bp, Homo sapiens
  source 1..1824: mol_type = other DNA
caaaattccaatgaatgaaatcaaagaactaaacaaagagatattgcatgttcatggataaaaagactcaatatcgtcatgatgtcaattcttcccaaattgatcttcaatcccagtcaaaatccaagcaagtttttttgtggatacggaaaaactgattgtaaggtttttatcaagagacaaaaaacccaaaatggtcaatacaatacggaagaagaaaaaagttggaagacaaacactatctgacttgaatatttactgcaaagctatagtaatcaagactgtggtatttgcaaaagagacaaatccatcagtggaacagactggggagcccagaaatagaccacacaaatatacaaaagaacaaggcaatatgatggagaaaagatagtcttttcaagaaatggtgctggaacaactgaataactacatttttaaaaaacgaatccatatatagatgttatgtcctttacaaaaatgaattcagaatgtatcacaaacataaacataaagcacaaagctatcaagcttcgacaagataatccagatgaccttggattttgcaatgattttacagatagatataacattaaaagcataatactagaaaaaaagaattgataagctggagttccttaaaattaaaaacttgtgctttgtaaaagacactgttaagagaatgaaaagacaaaacatagaatggtagaacatatttgcaaatacatatttgataaagaactgttatccaaaatatgcaaagaactcttaaaactcaataataagacaaaaaccccaattaaaaatagtcaaaagatctgaagagacatctcaccaaaggagatacacagatggcaaacaaacatgaaaagatgttcaacatcacatatctttaggtagttgcaaactaaaacaacaatgagagaacacttcagacctaccagaatggcaaaagtccaaaattcctacaatgctcaatgctggtcaggaggtggaacaacagaaactctcattcattgttggtgggaatacaaaatagtacaactactttggaaaacagtgtggcagttttttttacaaagctaaacataatcttaccatatgatccagtaattgtgctccttggtatttatacacctgaaaaaaacttatcttcacacaaaaacctgttcatggatgtttatagtcgctttattcataatcgccaaaacatggaagcaactgagatgttcttcaataggtgcatggacaaatgaaatgtggtagaaccagacaataaaattttattctacactaaaaaaaaaatgagctacatatacatgacaagatacagagaaacctaaatgcatattaatacatgaaagaagccaatctgaaaagctatatactgcatgaaaagctatatactgtatgatttcaactacattacattctggtaaaagcaaaactatgtacacagtgaaaagatcagttgctaagggttaaaggagagggagggatgaataagtaaaacacagaggattttttaaggcagtgaaattattctgtataatactataacggttgacaaatgtcattacacatttgtcaaaacccatattatgtacaacaccaagagtgaaccctcacgtaaactatggactttgggtgataataatgtgtcaatgtaggttcatcagttgtaacaaatgtaccactctattataagacattgacggtaggggaggctgtgaatgtgtggaggtagagggtatatgggaaatctctgcattttctgctccatttttgctgtgaacctaaaactgttctaaaacataaagtctattt

SEQ ID NO: 502 - DNA, 294 bp, Homo sapiens
  source 1..294: mol_type = other DNA
gccgggtgtggtggctcacacctgtaatcccaacactttgggaggccaaggcaggcaaatcacctgaggttgggagtttgagaccagcctgaccaacatggagaaaccccatctctactaaaaatagaaaattagccaggtgtggtggtagatacgtgtaatcccagctactcgtgaggctgaggcaggagaattgcttgaatccgggaggcggaggttgcagtgaactgagattgcaccactgcactccagcctgggcgacagagtgagactccgtctcagaaaaataaaaaa

SEQ ID NO: 503 - DNA, 6130 bp, Homo sapiens
  source 1..6130: mol_type = other DNA
ttccaagacggccgaatagaaatagctccagtctatagctcccagtgtgagcgatggagaagacaggtgatttctgcatttccaactgaggtactgagttcatctcactggggcctgtcggagaataggtgcaggacagtgggtgcagcccacggagcatgaaccgaagcagggcaaggcatcacctcacctggggagcacaaggggtcagggaattccctttcctagccaagggaagccatgacagatggcacctggaaaatcgggtcactcccaccctaatactgtacttttccaatggtcttagcaaatggcacaccaggagattatatcctgtgcctggctgagagagtcccatgcccactgagcttgctcactgctggcacagcagtctgagatagacctgcaaggcggcagcgaggctaggggaggggcgcctgccattgctgaggcttgagtaggtaaataaagcagccaggaagctcgaactgggtggagcccattgcagctcaaggaggcctgcctgcctctgtagacgccacctctaggggcagggtatagctgaacaaaaggcagcagaaacttctgcagacttaaacgtccctgactgacagatttgaagaaagtagtgggtctcccagcatggagtttgatatctgagaacagacagactgactcctcaagtgggtccctgacccccgagtagcctagctgggaggcacctcccagtaggggccaactgacacctcctacagccaggtgccccgctgagacaaagcttccagaggaacgattagacagcaacatttgccattctgcaatatttgctgttctgcagcctccgctggtgatacccaggcaaacagggtggacctccagcaaactccaacagacctgcagctgagggtcctgactgttagaaggaaaactaacaaacagaaaggacatccacaccaaaaccccatctgtacgtcaccatcatcaatgatcaaaagtagataaaaccacaaagatggggagaaaacagagcagaaaagctgaaaattctaaaaatcagagtgcctcttctcctccagaggaatgcagctcctcgccagcaatggaacaaagctggacagagaatgactttgacgaattgagagaagaagtcttcagacaatcaataataacaaatttctctgagctaaaagaggaagttcgaacccatcacaaagaagctaaaagccttgaaaaaagattaagacgaatggctaactagaataaacagtatagagaagaccttaaatgacctgatggagctgaaaaccatggcaagagaactatgtgacacatgcacaagcttcagtagccgattcaatcaactggaagaaagggtatcagtgactgaagatcaaatgaatgaaatgaagtgagaaggaaagtttagagaaaaaagagtaaagagaaatgaataaagcctccaagaaatatgggactatgtgaaacgaccaaatctacgtctgattggtgtacctgaaagtgatggggagaatggaaccaagttggaaaacactctgcaggatattatccaggagaacttccccaacctagcaaggcaggccaacactgaaattaattcaggaaatacagagaacaccacaaagatacacctcaagaagagcaactccaagacacataattgtcagattcaccaaagttgaaataaaggaaaaaatgttaagggcagccacagagaaaggtcagcttacccacaaagggaagcccatcagagtaatagcagatctcacggcagaaacgctacaagccagaagagagtgggggccgataagcaacattcttaaagaaaagaattttcaacccagaatttcatatccagccaaactaagcttcataagtgaaggagaaataaaatcctttacagacaagcaaatgctgagagattttgtcaccaccaggcctgccttacaagagctcctgaagcaagcactaaacatggaaaggaacaactggtaccagccactgcaaaaacatgccgacttgtaaagaccattgaggctaggaagaaactgcatcaactaacgagcaaaataaccagctaacatcataatgacaggatcaaattcatacataacaatattaaccttaaatgtaaatgggctaagtgctccaattaaaagacacagactggcaaattggataatgagtcaagacccattagtgtgctgtattcaggagacccatctcacgtgcagagacacacataagctcaaaataaagagatggaggaagatctaccaagcaaatgaaaacaaaaaaatgcaggggtctcaatcctagtctctgataaagcagactttaaaccaacaaagatcagaagagacaaagaaggccattacataatggtaaagggatcaattcaagaagaagagctaactattccaaatatatatgcacccaatacaggagcacccagattcataaagcaagtccttagagacctacaaagagggttagactcccacacaataataatgggagactttaacatcccactgtcaacattagatcaatgagacaggaagttaacaaggatatccatggaatttaactcagctctgcaccaagcggacctaatagatatctacagaactctccaccccaaatcaacagattatacattcttctcagcaccacatcacactttttccaaaattgaccatatagttggaagtaaagcactcctcagcaaatgtaaaagaacagagattataataaactgtctctcagaccacaatgcaatcaaactagaactcaggattaagaaactcactcaaaaccactcaactacatggaaactgaacaacctgctcctgaatgactactgggtacataatgaaatgaaggcagacataaagatgttctttgaaaccaatgagaacaaagacatgacatacagaatctctgggacacatttaaagcagtttgtagagggaaatatatagcactaaatgcccacaagagaaagcaggaaagatctaaaactgacactctaacatcacaattaaaagaactagagaagcaagagcgaacacattccaaagctagcagaaggcaagaaataactaagatcagagcagaactgaaggagatagagactcaaaatcccttaaaaaaatcaacgaatccaggagctggtttttgaaaagatcaacaaaattgatagaccgctagcaagactaataagaaaagagagaaaaatcaaatagacgcaatacaaaatgataaaggggatatccccatcgatcccccagaaatacaaactaccttcagagaatactatacacacctctaatcaaataaactagaaaatctagaagaaatggataaattccttgacacatacatcctcccaagactaaaccacgaagaagctgaatccctgactagaccaataacaggctctgaaattgagacaataattaatagcctaccaacaaaaaaaagtccaggaccagacagactcacagccaaattctaccagaggtacacagaggagctggtaccattctttctgaaactattccaatcaacagaaaaagagagaatcctccctaactcattttatgaggccagcatcatcctgataccaaagcctggcagagacatgacaaaaaaggagaattttagaccaatatccctgatgaacatcaatgcaaaaatcttcaataaaatgctggcaaaccgaatccagcagcacatcaaaaagtttatccaccacgatcaagtgggcttcatccctgggatgcaagactggttcaacatacgctaatcaataaacgtaatccagcatataaaagaaccaaatcaaacaccacatgattatctcaatagatttagaaaaggcctttgacaaaattcaacagtccttcatgctaaaaactctcaataaattaggtattgataggacatatctcaaaataataagagctatttatgaccaacccacagccaatatcatactgaatgggcaaaaactggaagcattccctttgaaaactggcacaagacagtgatgccctctctcaccactcctattcaacatagtgttggaagttctggccagggcaatcaggcaggagaaagacataaagggtattcaattaggaaaagaggaagtcaaattgtccctttttgcagatgacatgattgtatatttagaaaacccatcatctcagcccaaaatctccttaagctgataagcaattcagcaaagtctcaggatacaaaatgaatgtacaaaaatcacaagcattcctatacaccaaaaacagaaacagagagccaaaccatgagtgaactcccattcccaattgcttcaaagagaataaaatacctaggaatccaaattacaagggatgtgaaggactccttcaagaagaactacaaaccactgctcaacaaaataaaagaggacacaaacaaatggaagaacattccgtgctcatggataggaagaatcaatattgtgaaaatggccatactgcccaaggtaatttatagactcaatgctatccccatcaagataccaatgactttcttcacagaattggaaaaaactactttaaagttcatatggaaccaaaaaagagcccgcatcgccaagtcaaacctaagccaaaagaacaaagctggaggcatcacgctacctgacttcaaactatactacaaggctacagtaaccaaaacagcagggtactggtaccaaaacagagatatagaccaatggaacagaacagagccctcagaaataataccacacatctacaaccatctgatctttgacaaacctgacaaacacaagaaatggggtaaggattcactatttaataaatagtgctgggaaaactggctagccatatgtagaaagctgaaactggatcccttccttacaccttatacaaaaattaattcaagatggattaaagacttaaatgttggacctaaaaccataaaaatcctagtagaaaacctaggcaataccattcaggacataggcatgggcaaggacttcatgtctaaaacaccaaaagcaatggcaacaaaatccaaaattgacaaatgggatctaattaaactaaagagcctctgcacagcaaaagaaactaccattggagtgaacaggcaacctatagaatgggaaaaaatttttgcaatctacccatctgacaaagggctaatatccagaatctacaaagagcttaaacaaatttacaagaaaaaatcaaacaaccccatcaaaaagtgggtgaaggatatgagcagccacttctcaaaagaagacattgatgcagccaacagacacatgaaaaaatgctcatcatcactggccatcagagaaatacaaatcaaaaccacaatgagataccatctcacaccagttagaatggcgatcattaaaaagtcaggaaacaacctgtgctggagaggatgtggagaaataggaacacttttacactgttggtgggactgtaaactagttcaaccattgtggaagatagtctggagattcttcaaggatctagaactagaagtaccatttgacccagccatcccattactaggtatatactcaaagggttataaatcatgctgctataaaggcacatgcacacgtatgtttactgcggcactattcacaatagcaaagacatggaaccaacccaaatgtccatcagtgatagactggattaagaaaatgtggcacatatacaccatggaatactatgcagccataaaacagggtgacttcatgtcctttgtagggacatggatgaagctggaagccatcattctgagcaaactgtcacaaggacagaaaaccaaacaccacatgttctcactcaggtcgaattgaacaatgagaacacttggacgcaggatggggaacatcacacaccagggtctgttgccaggtgggggtaagcgggagggatagcattaggagatatacctaacataaatgacgagttcatgtgtgcagcacaccaacatggcacatgtatacatatgtaacaaacctgcttgttgtacacatgtaccctagaacttaaagtataaaaaaagaaaaaaa

SEQ ID NO: 504 - DNA, 3919 bp, Homo sapiens
  source 1..3919: mol_type = other DNA
gattagacaaagaagaggagcaagatggccaaatttaaccttccagtgattgtccctcccacgcgaacaactgaacaactatccacagaggaaagctcattcctatgaaccaaaaaattaggtgagcaatcacagcacctgattttaataaaacaacaacaaaagaggcattggaaaaggtagaaagaagagccttgcattgcctacaccaaccttcctccaaccctaggcagtgaagcatctagagagaatctgtgtgatttggagagggagagtgaaatgcaaacgtgggactttgcgttgtacttcattggttccctgttacagtggaacacaacagagggcagaattctgctgatgcccacagaaggagcatttaaatcaaccctggaccagagaggaatcctctacctcagcaggaggaaactgggtcctagccagcatcatgaccagttgactaaattggccaaggatcctgagtaaatttgtgtgccagtcagggccacaagtactgcagtctttgaggaagccctggtgctgcactggtcttaaaggcaatcaacttggggcaccacccagtgtgacacaatctgtggttgccatgggattgcctgtatcacccctccccaactccaggaactgcagctctgggatagactccctctgcttgggggaagaagaaggaagagtatagagaactttgtcttgcaacttgggtatcagctcagccacagtaaaataaagcaccggacagattccttaatcccctgatgctaggtctttgctcctggatggcctttctagacccatcttgggcatgaaggaaatccactgctctagtggcatgaggccaatcctggcaagatttgccacccactacctaaagtggccttgggccttaaataaacagcattggcagccaggcagtagtggtccaaggacttggttaagccccagtactgtggtggtctgaaaagtcatttgcctcagttatgacccagtgcagtgccagctgtggtgaccacaggaatgctgacatcatccctcccccaactccaggcagcccaatggaggcagagactcctgattgcagaaaagagagggaagagaggaggtaacccaaggaatcctcttgttatctgctccaaatccaccaaggctgtgtatgtaggactccatatatcaacagttgtagtgttcctgggtttaggtgcccctagtgctaaaacagctgcagtaaccacagccttaggtcgcaacactcaaacctctttgagttcttggaaaggcctctcaaaaatgatgcgcacaaacaaacccagacagcacaaattggaataaatacacaagtctctaatgcccagacattgacaaatgtccaaaaacatcaagaaaatctagagaaacgtgaccttaccaaatggacatcagtgaccagtcctagagtaatggatatatgtgaactctctgacagggaattcaaaagagctgtctggaggcagctcatcaaacttcaaaataacacaaagaagaaagtcagaatatatcagagaaatttaacagagattgaaataataaaaagaaagcaagcagaaaatctgcccctgaaaaaattcagttgacaaataaaaaatgcatcagagcctcttaccagtggacttgattaagcagaagaattagtcagctcgaagataggatttaagaaaatatatagttataggagaaaaaagaaaagccaataaaaaagaagcatgcctagaaaatccagaaactaacctcaaaaggacaaatctaacagttattggccttaaagaggatgtagacagagatgggggtagaaagtttactcaaagaaaataacagaaactttccaaacctaaagaaagatatgaatatccaggtacaagaaagtcaaagagcagtaagaagattcaacccaaataattacctcaaagtatataataataaaactctcaaaggtcgaatatgtttttaaagaatgatctgaaaagaaacaagagaaaaagggaaaatagcatataaaggagctccaatatttctgacagcagacttctcaacaagaaccttatgggccagaagggggtgggatgacatattcaaagtgctgaagtaaaacaattttcaacttagaatattacattcagcaaaattatctttcaaatatggaggctaaataaagactctcccagacaaacaaaagctgagggattttgttaacaccagatctgtctcgcaatatatttgagagaatttgtcaatctgaaagaaaaggatgttaatgagcaataagaaatcatctgaagatataaaactcactgatagcagtaagtacacagataaatatagaatactctaccactgtaattgtggtgtgtaaaccactcatatcttgagtaggaagactaaaagacaaacatataaaaaataataactcaaaaaaatttaaagtgatagacaatataaaaagataaataggggcaacaagaagtcaaaatatggagtggattagaatgaaagtgtagttttttatttttctctttgcttgttttttttctttgtaataagaatcaagttgtcactagcttaaaataactgattataataagatgtcatttgtaaagccatatggtaaccacaaaaaaaacctattaacagttacacaaaaattacaaagcaacgaatgaaaacatactaccagagaaaaccaactttacacatagaaaggaagaaggaaatagaggaccaaaaaccaaccagaaaacaaataacaaaatggcaatagtaggcccttatatctcaataataacattaaaaagacccaactacaggtagcctgcaagaaacttccatctataaagacaaacagactaaaactgaagggatgtaaaaatgtattacacacaaatggaaaccaaaaaagaggaggactagctatatttacatcagataaaacacttttcaagacaaatatggtaaaaagagacaaagtatatcattatataaaaatgaagggatcaattcagcaagaggatattacaattctaagtatatatggacccaatgctggagcatttagaatactgagtaactattattagagctaaagagagagatagaccccactactataataattgagtatctcaccatccaactttcagcaatgcacagatcatctagacacaaaatcagcaaactcctaactgaacctgcactataagccaaacatacctaatagacatttatagaacattacatccagtgactacagaatacctattattcttctcagcacatgggacgtcctcaaggatagactggaagttagaccagaaaatacatctcaaaaaattaaaaaaaaaaaaagaaaaaatatcaagtacctgttctgaccacaaacaaataaagctatgaatcactaacaagaggaaccttggaaactgttcacacacatagaaattaagcaatatgctcctgaataaccattgggttaaagaaataatgaaatttaaaattttcttgaaacaaatgaaaatggaaatacaacataccaaaaatctatgcaatgcagcaaaagcagtactgagaaagtagtttataacaataaacacttacatcaaaaagtagaaaaacttcaaataaacctaatgatgaatcttaaagagccagcaaaacaagagcaaaccaaactcaaaattaatagaaaaagtaaagatcagagcagaaataaatgacattgagagtaaaaactaaatataaaagggtaatgaaaaagaaaatttgatttttttgaaaagagtaacaaaatagacaaacctttagccagactaagaaaacgagagaaaaccagataaaatcagagaaaaaaaaatggtatacagctgataccacagaaata

SEQ ID NO: 505 - DNA, 1383 bp, Homo sapiens
  source 1..1383: mol_type = other DNA
cttcttcttcctctccctctccctctccccacggtctccctctccctctctctccacggtctccctctgatgccaagccaaagctggactgtgctgctgccatctcggctcactgcaacctccctgcctgattctcctgcctcagcctgcccagtgcctgcgattgcaggcgcgtgccgccacgcctgactggttttcgtatttttttggtggagacggggtttcgctgtgttggctgggctggtctccagctcctaaccgcaagtgatccgccagcctcggcctcctgaggtgccgggattgcagacggagtctcgttcactcagtgctcagtggtgcccaggctggagtgcagtggcgtgatctcggctcgctacaacctccacctcccagccgtctgccttggcctcccaaagtgccgagattgcagcctctgcccagccgccaccccgtctgggaagtgaggagcgtctctgcctggccgcccatcgtctgggatgtgaggagcccctctgcccggctgcccagtctgggaagtgaggagcgcctcttcccggccgccatcccatctaggaagtgaggagcgtctctgcccggcagccaccccgtctgggaagtgaggagcgtctccgcccggcagccaccccatccgggagggaggtgggggtcagcccccgcccggccagctgccccgtccaggagggaggtggggggtcagaccccgcccggccagccgccccgtccgggagggaggtgggggggcgcctccgcccggccagccgcccagtccgggaggtggggggcgcctctgcctggccgccccttctgggaagtgaggagcccctctgcccggccaccaccccgtctgggaggtatacccaacagctcattgagaatgggccatgatgacaatggcggttttgtggaatagaaaagggggaaaggtggggaaaagattgagaaatcggatggttgctgtgtctgggtagaaagaagtagacatgggagacttttcattttgttctgtactaagaaaaattcttctgccttgggaccctgttgatctatgaccttacccccaaccctgtgctctctgaaacatgtgctgtgcccactcagggttaaatggattaagggtggtgcaagatgtgctttgttaaacagatgcttgaaggcagcatgctccttaagagtcatcaccactccctaatctcaagtacccaaggacacaaacactgcggaaggccgcagggtcctctgcctaggaaaaccagagacctctgttcacttgtttatctgctgaccttccctccactgttgtcctatgaccctgccaaatccccctctgcgagaaacacccaagaatgatcaataaaaaaaaaa

SEQ ID NO: 506 - DNA, 1508 bp, Homo sapiens
  source 1..1508: mol_type = other DNA
tctccctctcccgtctccctcctctccctcctctccctcctctccgtcctctccctctctttccacggtctccctctgatgcagagctgaagctggactgtactgctgccatctcggctcactgcaacctccctgcctgattctcctgcctcagcctgccgagtggcgcgccgccacgcctgactggttttcatattattttggtggagacggagtttcgctgtgttggccgggctggtctccagctccgaaccacgagtgatccgccagcctcggcttcccgagttgctgggattgcagacggagtgtcgttcactcagtgctcaatggtgcccaggctggagtgcagtggcgtgatctcggctcgctacaacctccacctcccagccgcctgccttggcctcccaaagtgccgagattgcagcctctgcccggccgccaccccatctgggaagtgaggagcatctctgtctggccgccatcccatctaggaagtgaggagcgcctcttcccggccgccatcccatctgggaagtaaggagcgtctctgcccagccgcccatcgtctgagatgtggggagcgcctctgccctgccgccccgtctgggatgtgaggagcgtctctgcccggccgccccgtctgagaagtgaggagcccctccgcccggcagccgcaccctctgagaagtgaggagtccctccgcccggcagccaccccgtctgggaggagaagagtgtctccgcccggcagccgccccgtccgggagggaggtggggggtcagcccccgccaggccagccgcctcgtctgggagggaggtgggggtcagccccccgcccggccagccgccccgtccgggagggaggtggggggggtcagccccccgcccggccagccgccccgtccgggaggtgaggggcgcctctgcccggccgcccctactgggaagtgaggagcccctctgcccggccaccaccccgtctgggaggtgtgcccaacagctcattgagaacgggccatgatgacaatggcagttttgtggaatagaaaggggggaaaggtggggaaaagattgagaaatcggatggttgccgtgtctgtgtagaaagaggtagacatgggagacttttcattttgtgctgtactaagaaaaattcttcttccttgggatcctgttgatctgtgaccttgcccccaaccctgtgctctctgaaacatgtgctgtgtccactcagggttaaatggattaagggcggtgcaagatgtgctttgttaaacaaatgcttgaaggcagcatgctcgttgagagtcatcaccactccctaatctcaagtacccagggacacaaacactgaggaaggccgcagggtcctctgcctaggaaaaccagagacctctgttcacttgtttatctgctgaccttccctccactattgtcctgtgaccctgccaaatccccctctgcgagaaacacccaagaatgatcaataaaaaaaaaaaagaaaaaa

SEQ ID NO: 507 - DNA, 1620 bp, Homo sapiens
  source 1..1620: mol_type = other DNA
ctctgcccagccagccgccccgtctgggagggaggtgggggggtcagccccccgcccggccagccgcccagtccgggagggaggtgggggggtcagccccccgcctggccagccgccccgtccaggaggtgaggggagcctctgcctggccgcccctactgggaagtgaggagcccctctgcccggccagccgccccgtccgggagggaggtgggggggggtcagccccccgcctggccagccgccccgtccgggagggaggtggggggggggtcagccccccgcctggccagccgcctcgtccgggagggaggtggggggggtcagccccccgcccggccagccgccccgtccgggggagggggggtcagccccccgcccggccagccgccccatccgggaggcgaggggagcctctgccctgccgcccctactgggaagtgaggagcccctctgcccggccagctgccccgtccgggagggaggtggggggggtcagccccccgcccggccagccaccccgtctgggagggaggtgggggggtcagccccccacccggccagccaccctgtccgggaggtgaggggcgcctctgcccggccgcccctactgggaagtgaggagcccctctgcccggccagccgccccgtccgggagggaggtggggggggtcagccccccgcccggccagccaccccgtctgggagggaggtgggggggtcagccccccacccggccagccaccctgtccgggaggtgaggggcgcctctgccctgccgcccctactgggaagtgaggagcccctctgcccggccagctgccccgtccgggaggtgaggggagcctctgccctgccgcccctactgggaagtgaggagcccctctgcccggccagctgccccgtccgggagggaggtggggggggtcagccccccgcccggccagccaccccgtctgggagggaggtgggggggtcagccccccacccggccagccaccctgtccgggaggtgaggggcgcctctgcccggccgcccctactgggaagtgaggagcccctctgcccggccaccaccccgtctgggaggtttacccaacagctcattgagaacgggccaggatgacaatggcggttttgtggaatagaaaggggggaaaggtggggaaaagattgagaaatcggatggttgccgtgtctgtgtagaaagaggtagacatgggagacttttcattttgttctgtactaagaaaaattcttcttccttgggatcctgttgatctgtgaccttacccccaacccggtgctctctgaaacatgtgctgtgtccactcagggttaaatggattaagggcggtgcaagatgtgctttgttaaacagacgcttgaaggcagcatgctcgttaagagtcatcaccactccctaatctcaagtacccagggacacaaacactgaggaaggccgcagggtcctctgcctaggaaaaccagagacctttgttcacttgtttatctgctgaccttccctccactattgtcctgtgaccctgccaaatccccctctgcgagaaacacccaagaatgatcaataaaaaaataaataaaccaaaaaaaaaaaaa

SEQ ID NO: 508 - DNA, 6152 bp, Homo sapiens
  source 1..6152: mol_type = other DNA
tctaagatggccaaataggaacagctctggtctgtagctcccagtgtgatcaacgcagaagacaggtgatttctgcatttccaactgaggtacctggttcatctcactgggactgattggacagtgggtgcagcccacggagggtgaactgaagcagagtggggtgtcgccttacccgggaagtgcaaggggttgggggatttccctttgctagccaagggaagccatgacagactgtacctggaaaaatgggacacttctgcccaaatactgcgcttttcccaaggtcttagcaaccggcagacaaggagattctctcccgtgcctggcttggcgggtcacacacccacggagccttgctcactgctagtgcagcagtctgagatcgaactgcgaggtggcagcttggctgtgggaggggcatctgccattgctgaggcttgagcaggtaaacaaagcggccgggaagcttggactgggcagagcccaccacagctcagcaaggcctactgcctctatagactccacctctgtaggcagggcgtagctgagcaaaaggcagcagacaacttctgcagacttaaacgtccctgtctgacaggtctgaagggagcagtggttctcccagcatggcgtttgagctctgagaatggacagactgcctcctcaagtgggtccctgacccctgtgtatcctaactgtgacacacctcccagtaggggccaacagacacctcatgtaggtgggtacccctctgggacgaagctcccggaggaagcatcagccagcaatatctgctgttctgcaatatttgctgttctgcagcctccgtgggtgatacccaggcaaacagggtgtggagtggacctccagcaaactccaaaagaactgcagatgagggacctaactgttacagggaaagctaacaaacagaaaggaataggatcaacatcaacagaaaggacatctacaccaaaaccccatctgtagttaccaacatcaaagaccaaaggtagataaaaccacaaagatggggagaaaccagagcagaaaagctgaaaattctaaaaaccagagcacctcttcttctccaaagaattgcagctcctttccagcaacagaacaaagctgcatggagaatgaccgacgagttgacagaagtaggcttcagaaagtcagtaataaacttctctgagctaaaggatcatgatgttctaacccaacacaaggaagctaaaaaccttgaaaaaaggttagacgaatggctaactagaataaacagtgtagagaagaccttaaatgacctgatggagctgaaaaccacggcacgaaaactccgtgatgcgtggacaagcttcaatagccaatttgatcaagtgaaagaaagggtattagggattgaagatctaattaatgaaataaagtgagaagacaagtttacagaaaaaagagtaaaaagaaatcaacagagccttcaagaaaaatgggactatgtgaaaagaccaaatctacatttgattggtgtacctgaaagtgatggggagaatggaaccaagttggaaaacactcttcaggatatttcccaggagaacttccccaacctagcaagacaggacaacattcaaattcaggaaatacagacaacaccacaaagatactcctcgagaagagcaacaccaagatacataactgtcagattcaccaaggttgaaatgaaggaaaaaatgttaagggcagccagacagaaaggtcgggttacccacaaagggaagcccatcagactaacgggagatctctcagcagaaaccctacaaaccagaagagagtggggaccgatattcaacatccttaaagaattttcaatctagaatttcatatctagccaaactaagcttcataagtgaatgagaaataaaatcctttacagacaagcaaatgctgagagattttgttcaccaccaggcctgccttacaagagctcctgaagaaagcattaaacatggaaagaaacaactggtaccagccactgcaaaaacaggccaaatggtaaagaccatcaatgagaagaagaaactgcatcaattaatgggcaaaataaccagctaacatcataatgacaggatcagattcacacataacaatattaaccttaaatgtaaataggctaaatgccccaattaaaagacacagactcgcaaattggatatagagtcaagacccatcagtgtgctgtattcaggagacccatctcatgtgcagagacacacacaggctcaaaataaagggatggaggaagacctaccaagcaaattgaaagcaaaaaaaaaaaaaaaaaaaaaaaacaggggttgcaatcctagcctctgacaaaacagactttaaaccaacaaagatcaaaagagaaaaggccattacataatggtaaagggatcaattcaacaagaagagctaactatcctaaatatttatgcacccaatacaggaacacccagattcataaagcaagtccttagacacctgcaaagagacttagactaccacacaataataatgggagacttttacaccccactgtcagtattagattaatgagacagaaggttaacaaggatacccaggactagaactcagctctgcacaaagcagaccttatagacatctacagaactctccaccccaacagaatatacattcttctcagcacatcacacttattctaaaattgaccacaaaattggaagtaaagcactcctcagcaaatgtaaaagaacagaaatcacaacaaactgtctctcagaccacagtgcaatcaaattagaactcaggattaagaaactcactcaaaaccacacaactacatggaaacagaacaacctgctcctgaatgactactgggtacataatgaaatgaaggcagaaataaagattttctttgaaaccaatgagaacaaagacacaacataccagaatctctgagacacatttaaagcagtgtgtagagggaaatttatagcactaaatgcccacaagaggaagcaggaaagatctaaaattgacaccctaacatcacaattaaaagaactagagaagcaagaggaaacaaattcaaaagctagcagaaagcaagaaataactaagatcagagcagaactgaaggagatagagacatgaaaaacccttcaaaagatcaattaatccaggagctggctttttgaattttgtctatcaacaaaattgttagaccgctagcaagactaataaagaagaaaatagagaagaatcaaatagacgcaataaaaaatgataaaggggatatcgccacggatcccgcagaaatacagactatcatcagagaatactataaacacctctacacagataaactagaaaatctagaagaaatggatgaattcctggacacatacaccctcccaagactaaaccaggaagaagttgaatttctgaatagatcaataacaggctctgaaattgaggcaataattaatagcctaccaaccaaaaagaatccagaaccagatggattcacaggcgaattctaccagaggtataaggaggagctggaaccattccttctgaaactgttccaatcaatagaaaaagagggaatcctccctaactcattttatgaggccaacatcatcctgataccaaagcctggcagaaacacaacaaaaagaattttagaccaatatccctgatgaacattgatgcaaaaatcctcaataaaatactggcaaactgaatccagcagcatatcaaaaagcttatccaacaagatcaagtcggcttcatccctggttgaacaaggctggttcaacatacacaaatcaataaatgtaatccatcacataaacagaaccaacaacaaaaaccacatgattatctcaatagatgcagaaaaggcctttgacaaaattcaacagccttacatgctaaaaactttcaataaactaggtattgatggaacatatctcaaaataataagagctatttatgacaaacccacagccaatttcatactaaatgggcaaaaactggaagcattccctttgaaaactggcacaagagaaggatgccctctctcaccactccagttcaacatagtgttggaagttctggccagggccatcaggcaagagaaagcaataaagggtattcaattatgaaaagaggaagtcaaattgtccctgtttgcagatgacatgattgtatgtttagaaaaccccatcgtctcagcccaaaatctccttaagctgatgaggaacttcagcgaagtctcaggatacaaaatcaatgtgcaaaaatcacaagcattcctatacaccaataacagacacacagccaaatcatgagtgaactcccattcacaattgctacaaagagaatcaaatacctaggaatccaacttacaagggatgtgaaggacctcttcaaggagaactgcaaaccactgctcaatgaaataaaagaggacacaaacaaatggaaggacattctgtactcatggataggaagaatcaatatcgtgaaaatgggcatactgcccaaggtaatttatagattcaatgccatccccatcaagctaccaatgactttcttcacagaattggaaaaaactactttaaagttcacgtggaaccaaaaaagagccctcattgccaagacaatcctaagccaaaagaacaaagctggaggcatcacactacctgacttcaaactatactacaaggctacagtaaccaaaacagcgtggtactgctaccaaaacagagatatagaccaatggaacagaacagagccctcagaaataataccacacatctacaaccatctgatctttgacaaacctgacaaaaacaagaaatggggaaaggagtccctatttaataaatggtgttaggaaaactggctagccatatgcagacagctgaaactggatcccttccttacacgttatacgaaaattaattcaagatggattaaagacttaaatgttagacctaaaaccataaaatccctggaagaaaacctatgcagtaccattcaggacataggcatgggcaaggacacttcatgactaaaacaccaaaagcaatggcaacaaaagccaaaatagacaaatgggatctaattaaactaaagaccttctgcacatcaaaagaaactaccatcagagtgaacagccaacctacagaatgggagaaaatttttgcaatccacccatctgacaaacggctaatatatacagaatctacaaagaacttaaacaaatttacaagaagaaaatcaaccccatcaaaaagtgggcaaaggatatgaacagacgcttctcaaaagaagacatttatgcagccaaaagacacatgagaaaatgctcatcatcactggtcattagaggaatgcaaatcaaaaccgcaatgagataccatttcacaccagttagaatggcaatcattaaaaagttagcaaacaacagatggtggagaggatgtggagaaataggaactcttttacactgttggcagagtgtaaattagttcaactgtggtggaagacagtgtggcgattcctcaaggatctagaactagaaataccatttgacccagcaatcccattactgagtatatacccaaagattataaatcatgctactataaagacacatgcacacgtatgtttattgtggcactattcacaatagcaaagacttggaaccaacccaaatgtccatcaatgatagactggattaagaaaatgtggcacatatataccacggaatactctgcagccataaaaaagggtgagtttatgtcctttgcagggacatagatgaagctggaaaccatcattctcagcaaactatcacaaggacagaaaaccaaacaccgcatgttctcactcataggtgggaattgaacaatgagaccacttggacacagggcgggaacatcacacaccagggcctgtctggcgctagggagctggcagggggattgcattaggagaaatacctaatgtaaatgacgagttgatgggtgcagcaaatcaacatgatacatgtatacccatgtatcaaacctgcacgttgtgcacatgtaccctagaacttaaaagtatattaataaaaaaaa

SEQ ID NO: 509 - DNA, 1474 bp, Homo sapiens
  source 1..1474: mol_type = other DNA
tccctctccctctccctctctctccctccttctccccacggtctccctctccctctctttccagggtctccctctgatgacgagccgaagcgggactgtactgccgccatctctgctcactgcaacctccctgcctgattcttctgcctcagcctgccgagtgcctgcgattgcaggcgcgcgccgccacgcctgactggttttcgtatttttttggtggagacggggtttcgctttgttggccgggctggtctccagctcctaaccgggagtgatctgccagcttcggcctcccgagttgccgggattgcagacggagtctcattcactcagtgctcaatgttgcccaggctggagtgcagtggcgtgatctcgggtagctacaacctccacctcccagccgcctgccttggcttcccaaagtgcccagattgcagcctctgcccagccgccaccccgtctgggaagtgaggagcgtctctgcctggctgcccatcgtctgggatgtgaggagcccctctgcccggctgcccagtctgggaagtgaggagcacctcttcccggccaccatcccgtctaggaagtgaggagcgtctctgcctggccgcccatcgtctgagatgtggggagcgcctctgccccgccgccccgtctgggatgtgaggagcgcctctgcccggccccgaccccgtctgggaggtgaggagcgtctctgccccgccgccctctctgagaagtgaggagcccctccgtccggcagccgccccttccgggagggaggtggggggccagcccccgcccggccagccgccccgtccgggagggaggtggggggccagcccccgaccggccagccgccctgtccgggagggaggtgggggggtcagcccccacccggccagccccttctgggaagtgaggagcccctctgcccagccgccaccccgtctgggaggtgtacccaacagctcattgagaacgggccatgatgacgatggcggttttgtcgaatagaaaagggggaaatgtggggaaaagatagagaaatcagattgttgctgtgtctgtgtggaaagaggtagacataggagactccattttgttctgtactgggaaaaattcttctgccttgggatgctgttgatctttgaccttacccccaacccggtgctctctgaaacatgtgctgtgtccactcagggttaaatggattaagggcggtgcaagatgtgctttgttaaacagatgcttgaaggcagcatgctcgttaagagtcatcaccactccctaatctcaagtacccagggacacaaacactgcggaaggccccagggtcctctgcctaggaaaaccagagatctttgttcacttgtttatctgctgaccttccctccactattgtcctatgaccctgccaaatccccctcttcgagaaacacccaagaatgatcaataaaaaaaaaaaaaaaaaaaa

SEQ ID NO: 510 - DNA, 5415 bp, Homo sapiens
  source 1..5415: mol_type = other DNA
ctgagctttgaagagagcagtggttctcccagcacgcagctggagatctgagaacgggcagactgcctcctcaagtgggtccctgactcctgacccccgagcagcctaactgggaggcaccccccagcaggggcacactgacacctcacacggcagggtattccaacagacctgcagctgagggtcctgtctgttagaaggaaaactaacaaccagaaaggacatctacaccgaaaacccatctgtacatcaccatcatcaaagaccaaaagtagataaaaccacaaagatggggaaaaaacagaacagaaaaactggaaactctaaaacgcagagcgcctctcctcctccaaaggaacgcagttcctcaccagcaacagaacaaagctggatggagaatgattttgacgagctgagagaagaaggcttcagacgatcaaattactctgagctacgggaggacattcaaaccaaaggcaaagaagttgaaaactttgaaaaaaatttagaagaatgtataactagaataaccaatacagagaagtgcttaaaggagctgatggagctgaaaaccaaggctcgagaactacgtgaagaatgcagaagcctcaggagccgatgcgatcaactggaagaaagggtatcagcaatggaagatgaaatgaatgaaatgaagcgagaagggaagtttagagaaaaaagaataaaaagaaatgagcaaagcctccaagaaatatgggactatgtgaaaagaccaaatctacgtctgattggtgtacctgaaagtgatgtggagaatggaaccaagttggaaaacactctgcaggatattatccaggagaacttccccaatctagcaaggcaggccaacgttcagattcaggaaatacagagaacaccacaaagatactcctcgagaagagcaactccaagacacataattgtcagattcaccaaagttgaaatgaaggaaaaaatgttaagggcagccagagagaaaggtcgggttaccctcaaaggaaagcccatcagactaacagcggatctctcggcagaaaccctacaagccagaagagagtgggggccaatattcaacattcttaaagaaaagaattttcaacccagaatttcatatacagccaaactaagcttcataagtgaaggagaaataaaatactttatagacaagcaaatgttgagagattttgtcaccaccaggcctgccctaaaagagctcctgaaggaagcgctaaacatggaaaggaacaaccggtaccagccactgcaaaatcatgccaaaatgtaaagaccattgagactaggaagaaactgcatcaactaatgagcaaaatcaccagctaacatcataatgacaggatcaaattcacacataacaatattaactttaaatataaatggactaaattctgcaattaaaagacacagactggcaagttggataaagagtcaagacccatcagtgtgctgtattcaggaaacccatctcacgtgcagagacacacataggctcaaaataaaaggatggaggaagatctaccaagccaatggaaaacaaaaaaaggcaggggttgcaatcctagtctctgataaaacagactttaaaccaacaaagatcaaaagagacaaagaaggccattacataatggtaaagggatcaattcaacaagaggagctaactatcctaaatatttatgcacccaatacaggagcacccagattcataaagcaagtcctgagtgacctacaaagagacttagactcccacacattaataatgggagactttaacaccccactgtcaacattagacagatcaacgagacagaaagtcaacaaggatacccaggaattgaactcagctctgcaccaagcagacctaatagacatctacagaactctccaccccaaatcaacagaatatacatttttttcagcaccacaccacacctattccaaaattgaccacatagttggaagtaaagctctcctcagcaaatgtaaaagaacagaaattataacaaactatctctcagaccacagtgcaatcaaactagaactcaggattaagaatctcactcaaagccgctcaactacatggaaactgaacaacctgctcctgaatgactactgggtacataacgaaatgaaggcagaaataaagatgttctttgaaaccaacgagaacaaagacaccacataccagaatctctgggacgcattcaaagcagtgtgtagagggaaatttatagcactaaatgcctacaagagaaagcaggaaagatccaaaattgacaccctaacatcacaattaaaagaactagaaaagcaagagcaaacacattcaaaagctagcagaaggcaagaaataactaaaatcagagcagaactgaaggaaatagagacacaaaaaacccttcaaaaaatcaatgaatccaggagctggttttttgaaaggatcaacaaaattgatagaccgctagcaagactaataaagaaaaaaagagagaagaatcaaatagacacaataaaaaatgataaaggggatatcaccaccgatcccacagaaatacaaactaccatcagagaatactacaaacacctctacgcaaataaactagaaaatctagaagaaatggatacattcctcgacacatacactctcccaagactaaaccaggaagaagttgaatctctgaatagaccaataacaggctctgaaattgtggcaataatcaatagtttaccaaccaaaaagagtccaggaccagatggattcacagccgaattctaccagaggtacaaggaggaactggtaccattccttctgaaactattccaatcaatagaaaaagagggaatcctccctaactcattttatgaggccagcatcattctgataccaaagccgggcagagacacaaccaaaaaagagaattttagaccaatatccttgatgaacattgatgcaaaaatcctcaataaaatactggcaaaccgaatccagcagcacatcaaaaagcttatccaccatgatcaagtgggcttcatccctgggatgcaaggctggttcaatatacgcaaatcaataaatgtaatccagcatataaacagagccaaagacaaaaaccacatgattatctcaatagatgcagaaaaagcctttgacaaaattcaacaacccttcatgctaaaaactctcaataaattaggtattgatgggacgtatttcaaaataataagagctatctatgacaaacccacagccaatatcatactgaatgggcaaaaactggaagcattccctttgaaaactggcacaagacagggatgccctctctcaccgctcctattcaacatagtgttggaagttctggccagggcaatcaggcaggagaaggaaataaagggtattcaattaggaaaagaggaagtcaaattgtccctgtttgcagacgacatgattgtttatctagaaaaccccatcgtctcagcccaaaatctccttaagctgataagcaacttcagcaaagtctcaggatacaaaatcaatgtacaaaaatcacaagcattcttatacaccaacaacagacaaacagagagccaaatcatgggtgaactcccattcacaattgcttcaaagagaataaaatacctaggaatccaacttacaagggatgtgaaggacctcttcaaggagaactacaaaccactgctcaaggaaataaaagaggagacaaacaaatggaagaacattccatgctcatgggtaggaagaatcaatatcgtgaaaatggccatactgcccaaggtaatttacagattcaatgccatccccatcaagctaccaatgactttcttcacagaattggaaaaaactactttaaagttcatatggaaccaaaaaagagcccgcattgccaagtcaatcctaagccaaaagaacaaagctggaggcatcacactacctgacttcaaactatactacaaggctacagtaaccaaaacagcatggtactggtaccaaaacagagatatagatcaatggaacagaacagagccctcagaaataatgccgcgtatctacaactatctgatctttgacaaacctgagaaaaacaagcaatggggaaaggattccctatttaataaatggtgctgggaaaactggctagccatatgtagaaagctgaaactggatcccttccttacaccttatacaaaaatcaattcaagatggattaaagatttaaacgttaaacctaaaaccataaaaaccctagaagaaaacctaggcattaccattcaggacataggcgtgggcaaggacttcatgtccaaaacaccaaaagcaatggcaacaaaagacaaaattgacaaatgggatctaattaaactaaagagcttctgcacagcaaaagaaactaccatcagagtgaacaggcaacctacaacatgggagaaaatttttgcaacctactcatctgacaaagggctaatatccagaatctacaatgaactcaaacaaatttacaagaaaaaaacaaacaaccccatcaaaaagtgggcgaaggacatgaacagacacttctcaaaagaagacatttatgcagccaaaaaacacatgaagaaatgctcatcatcactggccatcagagaaatgcaaatcaaaaccactatgagatatcatctcacaccagttagaatggcaatcattaaaaagtcaggaaacaacaggtgctggagaggatgcggagaaataggaacacttttacactgttggtgggactgtaaactagttcaaccattgtggaagtcagtgtggcgattcctcagggatctagaactagaaataccatttgacccagccatcccattactgggtatatacccaaaggactataaatcatgctgctataaagacacatgcacacgtatgtttattgcggcactattcacaatagcaaagacttggaaccaacccaaatgtccaacaatgatagactggattaagaaaatgtggcacatatacaccatggaatactatgcagccataaaaaatgatgagttcatatcctttgtagggacatggatgaaattggaaaccatcattctcagtaaactatcgcaagaacaaaaaaccaaacaccgcatattctcactcataggtgggaattgaacaatgagatcacatggacacaggaaggggaatatcacactctggggactgtggtggggtcgggggaggggggagggatagcattgggagatatacctaatgctagatgacacattagtgggtgcagcgcaccagcatggcacatgtatacatatgtaactaacctgcacaatgtgcacatgtaccctaaaacttagagtataataaaaaaaaaaaaa

SEQ ID NO: 511 - DNA, 5739 bp, Homo sapiens
  source 1..5739: mol_type = other DNA
accacagtgccacaaagtcactgtagccagactgactgcctctctagattcctcttctctaagctcagcaactctgaaagaaaggcagcagccccactcagagcttatagataaaactcccatctccctgggacagagcacctgggggaagtggcggttgtgggcacagcttcagcagacataaatgttcctgcctgccagctctgaagagagcagcggatctcccagcagagtgctcgagctctgctaagggacagactgcctcctcaagtgggtccctgacccccctgccttctgatggggagatacctcccagcaggtgttgacagacacttcatacaggagagctccaactggcatctggcgggtgcccctctgggatgaagcttccagaggaaagagcaggcagcaatgttttgctgttctgcagcatctgctggtgacacccaggcaaacagggtgtggagtggacccccagcaaactccagcagacctgcagaagaggggcctgactgttagaagggaaaaaacagaaagcaatagcatcaacatcaacaaaaaggataactacgcaaaaactccatccaaaggtcaccaacagcaaagaccaaaggtggataaatccacgaagatgaggaaaaaccagcacaaaaaggttgaaaattccaaaaaccagaatgccacttctccaaaggatcacaactcctcaccagcaagggaacaaaactggatggagaatgagtttgacgaattgacagaagtaggcttcagaaggtgggtagtaacaaactcctccaggctaaaggagcatgttctaacccaatggaatgaagctaagaaccctgaaaaaaggttacaggaactgctaacaagaataaccagtttagagaagaacataaatgacctgatggagctgaaaaacacagcacaagaatttcgtgaagcgtacacaagtatcaatagctaaatcgatcaagcagaggaaaggatatcagagactgaagatcaacttaatgaaatgaagcgtgaagacaagattagagaaaaaagaatgaaaaggaatgaacaaagcagccaagaaatatgggactatgtgaaaagaccaaacctacatttgattgctgtacctgaaagtgacggggagaatggaagcaagttggaaaacacacttcaggatattatccaggagaacttccccaacctagcaagacaggccaacattcaaattcaggaaatacggagaacaccacaaagatactcctcaagaaaatcaacctcaagacacataatcatcagatacaccaaggttgaaatgaaggaaaaaatgttaagcacagccagagagaaaggttgcgttatctacaaaggggagcccatcagactaacattggatctctctgcagaaaccctacaagccagaagagagtgggggccaatattcaacattcttaaagaaaagaattttcaacccagaatttcatatccagccaaactaagcttcataagtgaaggagaaataaaatactttacagacaagcaaatgctgaggtattttgtcaccaccaggcctgccttacaagagctcctgaaggaagcactaaatatggaaaggaaaaaacagtaccagccactacaaaaacaaaccaaagtgtaaagaccatcgacactatgaagaaactgcatcaactaatgggcaaaaaacaccagctagcatcataattacaggatcaatttcacacataacaatattaaccttaaatgtaaatgggctaaatgccccagttaaaagaaacagactggcaaattggataaagagtcaagacccattggtgtgctgtattcagcagacccatctcacatgcaaagacacacatagactcaaaataaagtgatagaggaagatttaccaaggaaatggaaagcaaaaaaaaaaaaaaaaaaaaaggagtggttacaatcctagtctctgacaaaacagactttaaaccaacaaagatcaaaaaagacaaagaagggcattgcataataataaagggatctaatgcaataagaagaactaaccatcctaaatacatatgcacccaatataggagcactcagattcataaaacaacttcttagagacccacaaggagacttagactcccacacaataataatgggagattttaacaccccactgtcaatattagacagattaacaagacagaaaattaacaaggatattcaggacttgaactcagctctggagcatgtggacctaatagacatctacagaactctccaccccaaatcaacagaatatacagtcttctcagcaccacatcgtacttattctaaaatcaaccgcataattggaagtaaaacatgcaaaagaatggaaatcacaacaaacagtctctcggaccacagtgcaatcacgttagaactcaggattaagaaacacactcaaaaccacaaaactacatggaaactgaacaacctgctcctgaatgactactgggtaaataatgaatttaagggagaaataaagaagttctttgaaaccaatgagaaaaaagacacaatgtaccagaatctctgggtgctaaagcagtgtttagagggaaatttatagtactaaatggccacagaagaaagtgggaaagatctaaaattgacaccctaacatcacaattgaaagaattagagaagcaagagcaaacaaattcaaaaggtagtagaagacaagaaataactaagatcagagcagaactgaaggggatagagaacgaatgacccttcaaaaaatcaatgaatccaggagctgattttttgaaaagatcaacaaaataggtagactgctagccagattaataaagaagaagggagagaagaatcaaatatacacaataaaaaatgataaaggggagatcaccactgatgccacagaaatacaaactaccatcagagaatactataaacacctctatgcaaataaactagaaaatctagaagaaacagataaattcctggacacatataccctcccaagactaaaccatgaagaagttgaatccctgaatagaccaataacaagttctgtaattgaggcagtaattaatagcctaccaaccaaaaaaagcccaggaccagatggattcacagctgaattctaccagaggtacaaagaggagcaggtagcatcccttctgaaactactccaaacaatagaaaaagagggactcctccctaactcattttatgaggccagcatcatcctgatactaaatcctggcagagacacaacaacaacaaaaaaagaaaatttcaggccagtatccctgatgaacatcaatgcgaaaatcctcagtaaaataggggcaaaccgaatccagcagcacattaaaaagcttatccaccacgatcaacccagcttcatccctgggatgcaaggctggttcaacatactcaaatcaataaatgtaatccatcacataaacagaaccaatgacaaaaaccatatgattatctcaatagatgcagaaaaggccttcgataaaaattcaataccgcttcatgctaaaaacactcaacaaactaggtattgatggaacatatctcaaaataataagagctatttatgacaaacccatagccaatatcatactgaatgtgcaaaagctggacgcattccctttgaaaactggcacaagacaaggatgccctctctcaccactcctattcaacatagtattggaagttccggccagggcaatcaggcaagagaaagaaataaagggtattcagataggaagacaggagtcagattatctctgtttgcagatgatatgattgtatatttagaaaaccccatcatctcagccccaaaactccttaagctgataagcaacttcagcaaagtctcaggatacaaaatcaatatccaaaaatcacaagcattcctatacaccaataatagacagagagccaaatcatgagcaaactcccattcacaattgctacaaacagaagaaaacgtctaggcatacaacttacaagggatgtgaaggacctcttcaaggagaactaaaaaccactgctcaaggaaataagagaggacataaacaaatggaaaaacattctatgctcgtggataggaagaatcaatatagtgaaaatggccatactgcccaaagtaatttatatatttaatgctaatcccatcaagctaccattgactttcttcacagaattagaaaaaactactttaaattcatttagaaccaaaaaagagcccatatagccaagacaatcctaagaaaatgaacaaagctggaggcatcatgctacctgacttcaaactatactacaaggctacagtaaccaaaacaacaaggtactggtaccaaaacagatatatagaccaatggaacagaacagagccctcagaaataatgccacacatctacaaccatctgatctttgacaaacctgacaaaaacaagcaatgggtaaaggattccctatttaatgaatggtgctgggaaaactggctagccatatgcagaaagctgaaactggaccccttccttacaccttacacaaaaattaattcaaaatagattaaagacttaaacttaagacctaaaaccatgaaaaccctagaagaaaacctaggcaataccattcaggacataggcatgggcgaagacttcatgactaaaacaccaaaagcaacggtaacaaaagccaaaattgacaaatgggacctaatcaaacaaaagagcttctgcacagcaaaagaaactatcatcagagtcaacaggtaacctacagaacggaagaaaatttttgcaatctatccatccgacaaaggactaatatccagaatctacaaggaacgtaaacaaatttacaagaaagaaacaaacaaccccatcagaaagtgggggaaggatatgaacagacacttctcaaaagaagacatttatgtagccatcaaacatgaaaaaaagctcatcatcactggtcattagagaaatgcaaagcaaaccacattagagaaacgcaaatcatgccatttagaatggtgatcattcaaaagtcaggaaacaacagatgccggagagaatgtggacaaataggaatgcttttacactgttggtgggagtgtaagttagttcaaccattgtggaagacagtgcagcaattcctcaaggatctagaactagaaataccatttgacccagcaatcccattactgggtatatacccaaaggattataagttattctactataaagacacatgcatacgtatgtttattgcagcactattcacaatagcaaagacttggaaccaaaatgcccatcaatcttaggctggataaagaaaatgtggcacgtatacaccatggaatactatgcagccataaaaaagaatgagttcatgtcctttgtacggacatggatgaagctggaaaccatcattctgagcaaactattgcaaggacagaaaaccaagcactgcatgttctcattcataatgggagtttaacaatgagaacacatgggcacagggaggggaacatcacataccagggcctgttggggtgtggaggcaaggagagggatagcattaggagaaatatctaatgcagattacgggttgataggtgcagcaaaccaccatggcacctgtatacctatgtaacaaacctgcacattctgcacatgtatcccagaacttaaagtataa

SEQ ID NO: 512 - DNA, 228 bp, Homo sapiens
  source 1..228: mol_type = other DNA
gcctggccaacatggtgaaaccccatctttactaaaaataagcaccaaaaaaattagccaggcgtggtggcagccacctgtattcccagctactccagactctgaggcaggagactcacctgaacctgggagacagaggttgcagtgagccgagatcgcgccattgcactccagcctgggcgacagaatgaaactctcttaaaaataaataaataaataagaaagaaa

SEQ ID NO: 513 - DNA, 6025 bp, Homo sapiens
  source 1..6025: mol_type = other DNA
ggggaggagccaagatggccgaataggaacagctccggtctacagctcccagcgtgagcgacgcagaagacggtgatttctgcatttccatctgaggtaccgggttcatctcactagggagtgccagacagtgggcgcaggccagtgtgtgtgcgcaccgtgcgcgagctgaagcagggcgaggcattgcctcacctgggaagcgcaaggggtcagggagttccctttccgagtcaaagaaaggggtgacggacgcacctggaaaatcggatcactcccacccgaatattgcgcttttcagaccggcttaagaaacggcgcaccacgagactatatcccacacctggctcggagggtcctacgcccacggaatctcgctgattgctagcacagcagtctgagatcaaactgcaaggcggcaacgaggctgggggaggggcgcccgccattgcccaggcttgcttaggtaaacaaagcagccgggaagctcgaactgggtggagcccaccacagctcaaggaggcctgcctgcctctgtaggctccacctctgggggcagggcacagacaaacaaaaagacagcagtaacctctgcagacttaagtgtccctgtctgacagctttgaagagagcagtggttctcccaggacgcagctggagatctgagaacgggcagactgcctcctcaagtgggtccctgacccctgacccccgagcagcctaactgggaggcaccccccagcaggggcacactgacacctcacacggcagggtattccaacagacctgcagctgagggtcctgtctgttagaaggaaaactaacaaccagaaaggacatctacaccgaaaacccatctgtacatcaccatcatcaaagaccaaaagtagataaaaccacaaagatggggaaaaaacagaacagaaaaactggaaactctaaaacgcagagcgcctctcctcctccaaaggaacgcagttcctcaccagcaacagaacaaagctggatggagaatgattttgacgagctgagagaagaaggcttcagacgatcaaattactctgagctacgggaggacattcaaaccaaaggcaaagaagttgaaaactttgaaaaaaatttagaagaatgtataactagaataaccaatacagagaagtgcttaaaggagctgatggagctgaaaaccaaggctcgagaactacgtgaagaatgcagaagcctcaggagccgatgcgatcaactggaagaaagggtatcagcaatggaagatgaaatgaatgaaatgaagcgagaagggaagtttagagaaaaaagaataaaaagaaatgagcaaagcctccaagaaatatgggactatgtgaaaagaccaaatctacgtctgattggtgtacctgaaagtgatgtggagaatggaaccaagttggaaaacactctgcaggatattatccaggagaacttccccaatctagcaaggcaggccaacgttcagattcaggaaatacagagaacgccacaaagatactcctcgagaagagcaactccaagacacataattgtcagattcaccaaagttgaaatgaaggaaaaaatgttaagggcagccagagagaaaggtcgggttaccctcaaaggaaagcccatcagactaacagcggatctctcggcagaaaccctacaagccagaagagagtgggggccaatattcaacattcttaaagaaaagaattttcaacccagaatttcatatccagccaaactaagcttcataagtgaaggagaaataaaatactttatagacaagcaaatgttgagagattttgtcaccaccaggcctgccctaaaagagctcctgaaggaagcgctaaacatggaaaggaacaatcggtaccagccgctgcaaaatcatgccaaaatgtaaagaccatcgagactaggaagaaactgcatcaactaatgagcaaaatcaccagctaacatcataatgacaggatcaaattcacacataacaatattaactttaaatataaatggactaaattctgcaattaaaagacacagactggcaagttggataaagagtcaagacccatcagtgtgctgtattcaggaaacccatctcacgtgcagagacacacataggctcaaaataaaaggatggaggaagatctaccaagccaatggaaaacaaaaaaaggcaggggttgcaatcctagtctctgataaaacagactttaaaccaacaaagatcaaaagagacaaagaaggccattacataatggtaaagggatcaattcaacaagaggagctaactatcctaaatatttatgcacccaatacaggagcacccagattcataaagcaagtcctcagtgacctacaaagagacttagactcccacacattaataatgggagactttaacaccccactgtcaacattagacagatcaaccagacagaaagtcaacaaggatacccaggaattgaactcagctctgcaccaagcagacctaatagacatctacagaactctccaccccaaatcaacagaatatacatttttttcagcaccacaccacacctattccaaaattgaccacatagttggaagtaaagctctcctcagcaaatgtaaaagaacagaaattataacaaactatctctcagaccacagtgcagtcaaactagaactcaggattaagaatctcactcaaagccgctcaactacatggaaactgaacaacctgctcctgaatgactactgggtacataacgaaatgaaggcagaaataaagatgttctttgaaaccaacgagaacaaagacaccacataccagaatctctgggacgcattcaaagcagtgtgtagagggaaatttatagcactaaatgcctacaagagaaagcaggaaagatccaaaattgacaccctaacatcacaattaaaagaactagaaaagcaagagcaaacacattcaaaagctagcagaaggcaagaaataactaaaatcagagcagaactgaaggaaatagagacacaaaaaacccttcaaaaaatcaatgaatccaggagctggttttttgaaaggatcaacaaaattgatagaccgctagcaagactaataaagaaaaagagagagaagaatcaaatagacacaataaaaaatgataaaggggatatcaccaccgatcccacagaaatacaaactaccatcagagaatactacaaacacctctacgcaaataaactagaaaatctagaagaaatggatacattcctcgacacatacactctcccaagactaaaccaggaagaagttgaatctctgaatagaccaataacaggctctgaaattgtggcaataatcaatagtttaccaaccaaaaagagtccaggaccagatggattcacagccgaattctaccagaggtacatggaggaactggtaccattccttctgaaactattccaatcaatagaaaaagagggaatcctccctaactcattttatgaggccagcatcattctgataccaaagccgggcagagacacaaccaaaaaagagaattttagaccaatatccttgatgaacattgatgcaaaaatcctcaataaaatactggcaaaccgaatccagcagcacatcaaaaagcttatccaccatgatcaagtgggcttcatccctgggatgcaaggctggttcaatatacgcaaatcaataaatgtaatccagcatataaacagagccaaagacaaaaaccacatgattatctcaatagatgcagaaaaagcctttgacaaaattcaacaacccttcatgctaaaaactctcaataaattaggtattgatgggacgtatttcaaaataataagagctatctatgacaaacccacagccaatatcatactgaatgggcaaaaactggaagcattccctttgaaaactggcaaaagacagggatgccctctctcaccgctcctattcaacatagtgttggaagttctggccagggcaatcaggcaggagaaggaaataaagggtattcaattaggaaaagaggaagtcaaattgtccctgtttgcagacgacatgattgtttatctagaaaaccccatcgtctcagcccaaaatctccttaagctgataagcaacttcagcaaagtctcaggatacaaaatcaatgtacaaaaatcacaagcattcttatacaccaacaacagacagagagccagatcatgggtgaactcccattcacaattgcttcaaagagaataaaatacctaggaatccaacttacaagggatgtgaaggacctcttcaaggagaactacaaaccactgctcaaggaaataaaagaggagacaaacaaatggaagaacattccatgctcatgggtaggaagaatcaatatcgtgaaaatggccatactgcccaaggtaatttacagattcaatgccatccccatcaagctaccaatgactttcttcacagaattggaaaaaactactttaaagttcatatggaaccaaaaaagagcccgcattgccaagtcaatcctaagccaaaagaacaaagctggaggcatcacactacctgacttcaaactatactacaaggctacagtaaccaaaacagcatggtactggtaccaaaacagagatatagatcaatggaacagaacagagccctcagaaataacgccgcatatctacaactatctgatctttgacaaacctgagaaaaacaagcaatggggaaaggattccctatttaataaatggtgctgggaaaactggctagccatatgtagaaagctgaaactggatcccttccttacaccttatacaaaaatcaattcaagatggattaaagatttaaacgttaaacctaaaaccataaaaaccctagaagaaaacctaggcattaccattcaggacataggcgtgggcaaggacttcatgtccaaaacaccaaaagcaatggcaacaaaagacaaaattgacaaatgggatctaattaaactaaagagcttctgcacagcaaaagaaactaccatcagagtgaacaggcaacctacaacatgggagaaaatttttgcaacctactcatctgacaaagggctaatatccagaatctacaatgaactcaaacaaatttacaagaaaaaaacaaacaaccccatcaaaaagtgggcgaaggacatgaacagacacttctcaaaagaagacatttatgcagccaaaaaacacatgaagaaatgctcatcatcactggccatcagagaaatgcaaatcaaaaccactatgagatatcatctcacaccagttagaatggcaatcattaaaaagtcaggaaacaacaggtgctggagaggatgtggagaaataggaacacttttacactgttggtgggactgtaaactagttcaaccattgtggaagtcagtgtggcgattcctcagggatctagaactagaaataccacttgacccagccatcccattactgggtatatacccaaatgagtataaatcatgctgctataaagacacatgcacacgtatgtttattgcggcactattcacaatagcaaagacttggaaccaacccaaatgtccaacaatgatagactggattaagaaaatgtggcacatatacaccatggaatactatgcagccataaaaaatgatgagttcatatcctttgtagggacatggatgaaattggaaaccatcattctcagtaaactatcgcaagaacaaaaaaccaaacaccgcatattctcactcataggtgggaattgaacaatgagatcacatggacacaggaaggggaatatcacactctggggactgtggtggggtcgggggatgggggagggatagcattgggagatatacctaatgctagatgacacattagtgggtgcagcgcaccagcatggcacatgtatacatatgtaactaacctgcacaatgtgcacatgtaccctaaaacttagagtataataaaaaaaaaaaa

SEQ ID NO: 514 - DNA, 163 bp, Homo sapiens
  source 1..163: mol_type = other DNA
gtccaaggatttgggttctagttgccagcttgcatggtacaatcttgagtaagtctctcaacttctggatataggaaatcaaaggccccccaacagaatgaaaggtgttaaatcaggtcatcttgaatattcttcccagctctgttattttacaacgccatga

SEQ ID NO: 515 - DNA, 6416 bp, Homo sapiens
  source 1..6416: mol_type = other DNA
atgttggggaaccagccaggaggtaagcccaaagtttaggatttatttttctctttttcctctttctctcttcctttccaactcaggaccctcaggagatagcgcctatgcacagaggcaactgcaggtttgtggccagggctactctctggtgaaaacaaaaggtttctatgtggaagcgcctacccccaactgcccggcttgggtgagggaccaagtccttttctttttcagtctttcagcggccgtttcctagcagctccttagtaattgagggcaactggccaggaccactctctggtgttacctgaaggccaaggagtgaccggtgatagctgcctgcctggaagggggaagggctcttttccgtcttgtccagttatcatccctgaaccctccatgtgatgcagttggcagtggcagcccatccagggtgaactcatgtttcaggcgagttaaaccttgtttccttatgctaaattcttcccttcccctactcaactggctaaggacaagtcagagggtttgcgcagatggtttgtgtgtgtcatgcggggggattcataaaagggaatttatgtacaatttaatcttgcctaaatttagaaagttaaataattgttttaagtgggataggaaaaaatccaaaggtttgactgaaaattaatttctagaaatcaaggccttcatccagggacaagagggaaagttcatagtgggccatcagtggtggaggaaaccattccatagtggtgtcagatctaaggtcagagacgtccgacagactaagatggggccctaaagagggatgtcccccaggaccccagtcagggcccagaatttttccagggggatgacccgtgtaaaatttgggtcacctaatgggccctccactttccaaagtcctcttctcttttccagaccactataggcaactctccatcgattccacctgattcctctatgggccactctccatctatttcacctggtaccctgcttggctacatcctccaccattgaaatcaactttaccctgacaatctaaagagaaaatgtatgattctttttttctgcaatactgttttacctcattatgagctgctcagcccggaacagcgggtggtcaatggtggccttaattatgacaccatcctgcaattagacctattttgtaaaaggcagggcacatggtcagaaatcccatatgtacaggccttcatggcactatactgaaacccaataatcccctcaaaggaaagtccaaaggcagaactagatatagacaacccctttttacaagggccacctatctctcagggtgacagaaaccacccccatatagccccttgccaagtgctcctgaggctaaaaccacaacactggggaccctactaagtccccctcacacttggagaagaacaccatattcaactctcccgccagccctgctatcccttagggaagtagcaggagctgaggggccagtcctagtgcaggcccccttctctgtaactgatatacaacaatgtaaggaaaagcaaggaagctattccgagaatcccaggaaattcgcagatgggttccaaactttgaccttagcctttgatctctcatggagagatgttcaattcattctagcaacttgttgcacccctttggaaaaggaacgaatctttgaggctgcccgccaggaagcagacaacttatttgcccaaaaccctcagggcaatcacctgggcccagacacagtccccactactgaccctaattgggactataacacacctgtgggaatgaacaactgggctaaatttcttgaggctctccttggaggaatgaaaaagggaataactaaggcagtaaattatgataaagtgaggttacacagagcaaggaggaaaatccagccacattttatggcagactgaaggaagcctttaaaaaatatactaatctggacccttcctctcctgaaagcaaaatatcagtggcacatttcattcaccaatccaccccaaacattagacataagctccaaaagctacagatggggccccaaactaatcataatcagcttcttgataccacctttatggtgtataaccatcgtgatctggtggaaggaaaaagggaacagagtaaaaaaaaatagcaagccaaaagtatggcagccatcattggcaatgccctgaatgcccaaaaagcatccaagggaaacccaaagggccataaggatgatgccagaaagggctcttgcttcaagtgcaagaaaactgggaaatgggcaaaggactgtactactccccctccaggcccctgctgaaaatgtgagggcaccagttatgacccctggcactggaggattgattacctttgctcccaccaaggagcttcatcaggcaaaactctagctgtgcacaaggaggaatcagatgaagactgaaggggccccaggtcttcctcactgcccctgtccaggaatatcgtaattactactgagaagcccccggtaactctgtatgtcatgggcacccaaattcattttctttttgatacaagggcagattactctgttcttactgcttatacaggaaaactttcttcccggtccatgagtgttatgggaatggaaagaaagccataaaaaagattgtttactcctcctttgatttgtcaatttgagaaacaaatcttccaacaggaatttctagtagtaccaagatgcccagtccccccgttgggaagagatactatggttaaaataggggcactactacaatttaagcatcacctggtgaaattgctaatagtagaaaatacaatgtcccagaccacattaatgaacaggttaactcactagtatggtatgctgggaaactagggaaggccaaaacagcagtgccagtcaaaatatggcttaaagaccccagctattttcccaattgaaaacaatacgcaattaagctgcaagcaagaaaaggcctagcacccatagttgaggtattacttacccatgggctcttaaaaccttgcaattctccctgcaacacccccatcttaaccgttctaaagcttttggggaaatacagggtagtataggttctcagaataattaatgaggctgttatctctctccacccattgatgatggatctatataccctactggctcaggtaccaggggatgcaaaatggttctcagtcctacacctaaaagatgctttcttcttcattcctctggttccagagtcccaatacccttttgcctttgaatgggaaaatcctaataccagagaaaaacacttgggcagtgctcccctaaggcttttgggatagcccccacttctttgcccaacccttagagagggatctgaggggtctgcaattggaggatgggagtatactccagtatgtggatcaccttcttgtgtatagcccaacccaagaggcttctgaccaaaatactataaaaaccttacatttcccggctgacaggtcatacaaagtgtccaaaaagaaggctcagattactctccaacaggtccactgtttagggtacatcttaacacctggaacctgcaagtatccccagaacgagtgcaagccatatgtggtttgggcccctccaccccaagcagcagcttcattctttttggggaatggccaggttttgtggaatatgagtaccaaatttagggctcatagcaaagcccctgtatgaagcaacaaggaggcctgaaaatgagctaatggaatggaccctggaaatgagagaagcctgtgccaagctaaaataggcccttacccaggctccagctcttgggatcccagacctaactaagcccttcccttgtatgtagcagagacgaatggcatagctgtgggagtgctagtccagaaattaggatcagaacccagaccaaacacctacttttcaaagaagttggagagagtggccttgggatggccaagttgcctgtgggtaacagcagccattgctatgttagtggaggaagccactaaaatcaccctgagccaatcactggaagttctaaccccccatcaggtaaagtcagtcttagagataaaaggacacatctgggtgatgggggaaaggttaaccaaataccaggccgtgctcctagacaatccagatgtaacccttaaaacctgtaacactttgaatccagcttcattgatacccataggcccaatgacagatcattcctgcgagccagtcattgcacatgcatatgttagctggcctaatttaaaagatcagcctctcccagattctgaggacttgttcacagatggcagttctgtgtcaaatggggaacactgagctgtgtatgcaatagtcaatcacaacacccttatcgaagcccagccactgccccttggcacatcagcacaaaaggctgaaatcattgctcttacccgagcattaattttgggacaaaataaaaagcttaacatctatacagattctaaatatggcattccttgtggttcacgcttatgctgcaatctagaaagaaaggggactactagctagcaaaccctcccccataaagcatgggcctgaaattcttcagctattgtaaacaatacacctgccacaggccatagctataatccattgtagggggcatcaaagggacttaactcctatagcacaagggaacagaaaggttgatagagaagccaaagccacatccctcagggtgcaatcccaacagatcctagcactgattcctttctatgattcccagtggatcccaaatacacactacaggaagaacagttaataaaggagcaagtggggcaaaaaaaaaaaaaaaaaaaaaaagatcctggtggtatatgagatcaaaaatacatctgcctcaaacagcccaatggagaattataaaaaccctggatgactccttccatatggggagagatgccaccctggccatggttaacaggctcttcattgggcctaacttaacttcggtggttaagcaggcctgtcaagcctgctcactgtgtgcacttaacccaggaaacaaaatgcctcctctaatagaaccagaccagaggagaggaacttacccaggggaagactggtaattagacttcacccatatgccagcttgcagaggatacaagtttttgtgagtgctaatagatatctttactggttgggtcaaagcttaccctaccagaacagagaaggctaatgaggctataaagtttcccttaaaagaaataatcccccggtctgggttacctcagagcctccaaagtgataatggctcatcttttatctcccaaataactcaaggggttgctaaggctcttggaatcaaatactatttacattcagcatggaggcctcaatcctccaggaaagtagaaatggctaaccaaactctaaaatgagtgttagctaaactatgtcaggaaacatcaaaaacttgggtcagcttactgcctatagccctcttaaggatccgtaatacccctagagcaaaaattaatataaccccctatgaaatgttatatggaaggccattcttaactagtgatttaattactgatccagaaacagccagtttagcaagatacctagttaacttaagacaatttcagcaggctttacaaaagtttggaactcaaaggccccaccataccgggaactaaccagcaacccaaaatcaggctaagggataaggtacttgttaaaacatagaaggagggatcacctgctcaacaattgcaaccccaatggaagggaccgtttttagtggtactggctatgccttctatggtcaaggtactaggattagatagttggatacatctttcaaggatcaagtctgtgatacctgaagccagggaccaggagcctgaagtttccatcagacagtcaaaagacaagtaaatgcctaccaactttccttggtgtttttgttgcatagttactgtaggctggataatagcagccatgttctcagatttcttgcagtttaggtgctttctttcaaacgattggaatcacttcctttgtagtgactaagcagactgttgtaattcattcctataacaaacattcctgacagcataggtatccaccccctgaagttcccattaaatcttttaaccaaattcatttcctctcacctagagaccatcaagtttcagatgatcctgtgacaaggtttccagcctgttccaaatgaaggcagcacccctggccatcaagaaactacccagtctccactcgatagataaaggcaggagttcggggatccccaataggtagggactgcacctcaagtcagggtgacgcagttacagaagaaagaccatcagtcactctgtctcccataaagatttctggggatcatgtctctcgggggaaa

SEQ ID NO: 516 - DNA, 6019 bp, Homo sapiens
  source 1..6019: mol_type = other DNA
aagatggccgaataggaacagctccggtctacagctcccagcgtgagcgacgcagaagacgggtgatttctgcatttccatctgaggtaccgggttcatctcactagggagtgccagacagtgggcgcaggccagtgtgtgtgcgcaccgtgcgcgagccgaagcagggcgaggcattgcctcacctgggaagcgcaaggggtcagggagttccctttccgagtcaaagaaaggggtgatggatgcacctggaaaatcgggtcactcccacccgaatattgcgcttttcagaccggcttaagaaacggcgcaccacgagactatatcccacacctggctcagagggtcctacgcccacggaatctcgctgattgctagcacagcagtctgagatcaaactgcaaggcggcaacgaggctgggggaggggcgcccgccattgcccaggcttgcttaggtaaacaaagcagccgggaagctcgaactgggtggagcccaccacagctcaaggaggcctgcctgcctctgtaggctccacctctgggggcagggcacagacaaacaaaaaggcagcagtaacctctgcagacttaagtgtccctgtctgacagctttgaagagagcagtggttctcccagcacgcagctggagatctgagaacgggcagactgcctcctcaagtgggtccctgacccctgacccccgagcagcctaactgggaggcaccccccagcaggggcacactgacacctcacatggcagggtattccaacagacctgcagctgagggtcctgtctgttagaaggaaaactaacaaccagaaaggacatctacaccgaaaacccatctgtacatcaccatcatcaaagaccaaaagtagataaaaccacaaagatggggaaaaaacagaacagaaaaactggaaactctaaaacgcagagcgcctctcctcctccaaaggaacgcagttcctcaccagcaacagaacaaagctggatggagaatgattttgacgagctgagagaagaaggcttcagacgatcaaattactctgagctacgggaggacattcaaaccaaaggcaaagaagttgaaaactttgaaaaaaatctagaagaatgtataactagaataaccaatacagagaagtgcttaaaggagctgatggagctgaaaaccaaggctcgagaactacgtgaagaatgcagaagcctcaggagccgatgcgatcaactggaagaaagggtatcagcaatggaagatgaaatgaatgaaatgaagcgagaagggaagtttagagaaaaaagaataaaaagaaatgagcaaagcctccaagaaatatgggactatgtgaaaagaccaaatctacgtctgattggtgtacctgaaagtgatgtggagaatggaaccaagttggaaaacactctgcaggatattatccaggagaacttccccaatctagcaaggcaggccgacattcagattcaggaaatacagagaacgccacaaagatactcctcgagaagagcaactccaagacacataattgtcagattcaccaaagttgaaatgaaggaaaaaatgttaagggcagccagagagaaaggtcgggttaccctcaaagggaagcctatcagactaacagcagatctctcggcagaaaccctacaagccagaagagagtgggggccaatattcaacattcttaaagaaaagaattttcaacccagaatttcatatccagccaaactaagcttcataagtgaaggagaaagaaaatactttacagacaagcaaatgctgagagattttgtcaccaccaggcctaccctaaaagagctcctgaaggaagcactaaacatggaaaggaacaaccggtaccagccgctgcaaaatcatgccaaaatgtaaagaccatcgagactaggaagaaactgcatcaactaatgagcaaaatcaccagctaacatcataatgacaggatcaaattcacacataacaatattaactttaaatataaatggactaaattctgcaattaaaagacacagactggcaagttggataaagagtcaagacccatcagtgtgctgtattcaggaaacccatctcacgtgcagagacacacataggctcaaaataaaaggatggaggaagatctaccaagcaaatggaaaacaaaaaaaggcaggggttgcaatcctagtctctgataaaacagactttaaaccaacaaagatcaaaagagacaaagaaggccattacataatggtaaagggatcaattcaacaagaggagctaactatcctaaatatttatgcacccaatacaggagcacccagattcataaagcaagtcctgagtgacctacaaagagacttagactcccacacattaataatgggagactttaacaccccactgtcaatattagacagatcaacgagacagaaagtcaacaaggatacccaggaattgaactcagctctgcaccaagcagacctaatagacatctacagaactctccaccccaaatcaacagaatatacatttttttcagcaccacaccacacctattccaaaattgaccacatagttggaagtaaagctctcctcagcaaatgtaaaagaacagaaattataacaaactatctctcagaccacagtgcaatcaaactagaactcaggattaagaatctcactcaaagccgctcaactacatggaaactgaacaacctgctcctgaatgactactgggtacataacgaaatgaaggcagaaataaagatgttctttgaaaccaacgagaacaaagacaccacataccagaatctctgggacgcattcaaagcagtgtgtagagggaaatttatagcactaaatgcctacaagagaaagcaggaaagatccaaaattgacaccctaacatcacaattaaaagaactagaaaagcaagagcaaacacattcaaaagctagcagaaggcaagaaataactaaaatcagagcagaactgaaggaaatagagacacaaaaaacccttcaaaaaatcaatgaatccaggagctggttttttgaaaggatcaacaaaattgatagaccgctagcaagactaataaagaaaaaaagagagaagaatcaaatagacacaataaaaaatgataaaggggatatcaccaccgatcccacagaaatacaaactaccatcagagaatactacaaacacctctacgcaaataaactagaaaatctagaagaaatggatacattcctcgacacatacactctcccaagactaaaccaggaagaagttgaatctctgaatagaccaataacaggctctgaaattgtggcaataatcaatagtttaccaaccaaaaagagtccaggaccagatggattcacagccgaattctaccagaggtacaaggaggaactggtaccattccttctgaaactattccaatcaatagaaaaagagggaatcctccctaactcattttatgaggccagcatcattctgataccaaagccgggcagagacacaaccaaaaaagagaattttagaccaatatccttgatgaacattgatgcaaaaatcctcaataaaatactggcaaaccgaatccagcagcacatcaaaaagcttatccaccatgatcaagtgggcttcatccctgggatgcaaggctggttcaatatacgcaaatcaataaatgtaatccagcatataaacagagccaaagacaaaaaccacatgattatctcaatagatgcagaaaaagcctttgacaaaattcaacaacccttcatgctaaaaactctcaataaattaggtattgatgggacgtatttcaaaataataagagctatctatgacaaacccacagccaatatcatactgaatgggcaaaaactggaagcattccctttgaaaactggcacaagacagggatgccctctctcaccgctcctattcaacatagtgttggaagttctggccagggcaatcaggcaggagaaggaaataaagggtattcaattaggaaaagaggaagtcaaattgtccctgtttgcagacgacatgattgtttatctagaaaaccccatcacctcagcccaaaatctccttaagctgataagcaacttcagcaaagtctcaggatacaaaatcaatgtacaaaaatcacaagcattcttatacaccaacaacagacaaacagagagccaaatcatgggtgaactcccattcacaattgcttcaaagagaataaaatacctaggaatccaacttacaagggatgtgaaggacctcttcaaggagaactacaaaccactgctcaaggaaataaaagaggacacaaacaaatggaagaacattccatgctcatgggtaggaagaatcaatatcgtgaaaatggccatactgcccaaggtaatttacagattcaatgccatccccatcaagctaccaatgactttcttcacagaattggaaaaaactactttaaagttcatatggaaccaaaaaagagcccgcattgccaagtcaatcctaagccaaaagaacaaagctggaggcatcacactacctgacttcaaactatactacaaggctacagtaaccaaaacagcatggtactggtaccaaaacagagatatagatcaatggaacagaacagagccctcagaaataatgccacatatctacaactatctgatctttgacaaacctgagaaaaacaagcaatggggaaaggattccctatttaataaatggtgctgggaaaactggctagccatatgtagaaagctgaaactggatctcttccttacaccttatacaaaaatcaattcaagatggattaaagatttaaacgttaaacctaaaaccataaaaaccctagaagaaaacctaggcattaccattcaggacataggcgtgggcaaggacttcatgtccaaaacaccaaaagcaatggcaacaaaagccaaaattgacaaatgggatctaattaaactaaagagcttctgcacagcaaaagaaactaccatcagagtgaacaggcaacctacaaaatgggagaaaattttcgcaacctactcatctgacaaagggctaatatccagaatctacaatgaactcaaacaaatttacaagaaaaaaacaaacaaccccatcaaaaagtgggcgaaggacatgaacagacacttctcaaaagaagacatttatgcagccaaaaaacacatgaagaaatgctcatcatcactggccatcagagaaatgcaaatcaaaaccactatgagatatcatctcacaccagttagaatggcaatcattaaaaagtcaggaaacaacaggtgctggagaggatgcggagaaataggaacacttttacactgttggtgggactgtaaactagttcaaccattgtggaagtcagtgtggcgattcctcagggatctagaactagaaataccatttgacccagccatcccattactgggtatatacccaaaggactataaatcatgctgctataaagacacatgcacacgtatgtttattgcggcactattcacaatagcaaagacttggaaccaacccaaatgtccaacaatgatagactggattaagaaaatgtggcacatatacaccatggaatattatgcagccataaaaaatgatgagttcatatcctttgtagggacatggatgaaattggaaaccatcattctcagtaaactatcgcaagaacaaaaaaccaaacaccgcatattctcactcataggtgggaattgaacaatgagatcacatggacacaggaaggggaatatcacactctggggactgtggtggggtcgggggaggggggagggatagcattgggagatatacctaatgctagatgacacattagtgggtgcagcgcaccagcatggcacatgtatacatatgtaactaacctgcacaatgtgcacatgtaccctaaaacttagagtataataaaaaaaaaaaa

SEQ ID NO: 517 - DNA, 8583 bp, Homo sapiens
  source 1..8583: mol_type = other DNA
aaaagaaaggttgaactctttgagccgaatgcagacatcacatggtagtttctcgaatgcttctgtctagtgtttatgtgaagatatttccttttccaccattggcctcaaagctctctaaataaccttttccacattctaccaaaagagtgtttcaaaacttttcagtcaaaagaaagcttcaactctgtgagatgaatgctcacatcacagagaaacttctcagaatgcctctgtctggtttttatgtgaagatattaccataggcctcaaagcgctccaaatatccatttgcagatactacaaaagactgtttccaaattgctcaatcaaaggaaaggttcaactctgtgagtttaatgcacacatcacaacgaactttctaagaatgcttctgtctagtttttatgtgaagatatttccttttccactataggcctcaaagtgctccaaatatccaattgcagacactacaaaaagactgtttccaaactgctcaatcaaaagaaaggttctactctgtgagatgaatgcacacatcagaaagaagcttttcagaatgtttgtgtctagtttttaagtgaagatatttccttttccatcctaggccttaatgtgctccaaatatccactggtagataccacaaaaagattgcttaaaaattgctgaatcaaaagaaagtttcaactccgtgagatggatgcacacatcacaaacaagtttctcagaattcttctgtctagtttttatgtgaagatatttccttaccaccataggcctcaaagcactcaaactgtccacttgcagattctacaaaaaaagagtttcaaaactgctcaatcaaaagaaagggttaactctgtgcaatgaatgcacatatcacatagaagtttctgagattgcttctgtctagattttacatgaagatatttcattttctaccataggccacaaagcgcaccaaatgtccacttgcagattctaccaaaagagtgtttccaaacagctcaatcaaaagaaaggttcatctctgtgaggtgaacgcacacattacaaagaagtttctcagaattcttgtgtctagtttttatgtgaagacatttccttttccaccatgggcttcaagtctcttgaaatgtccacttgcagattctacaaaaagattatttcaaaactggtccttcaaaagaagggttcaactctgggagatgaatgcatacatcacaaagaattttctcagaattctcatatctagtttttatgtgaagacatttccttttccactataggcctcaaagcgttccaaatgtgcacttgcagattctacaaaaagagagtttcaaaactgctcaatcaaaagaaaggtttaactctgtgagatgaatgcacacatcacgaacaagtttctcagattgcttctgtctagattttatatgaagatatttccttttctaacataggctgcaaagcactccaaatgtccacttgcagaatctacaaaaagaaagtttcaaaactgctcaatcagaagaaaggtttaactctgtgggatgaatgcacacatcacaaagtagtttctcagattgcttctgtgtagtttttatgtgaagacacttcctttttttccataggtctcaatgcactccaaatgtccacttgcagatcctacaaaaagagagtttgaatattgctcaatcaaaagaaagatttaactctttgagataaatgctcacatcacaaagaagtttctgagattgcttctatctagattttatatgaagacatttccatttctaccagaggatgcaaagcgcaccaaatgtccacttgcagattctacaaaaaaagtgtttccaaactgctcaatgaaaagtgagtttcaactctgtgagatgaatccacacatcacaaacaagtttgccagaatacttctgtctagtttttctgtaaagatatttccttttccaagataggcctcaaagtgctccaaatgtgcacttgcagattgtacaaaaggagtttttcaaagctgctcaatcaaaagaaaggttcaactctgtgaaatgaatgcacacttcacaaagaagtttgtcagaatgcttctgtctagttattatgtgaagatatctcattatccaccataggcctcaaagtgctccaaatgtccactggcagattctacaaaaagtgtgtttcaaagctgctcaaccaaaagaaagtttcatttctgcgagatgaatggacacatcacaaagtagtttctcagaatgcttctgtctagtttttatgtgaagatatttccttttcaatcacaggccacaaagcgcttcaaatgtccacttgcagattctacaaaaagagtgtttcaaaactactgaatgaaacgtttcaacgctgtgagataaatacacacatcacaaagaagtttgtcagaatgcttttgtctagtttttatgtgaatatatttcctgttccaccgtaggcctcaaagcgctccaaatgtccacttgcagattctgcaaaaagagtgtttcaaaactgctcaatgaaaagtgaggttcaactctgtgagattaatgcacatgtaagaaagaagtttgtcagaatgcttctgtctagtttttatgtgaatatattttcttttccaccatagacttcgaagtgctccaaatgtccacttgcagattctacacaaagagagtttcaaaactggtcaatcaaaagaaaggttcaagtctgtgagatgattgcacacatcacaaagaagtttgtcagaatgcttctgtctggtttttatgtgaagataattccttttccaccacaggcctcaaagcactacaaatgtccacttgcagattctacaaaaagagggtttcaaactgctcaatcaaaagtaagtttcaattcgaagaaatgaatgcacacatcacaaagaagtttgtcagaatgcttctgtctaggttttatttgaagatatttccttttccaccataggccacaaagtgctccaaatgtccacttgcagattctacaaaaagactgtttcaaagctgctcaatgaaaagtaaggctcaactctgggacatgaatgcacatatcaaaaagtagtttctcagaatgcttctgtctagtttttatgtgaagatagttccttttccaccatagacctcaaagtgctccaaatgtccacttgcagatatttcaaaaagagtttttcaaagctgctcaatcaaaagaaaggttcaactctatgaaatgaatgcacacatcacaaagaagtttgtcagaatgcttctatctagttattatacgatgatatttcgttatccaccataggccccaaagtgctccaaatgtctacttgctgattctacaagaagtgtgtttcaaagctgctcaatcaaaagaaagtttcaactctgcatgatgaatgcacacatcacttagaagtttgtcagaatacttttgcctaggttttatgtgaagatatttcctcttccaccataggccacaaagcacttcaaaagtccacttgcggattctacaaaaagagtgtttcaaaactgctgaatgaaatttaagtttcaatgctgagagattaatgcacacttcacaaagaagtttgccacaatgcttctgtctagtttttatgtgaagatatttcattttccaccataggcctcaaagcgctccaaatatccacttgcagattctacaaaaagagttattcaaagctgctcaatcaaaacaatgtttcaactctgtgagatgaatgcacacatcacaaagaagtttgtcagaatgcttctgtctagtttttatatgaagatatttccttttccaccataggccttaaagcgctccaaatgtccacttacagattctacaaaaagagtgtttcaaagctactcaatcaaaagaaagggtcaacactgtgagatgaatgcccacatcacaaaggagtttgtcagaatgcttctgtctagttttcataagaagatatttccttttccaccataggccacaaagcgctccaaatatccactttcacattctacaaaaacagtgtttcaaaactgctcaatgaaaagtaagtttcaactctttgagatgaattcaaacatcacaaagaagtttgtaagaatgcttctttctaatttttatgtgaagatctttccttttcccccatgaatagtgaggttcaactatgtgaggtgaatgcacacatcacaaagaagtttgtcagaatgcttctgtctaatttttatgtgaagatatttccatttccaccataggcctcaaagtgctccaaacatccacttgcagattcttcaaaaagagtgtttcaaagctgctcaatcaaaagaaagtttcaagtctgtgagatgaatgctcacatcacaaagaagtttgtcagaatggttctgtctagtttttatgtgaagatatttccttttccaccacagccatcaaagcgctccaaatgtccactcgcagattcttcagaaagagtatttcaaagctgttaagtgaaaagtaagtttcaaagctgtgagatgaatgcacacatcacaaagtagtttgtcagaatgcttctgcctagtttttatgtgaagatatttccttttcgaccataggcttcaaagcactcaaaatgtcctcttgcagattcttcaaaaagagtgtttcaaaacttctcaatgaaaagtgagtttcaactctgtgagatgaatgcacacatcacaaagaagtttgtcagaatgcttctgtctagtttttatgtgaagatatttccttttccccagtatgcctcaaagggctccaaatatccacttccagattctagaaaaagagtttttcaatgctgctcaatcaaaagaaaagtacagctctgtgagatgaatgcacacatcacaaagaagtttctcagaatgcttctgtctagttattatatgaagatatttcgttatccaccataggcctcaaagcactccaaatgtccacttccatattctacaaaaagagtgtttcaaaactgttcaatgaaaattaagtttcaaagctgtgagatgaatgcacacatcacaaagaagtttgtcagaatgcttctgtctagttcttatgtgaagatatttccttttccaccagaggtctcaaagtgctccaaatgtccacttacagattccagaaaaagagtatttcaaagctgctccatcaaaagaaagtttcaattctgtgagaggaatgcacacatcacaaataagtttgtcagaatgcttctgtctaatttttatatggaaatatttccttatccaccataggcctcaaagtgctccacacgtccacttgcagattctacaaaaagagtttttcaaagttgctcaatcaaaagaaaggttcaactctgtgaaatgaatgcacacatcacaaagaagtttgtcagaatgcttctgtctagtcattatatgaagatatttcgttatccaccacaggcctcaaaaagctccaaatatccaattgaagattctacaaaaagagtgtttcaaaactgctcaatgaaaagtgaggttcaaccctgcgagatgaatgcacacatcacaaagtagtttgtcagaatgcttctgtctagtttttatgtgaagatatttccttttccaccataggtcacaaagtgctccaaatgtccacttgcagattctacaaaaagagtgtttcaaagctgttcaatcagaagaaagattcaactctgtgagatgaatgcacaattcacaaagaaattgtcagaatgcttctgtctagtttttatgtgaagctatttccttttccaccataggcctcaaagcgctccaaaagtccacttgcagattctacaaaaagagtgtttcaaagctgctcaatcaaaagaaaatttcaactgtgtgagatgaatacatacaccacaaagaagtttgtctgaatgcttctgtctagtttttctgtgaagatacttccttttccaccacatgcctcaaagtgctccaaatatccacttacagattctacaaaaagagtgtttcaaagctgctcaatcaaaacaaagtttgaactctgtgaaatttggagtgctttgaggcctatggtgcaaaaggaaaagtcttcacataaaaactagacagaagcattctgacaaattactatgtgctgtgtgcattcatcacacagagttgaacctttcttttgattgaggagttttgaaactctctttttgtagaatctgccagtggacatttggagcgctttgaggagtattggggaaaaggaaatagcttcacataaaaactagacagaagcattctgatgaccttctttctgatgtgtgcattcatttcacagagctgaacatttcttttgcttgagcagttttaaaatactctttttgtagaatctacaattcgacatttggagggctttgtgacctatgttggaaaaggaaatatattcacataaaaagtatacagaaacattctgaaaaacttctttctgatgggtgcattcatctcacagagtgaacatttcttttcgttgagcagttttcaaacaccctttttgtagaatctacaagtgtacatttggagcgctttgaggccaatggtggaaaggaaaatatcttcacataaaaactagacaaaatcattctgagaaaattctttgtgatgtgtgcattcatctcacgcacttgaaactttcttttgattgagcagttttgtaacactctttttgtagaatctgcaagtggacatttggagcactttgaggcctctggttgaaaaggaaatatcttcacataaaaactagacagaagaattctgaagaacttctttgtgatatgtgcattcatctcacagagttggaccttacatttgattgaacagttttgaaacaccctttttgtactatctgaatatggatatttggagtactttgaggcctatggtggaaaaggcaatatcttcaaataaaaactagacagaagcattctgacaaacttctttgtgatatgtgcattcatgtcacagagttgaacctttcttttgattgatcagctttgaaacacttttttttgtggaatctgcaagtggacatttgaagcactgtgaggcctatggtggaaaaggaaatatcttcgcttaaggactagacagaagcattctgagaaacttctttgtgatgtgtgcattcatttcacataattgaaactttcttttgattgaggtgttttgaaaccctctttttatagaatctgcaattggacatttcgagggatttcctatgttggaaaaggaaatattttcacataaaaactggacagaatcattctgagaaatttctttgtgatgtgtgcatgcatctcacaaagttgaacctttctttcgattaagcagttttgaaacactgtttttgtagaatctgcaagtgtatgtttggagagcctggagtcccatggtggaaaaggaaatatcttcacaaaaaactagacggaatcattgtgagaaaacgctttgtgttatgttcatttatctcacagagttgaaccttacatttgattgagcagttttgaagcaccctttttgtactatctgcaggaggacatttggagtgctttaaggcctatggtggaaaaggaaatatcttcacataaaaactacacagaatcactcagacaaaattctttgggatgtttgcattcctcccactgaattgaacctttcttttgattggagtagtttgtaaactctctttttctagaatctgcaggaggacatgagacttaaggagtgctttgaagcctatggtggaaaaggaaatatcttcacttaagaactagacagaagcattctgagaagcttctttgtgatgtgtgcattcaactcacagagttgaacttttcttttgtttgaggtgttttgaaacacactttttgtagaatctgtaagtggacattcggagtgctatgaggactttagtggaaaaggaaatatcgtcgcaaaaaaactaggcagaagaattctgataaatttctttctgctgtgtacattcatctcacagacctgaacctttcttttttttgagcagcttggaaacactctttttgtataatctgcaagtggatatttggagcactttgtggcctattgtggaaaaggaaatatcttcacataaaaattagacagaagcattctgagaaacttctttgtgatgtgtgcattcatctgacagagctgaaccgttcttttgattgagcagttttgaaacactctttttgtggaatctgcaagtggatatttggagctcttgaggcctattgtggaaaaggaagtatcttcacataataaccagacagaagcattctgagaaacttctttgtgatgtgtgcattcatctaacagggttgaaactttcttttgactgagtagtttggatattgtcttttaatagattctgcagagggaaccttggagcacattacagcttcctgagtataaggaaatatcctctcataaaaactaaacagaagcattctgagaaacaactttgtgatgtgt

SEQ ID NO: 518 - DNA, 15934 bp, Homo sapiens
  source 1..15934: mol_type = other DNA
aaataataagagctatctatgaaacttctttgtgatgtgtgcatttatctcacagagttgaacctttcttttgattgggcagtttggaaacagtctttttgtagaatctgtaaagtgatatgtttcagcggtttgagtcctatggtgaaaaaggagatatcaaaaaataaaatgtagacagcagctttctgaaaaacttctttgtgatgtgtgcattcatctcacagggttgaaactttcttttgattgagcagtttggaaacagtcttttcatagaacatgcaaagtgatatttgtgaactgtttgaggcttatggtgaaaaaggaaatatcttcacataaaaactagactcatgttttctgggaaacttctttgtgatgggtgtatgcatctcaaagagttgaatctttgttttgattgagcagtttggaaacactctttttggagaatctgcaaagggatgtttttgagtggtgtgaggcatgtggtgaaaaaggaaatatcttcatataaaaactagacagaaacattatgataaatcactttgtgatgtgtgcattcatctcacagagttgaattttctttcattgagcagtttggaaacagtctttttgtagaatatgcaaagggatatttgtgagctttttgaggcctattgtgaaaaaggaaatctccacaaataaaatctagacagaacccttctgagaaacttctttgtgatgtgtgtgttcatcacacagaattgaacctttcttttgattgagcagtttggaaacagtcttttcatagaatctgcaaaggaaaatttgtgaacgctttgaggctcatggtgaaaaagaagtatcttcacataaaaactagacagaaaccttctgagaaacttctttgtgatatgcactttcatctcacacagctgaactttcgtttgattgagcagtttggaaactgtcctttagtagaatctgaaaacggttatttatgagcagtttgaggcctacggtgaaaaacggagtatcaacaaataaaacctagacagaaactttctgagaaacttctctctgatgtgtgcatccatctcacagagtaaaaactttctttgattgagcagtttggaaacagtctttttgtagaatctgcaaagggatatatgtaggcagtttcaggtctatcatgaaaacggaaatatcttcacataaaaactagacagaaggtttctgagaaaattctttgagatgtgctcattcatctcacagatttgaagtgttcttttcattgaccagcttggatagagtctttttgtagaatctgctttgtgatatttgtgagccctttgaagcctatggtgaaaaaagaaatatcttcacacaaaaactagacagaagtttctgagaaacttcgttgtgatgtgtgcattcatcccaaagagttgaacctgtctttggattaagcagtttggaaacagtcctttgtagaatgtacaaagggatatttgagatccctttttggcctatggtgaaaaaggaaatgtcttcacataaaaactagacagaagcattctgagaaacttctttttgatctgttcattcttctcacagagttgaacctttctttagatagagcaggttggaaaatgcctttttgtagaatctgcaagttgataatttgaatgctttgagacttacggtgaaaaaggaaatatcttcacataaaaactggatggaagctttctagaaacttctttgtgatgtgtgcattcatctcaaagagttgaagctttgtttcagttgagcagtttgggaacagtctttttgtaaaatctgtaaagggacatttgtgagcactttgaggcctatattgaaaaaggaagcatcttcaaataaaaactagacagaagctttctgagaaacttctttgtgatgtgtgcattcacctcacagagttgaccctttcttttgattgagtagtttggaaacactctttttgtagaatctgcaaagggttatttatgagtggtttgaggcctatggtgaaaaaaagagtatcagcaaataaaaactagacagaaactttctgggaaaattctctgtaatgtgtgcattcatctcacagcgtggaagctttctttgattgagcaggttggaaatagtctttttgtagaatctgcaaagggatatatgtgggtggtttgaggtctatcgtgaaaatggaaatatcttcacataaaaactaactgttcaatgggaagaaacttttacttgagtgtgatgaatgcacacgtcacaaaggagttactcagaaaacttctttctacttttaatgtgaagatatttcctttttcaccatatgcctcaacacactcccagatatccctttgcagattctacaaaaagactgtttccaaactgctcaataaacagaatggttcaaccctgtgagacgaatgtgcacatcacaaagaagtttctcagaaaacttccttctcgtgtttatgtgaagatatttccttttttaacataggcctcaattcactctcaaatatacctttgcagaatctacaaaaagactgtttccaaagtgctcaatcaaaagaaagtttcaactctgtgagatgaatgcacacatcagaaagtagtttctcagcaagcttctcactagtttttatgtgaagatagttcctttttcaatgtgggtctcaaagcactcaaaaatatccctttgcaaactctagaataacagagtttacaaactgctcaatgaaaagaaacgtttacctctgtgagatgaatacacatatcttaaagcagcttctcagaatgcttctttctagtttttatgtgaagatatttcctttttcaccataggcctcaatgcactcctaaatatccctttgcagattgtacaaaaagactgtttccaaactgctcaatcaaaagaaatgttaaactctatgagataaatgcacacatcacaaaaagtttctcagaatacttttttctagtttttatgtgaagttaattccttattcaccataggcctcaaagcactacaaatatccctctgcagattctacaaaaagactgtttgcaaactgctcaatccaaagaatgtttcaactctgtgagatgaatgcacacaccacaaagaagtttctcagaaactttctttatggtttttctgtgaagatatttcctttttcaccataggcctcaaagccctcacaaatatccctttgcagattctacaaaaagactgtttccaaaccgctcaataaaaataattattgaccactgtgagatgaatgcacacagctcaaagaagtttctcagaatccttcagtctgatttttatatgaatatatttccttttaaggcctcaaagcactccaaatatccatttgcagattttacaaaaagactgtttccaaatggctcaatcaaaacaaaggttcaactctgtgtgatgaatgcacacatcatgaaaaagtttctcagaatgcttctgtctagattttatgtgaagatacttgctttttcaccataggcctcaaagtgctcacaaatatccctttacagattctacaaaaatactttttccaaattgctcaatcaaaagaaaggttcaactctgtgagatgtatgcacaccacaaagaggtttctcagaaagcttctctctagtttttatgtgaagatatttcctttttgaccataggcctccaagtgttcacaaatatccctttgcagattctacaaaaagactctttacacattgctcaatcaaaagaatatttcaactctgtgacgtgaatgctcacatcaccaggatgtttctcagaaagcttctgtgtagtttttatgtgaagatatttccttcttcaccatacgcctcaaagggctcacaaatatccctttgcagattttacaagaaaagagtttccaatcttctcaatgaaaagagacacatctgggagatgaatgaacatatgacaaagcagtttctgagaaacattctgtctagtttttatgtgaaggtatctcctttttcaccacaggatgcaaagcgctcaaaattgttgctttgcagaatctacaaaaacattgtttccacactgctcatcaaaggaaaggttcgcatctgtgagatgaatgcatgtgtcaaaaagaagtttctcagaaagcttctattaagttttcatgtgaatgtttcctttttcaccatgagcctcaaagtgctcacaaatatccagttgaggaatatttaaaaagactgtttccaaaccgctcaaccaaaaacaaaaggttgaactgtgtgagatgaatgcacacatcacaaagaagtttctcagaaactttctttatagtttttctgtgaagatatttcctttttcaccataggcctcaaagccctcacaaatatcgctttgcagattctacaaaaacactgcttccaaaccactcaataaaaagaattattgaactttgtgagatgaatgcacacatctcaaagaagtttctcagaaaccttcagtctggtttttatgtgaatatatttcctttttcaccataggcctcaaagtgctccaaatatccatttgcaggttctacaaaaagactgtttccaaacggctcaatgaaaagaaagtttcaagtttgtgagatgaatgcacacatcactgagaagtttcacaggaagcttctgtctaatttttatatgaagacatttcctttttcaccataggcctccatctgttcacaaatatcccttagcagattctacaagaacagaatgtccagactgatcaaagaaaacaaacgtctttctctgtgagatgaatacacacatcacaaaactgtttctcagaaaccttctttatactttttatgtgatgatatttcttttttctccctaggacaaaaagcactcaaaaatatccctttgcagattctacaaaaagattgtttccaaactgctcaatcaaaaaaatagttcaactccatgaaatgaatgcatacatccaaagaagtttatcagaaaccttctttatagtttttatgtgaagatatttcctttttcaccataggcctcaaaatgctcagcaatattcccttgcagattctgcaaaaagactgcttcccacctgctcaatcaaataaatgtttaaactctgtgagacggatgcacacattacaaagaggtttctcagaaatcttctgtccattttttatgtgaagatatttcttttttcaccatagcactcaaagttctgacaaatatcccttgcagattccacaaacagaccgttttcatactgctcaatcaaaagtaagtttcatctttgtgagatgaatgcccacatcacatagagatttctcagaaagcctctctctaatttttatgtgaagatatttcctttttcaccataggcctcaaagcactcacaaatatccctttgcagactctacaagaacagtttccagactgaccagagaaaagaaacgtttacctctgtgagatgaatgcatatatcacaaagctgtttctgagaaaccttgtttatactttttatgtgaatatatttcctttttcaccataggtctcaaagcactcataaatatccctttgcagattctacaaaaagactgtttccaaactgttcaatcaaaagaatggttgaactctgtgagatgaatacacacatcacaaagaagtttctcagaaagcttctgtctagtttttatgtgaagatatttcctatttcatcataggtctcatagctctcaaaaatatgcctttacagattctacagaaataccgtatccaaattgctcaatccaaaaagaggttcaaatctgtgagatgaatgcacacaacacaaggaggtttctcagaaaacttctctctagttttcatgtgaaaatatttccttttccaccataggcttcaaagcatcacaaatattcctttgcagattctacctaccaaaatactgtttacaaactgctcaatcaaaagaatgtttcaactctgtgagatgagttctcacatctccaagatgtttcacagaaagcttctgtctagtttttacttgaagatgattcctttttcaccatacacctcaaagcactgacaaatatccttttgcagattttacaagaacagaatttccaatctgctcaaaggagagaaattgttacctctgtgagatgaaagcacacatcgcaaagcagtttctcagaaatattctgtctagtatttatgtaaagataattcctttttcaacacaggacacaaagcgttaactaataaccctttggaaattctgcaaaatactgtttccaaattgctcatcaaaagaaaggttcatctctgtgggatgaatgatgaatgcatatatcaaaaagatgtttctcagaaagcttctatcttgtttttatgtgaatgtgtttcctttttcaccatgggcctcaaagtgctcaaaaatatccctttgcagatcccaaaaaaagactgttttcaaactgctgagtgaaaggaatggttcaactctatgagatgaatgcacacatcacaaagaagtttctcacaaaccttctttatagtttttatgtgaagatattaccttttaaccatagaactcaaagcactcacaaatatacctttgcagattctacaaaaagacagtttcccaactgctcaatcaaaagaattgttgaactctgtgagatgaatgcatacatcacaaagcagtttctcagaattctttagtctagtttttatgtgaagatattttctctttcaccataggcctcaaagtgctcagaaatatccctttacagattccacaaaaagacatttccaaactgctcaatcaaaagaaagtttcaattttgtgagataaatgcacacatcaccaagaagtttctcagtatgcttctgtctagtttttatgtgaagacaattcctttttcaccatagggctctatgcactcacaaataccccttagcagattctaaaacaacagagtttcccaaatgatcaaagaaaagaatcgtttacctctgtgagatgaacacagacatcacaaaactgtttctcagaaaacttctttatagttttctgtgaagataccactttttctgcataggcctcaaagtgctcacaaatatccgtttgcagattctgcaaaaatactgtttccaaactgctgaatcaaaagagaggttcaaaactgtgagatgaatgcacatatcacaaagaagtatttcagaaactttccttatactttgtaggtgaagatatttcctttggcaacataggcctcaaagtgatcaaaaataacccttttcagattgtacaagaacagagttcccagcctgatcaaagaaaagaaatgcttacttctgtgagatgaatgcacacatcacaaggctgtttttaggaaacctgcttcacagttgttctgtgaagatacttcctttcccaccataggcctcacagcattccaaatatccacttgcagattctacaaaaagagtgtttccaaactgctcaatcaaaggaaaggttgaactctgtgagatgaatgcaaacatcacaaagaagtttctcataatgcttctgtctaatttttatgttaaggtatttccttttccaccataggcatcaaagtgctccaaatatccacaagcagatacgacaaaaagactgtttccaaactgctcaatcaaaagtgtggttcaactctctcagatgaatacacacatcactaagaattttctcagaatgcttctgtctagtttatatatgaagatatttcctttcccaacataggcatcaaatcacctcaaatattcacttgcagattctacaaaaagaggatttcaaaactggtcaatcaaaagaaagttggaactcagtgagatgaatgcacacatcacaaagaagtttctcagaatgcttctatctagtttttatgtgaagatatttccttttccactctaggccgcaaagcgctccatatatgcaattgcagatcctgcaaacagacagtttcaaaactgctcaatcaaaagaaaggttcaagtctgtgagttcaatgcacacatcacaaagaagtttctcagaaggcttctgtctcgtttttatgtggagatatttccttttccaacattgggctaaaagcgacacaaatatccacttgcagattctacaaaaagagtatttcaaaaatgctcaatcaaaagaaaggctcaacactgtgagatgaatgcacacatcacaaagcagtttctcagaatgcttctgtcgagtttttatgtgaagatatttccttttccactagagtccacaaagcactccagatatccaatttcagattctacaaaaagagtgtttaaaaactgctcaaacaaaagaaagtttcaactctgtgagttgagtgcacacagcacaaataagtttctcagattgtttctgtctagattttatgtgaagatattcccttttccaccataggccccaaagcgcaccaaatatccacttgcagattctacaaaaagtatgtttcaaaactcctcaatcaaaagaaaggttcaactctgttaggtgaatgcatacatcacaaagaagtttctcagaatgcttctgtctagtttttatgtgaagacaattcctttttcaccatagggctctatgcactcacaaataccccttagcagattctaaaacaacagagtttcccaaatgatcaaagaaaagaatcgtttacctctgtgagatgaacacagacatcacaaaactgtttctcagaaaacttctttatagttttctgtgaagataccactttttctgcataggcctcaaagtgctcacaaatatccgtttgcagattctgcaaaaatactgtttccaaactgctgaatcaaaagagaggttcaaaactgtgagatgaatgcacatatcacaaagaagtatttcagaaactttccttatactttgtaggtgaagatatttcctttggcaacataggcctcaaagtgatcaaaaataacccttttcagattgtacaagaacagagttcccagcctgatcaaagaaaagaaatgcttacttctgtgagatgaatgcacacatcacaaggctgtttttaggaaacctgcttcacagttgttctgtgaagatacttcctttcccaccataggcctcacagcattccaaatatccacttgcagattctacaaaaagagtgtttccaaactgctcaatcaaaggaaaggttgaactctgtgagatgaatgcaaacatcacaaagaagtttctcataatgcttctgtctaatttttatgttaaggtatttccttttccaccataggcatcaaagtgctccaaatatccacaagcagatacgacaaaaagactgtttccaaactgctcaatcaaaagtgtggttcaactctctcagatgaatacacacatcactaagaattttctcagaatgcttctgtctagtttatatatgaagatatttcctttcccaacataggcatcaaatcacctcaaatattcacttgcagattctacaaaaagaggatttcaaaactggtcaatcaaaagaaagttggaactcagtgagatgaatgcacacatcacaaagaagtttctcagaatgcttctatctagtttttatgtgaagatatttccttttccactctaggccgcaaagcgctccatatatgcaattgcagatcctgcaaacagacagtttcaaaactgctcaatcaaaagaaaggttcaagtctgtgagttcaatgcacacatcacaaagaagtttctcagaaggcttctgtctcgtttttatgtggagatatttccttttccaacattgggctaaaagcgacacaaatatccacttgcagattctacaaaaagagtatttcaaaaatgctcaatcaaaagaaaggctcaacactgtgagatgaatgcacacatcacaaagcagtttctcagaatgcttctgtcgagtttttatgtgaagatatttccttttccactagagtccacaaagcactccagatatccaatttcagattctacaaaaagagtgtttaaaaactgctcaaacaaaagaaagtttcaactctgtgagttgagtgcacacagcacaaataagtttctcagattgtttctgtctagattttatgtgaagatattcccttttccaccataggccccaaagcgcaccaaatatccacttgcagattctacaaaaagtatgtttcaaaactcctcaatcaaaagaaaggttcaactctgttaggtgaatgcatacatcacaaagaagtttctcagaatgcttctgtctagtttttatgtgaagatatttccttttccactagaggctgccaagtgccaaaatatccacttgcagatactacaacaagagtgtatcaaaactgctcaatcaaaagaaatgttcaactctttgaggtaatgcacacatcacaaagaagtttctcagaatgcttctgtctaatttttatatgaagatggttccttttccaccataggccttaaaacactccaaatatcgaattgcagataccacaataagactattcccaaactgctcaaacaaaacaggtgttcaactctgtgagttgaatgcacacataacaaagaagtttctcagaatccttctgtctagtttttatgtgaagatatttccttttccatcgtagtccaacaatcgctccaaatatccacttgcagattgtacaaaaagagtgtttcaaaactgctgaatcaaaacaaaggttcaactctgtgagatgaatgcaaacatcacaaagaagtttctcagaaagattttgtctaatttttatgttaaggtatttccttttccaccataggcctcaaatcattccaaatatccacttgcagattctacaaaaagagtgtttcaaaacttctcaatcaaaagaaaagttcaattctgtgataggaatgcacacatcacaatgaagtttctcagaatgcttctgtgtagtttttatgtgaagatatttccttttgaacgtagccctcaaagcactaaaatatacaattgcagattctacaaaaagagtgtttcaaaattgctgagtcaaaagaaacgttcaattcagtgagatgaatgcacccatcaaaaagaagtttctcagaatgcttctgtctagtttttatgtgaagctatttccgtttccagtagaggccacaaagtgctccaaatatccacttgaagattctataaaaagagggtttcaaaactgctcaatgaaaagaaaggtttaactatgtgaggtcaatgcacatatcacaaagaagtttttcagaatgcttctctgtagttcttatgtgaagatatttccttttccaccatgagcctcaaagcactccaaatatacatttgcagatactagagaaacactgtttccaaactgctcaatcaaaagaaagtttcaactctgagagttgaatacatacatcacaaagaagtttctcagaattctctgtggtttttatgtgaagttatttccttttccaccataggcctcaaagcgctccaagaattcaattgcagattctacaaaaagcctttttccaaactgctcaatcaatagaaaggttcaactctgtgagttgaatgcacatatcacaaagaattttctcagaatgcttctgtctagtttttaagtgaagatagttcctttttcaccttaggcctcaaagcactcaaatatccattgcagattctacaaaaagtgtgtttcaaaactgctcaatccaaaaaaaggtttaactctgtgagttgaatgcacacgtcacaaagaagtttctcagaatgattctgtctaggttttatgtgaatatattaccttttccactttaggccacaaagctctgcaaatatccacttgaagattctacaaaaagagtgtttcaaaactgtttaatgaaaagaaatttcaacactgtgagatgaatgcacacatcacaaagaagtttctcagaatgcttccatctagtttttatgtgaagatatttccttttccaccataggctgcaaagtgctccaaatatccacatgcagatactacaaaaagactgtttccaaactggtcaataaaaagagtagttcaactcttccagatgaatgcaaacatcacgaagtttctcagaatgcttctgtcaagattttatgtgaagatatttccttttcaaatataggcctctaagtgctcctaatatacatttgtagatgctacaaaaagaaagtttccaaactgctcaataaaaagataggtccaactctgtgtgctgaatgcacacatctcaaagaagtttctcagaatgcttctctctagtttttatgtgaagatgtttccttttccaccagcggctgcaaagcactccaaatatccatttgcagattctacaaaaagactgtttccaaactgctcaatcaaaagtaagtttcagctctgtaagaagaaggcacacatcacagagaagtttctcagaacgttcctgtcttgtttttatgtgaaattacttttagtttccctagaggccacaaaagggctcagaaatatccctttgcagattctacaaaatgactgattgaaaactgctcaatctaaagaacggttcaactctgtgagatgaatgcacacatcaaaaagaagtttcccagaatgcttctgtctagttttttatggaaagatatttccgtttccaccacaggactcaaagcactccaaatatccaattgcagatcccacaaaaagagtgtttcaaaactgctcaatcaaaagaaagtttcaacactgagatgaatgcacacatcacaaagaagtttctcagaatgcttctgtccactttttatgtgacgacatttaattttacaccatagacctcaaagcactccaaatatccacttgcaaatcctacaaaaagtgtgtttcaaaactgcttaattaaaagaaagtttcaactctgtgagatgaatgcacacatcaccaagaagtttttcagaatgcttctgtctagtgtttatgtgaagatatttccttttccaataaaggtcacaaatgatgtaaaatatccacttgcagattctacaaaaagggtgtttaaaaactgctcaatcaaaagaaaggttaaacgttatgagttgaattcacccatcacaaacaaggttctcagaatgcttctgtctagtttttatatgaatatatttccttttccaccataggcctcaaagtgctccaaatatccacttgcagattctacaaaaacagtgtttacaaactgctcagtcaaaagaaagtttcaacactgtgagatgattgcacacaccacaaagaagtttctcagaatgcttctatgtagtttttatatgacggtatttccttttccacaacaggcctgaaagcaatccaagtatccacttccagattctacaaaaaaagtttttctgcccagtcaaaagaaaggctcaactgtgagagatgaatgcacacatcacaaagaagtttttcagaatacttctgcataatttttatgtgaagataattccttttccaccgtaggcatcaaagggctcccaatttccacctacagattctacaaaaagagagattcaaaactgctgaatcaacagatatgttcaactctgtgagttgaatgcagacatgacaaagaagtttttcagaatgcttctgtctagtgtttatgtgaagatatttccatttccaatatagtcctcgaagtgctccaaatatccaattgtagattctaaaaaaagggtgtttcagaactgttcaatgaaatcaaatgttcaacactgtgagatgaatgcgcacatcacaaagaagtttctcagaatgcttctgtgtagtttttatgtgaagatatttccttttccagcataggcctcaaagcactccaaatatccacttgcagattgtacaaaaagagtgtttcaaaactgctgaatcaatagaaaggttcaactctgtgagatgaatgcacacatcacaaagaagtttctcagaatgcctctgtatagtttttatgtgaagatatttccttttccacaataggcctcaaagcgcttcaaatatccacttgcagattctacaaaaagagtgtttcagaactgctcaatcaaaagaaagtttcaactccgtgagatgaatgcacacatcacaaagaagcttctcagaatgcttctgtgtagtttttatgtgaagatatttccttttccaaaacaggctgcaaagagctcctaatatccacttgtagattctacaaaaagagagattcaaaactgctcaatcaaaagataggttcaactctgtgagttgaatgctcgcatcacaaagaagtttctcagaatgcttctgtctgttttttatgggaagatatttccgtttccaccataggcttcaaagtgctccaaatatccacttgcagattctacaaaaagagtgtttccaaactgctcaatcaaaagaaaagttcaacactgtgagatgaatgcacacatcacaaagtagtttctcagaatgctcctatgtagtttttatctgaagatatttccttttccactataggcctcaaagtgctccaaatatccaattgcagattctacaaaaagagagtttcagaactgctcaatcaatacgaaggttcaactctgtgagatgaatgcacacatcaagaagaagtttctcagaatgcttctgtctactttttatgtgaagatatttccttttccaccataggcctcaaagtgcttcaaacatccacttgcagatcctacaaaaagaatgtttcaaaagtgctcaatcaaaagaaagtttcaactctgtgagatgagtgcacacatcacaaagatgtttctcagaatgcttctgtgtagtttttatgtgaagatatttccttttccacgataggcctcaaaacgctctaaatatccaaatgcagattctacaaaaagagagattcaaaactgctcaatcaaaatgaaggttcaactctgttagatgaatgcccacatcccaaagaagtttctcagaatgcttctgtgtactttttatgtgaagatatttccttttccacaacagacctcaaagcgcctcaaatatctacttacagattcttccaaaagagtatttccaaagtgctcaatcaaaagaaaggttcaattccgtgagatgaatgcacatatcacagagaagtttctcagaatgcttctatgtactttttatttgaagatatttcctattccacagtggtcctctaagctccccaaatatccatttgcagattctacaaaaagagtgtttcaagactgctcaatcaaaagaaaggttcaactctgttaggtgaatgcacacaacacaaagaagtttctgagaatccttctgtgggctttttatgtgaagatatttccttttccaccatacgccacaaagggctgaaaatatgcacttgcagattctacaaaaagagagtttcaaaactggtctatcaaaagataggttcaggtatgtgggtggaatggacacatcacaaagaactttctcaaaatgcttctgtgtagtttttttctgaagatatttccttttcaacaataggcctcaaagtgccccaagtatccacttgcagattctacaaaaagatagattaaaaagtgctcaatccaaacataggttcaattctgtaagatgaatgcacacatcacaaagaagtttctcagaatgcttcttctgtatattatttatgtgaagatatttcttttccacagtaggtctcaaagtgctccaaatatccacttgcagattctacaaaaagagtgtttcaaaactgctcaatcaaaacgaaggttca

SEQ ID NO: 519 - DNA, 11437 bp, Homo sapiens
  source 1..11437: mol_type = other DNA
gaaacactctctttttagaatctgcaagtggatttttggagcactttgaggcctatggtggcaaaggaaatatctttacatagaaactacacagaagcattctgagaaacttctttgtgaagtgtgtattcaacacgctgagttcaacctatcttttgatagagcagttttgaagctgccgtcttttagaatctgcaattggatatttggagctctttgtgtcagatgatggaaaaggaaacatcttcccaaagaaactacacagaagcatttcgagaagcttctttgtgatgtgtgctttcatctcacagagttgaaccttaattttgattgagcagtttggaaacactctttttgtagaatctgcaagtggatatttgcagcactttgagacctgtgatggaaaaggaaatatattcacataaaaactacacataagcattctgagaaacttctttgtgatgtttgcatgctactcacacagttgaacctatcttttgatagagcagttttaaaacccactttttgtcgaatctgcaagtggatatttggagccctttgcagcctatggtggaaaaggaaatatcttcacataaaaggtacacagaagcattctgagaaactactttgtgatgtgtgcattcatctcacagggttgaaccttccatttgatggagcagttttgaaacactctttttgtagaatctgcaagtgcatatttggagtgctttgacgcctattgtggaaaaggaaatatcttcacataaaaactacacagaagcattctcagaaacttctttgtgatgagtgcattcattgcacggagttgaacctttgttttgaatcagcagtttgcatactctctttttgtagaatccgcaagtggatatttgaagccctttgtggcctatgttggaaaaggaaatatcttccaataaaaactagaaagaaacatcctgagaaacttctttgtgatgtgtgcattcatctcacagagttgaagctttcttttgattaagccatctttaaacactctttttgtaaaatctgcaagtgcatatttggagtgctttgaggcttattgtggaaaagtaaatatcttcatataaaaactacacagacgccttctgagagacttctttgtgatgtgtgcattcatctcactgagttgaaccgttgctttgattgagcagtttggaaacactctttttgtagaatccacaagtggatatttggggccctttgaggcagatggcagaaaaggaaatattttcccatagaaactacacagaaacattcggagaaacttctttgcaatggacggtttcatctcacagagttgaacctttcttttgattgagcagtttggaaacagtttttgcagaatctgccagagtatatttggatcactttcaggcctatggtggaaagcgaaatatcttcacataaaaactacacagaagccttctgagaaacaaatttgtgatgtgtgcattcaactcacagagttgaacctatcttttgattgagcagttttgaaactctctatttgtagaatctgcaagtggatatttggagcccttttagccctttggtggaaaaggaaatatgttcacataaaaactacacagaagcaatctgagaaactactttgtgatgtgtgcattcaactcacagagttgaacttatcttttcatagagcagttttgaaactctctatttgtagaatctgcaagtggatatttgcagtcctttgcctcctatggtggaaaaggaaatatcttcccataaaaactaaacagaagcattcggagaaacttctttgtgatatgttcattcatctcacagagctgaacctttcatttgattgagcagttttgaaacacaatttttgtagaatctgcaagtggatatatggagctctttgaggcctattgtggaaaaggaaatatctccacataaaaactacacagaatcattctgagaaactcctttgtgatgtgtgcattcatctcacagagttgaacatttcttttgattcaccaattttgaaacaatcctttcgtagtatctacaactgggtatttggagcgctttgaggcctgcatggaaaaggaaatatcttcacctaaaaactacaaagaagcattctgagaaacttctttgtgatgtgtgcattcaactcacagagttgaacttatcttttgataaagcatattttaaactctctttttgtagaatgtacaagtggatgtttggaaacctttgtggcctatggtggaaaacgaaatatcgtccaagaaaaactacacagaaacattctaggaaccgcctttgcaacgtgtgcattcatctcacagagttgaacttttcttttaattgagtagtttggaaacactctttttgtagaatctgcaagtggatattgggagtgctttgaggcctgtttttgaaaaagacatatcttcacataaaaccacacagaagcattctcagaaacttttttgtgatgtgtgcattcatctcacagagttgaacatttcttttggttgagcaggtttgaaacacactttttgtagaatctgcaaatggatatttggagcgctttgggcctgcgatggaaaggaaatatcttcacataaaaactacacagaagcattctgagaaacttctttgtgatgtgtgcattcatctcacagatatgaagctttcttttgattgagcagtttggaaaaactctttttctagtatatgcaagcagagatttggagacctttgtggcttatgttgcaaaaggaaatatcttaacataaaaactacacagaagcattctgatagacttccttttcatgtgtgcattcatctcacatagttgaacctttctttcgatagagcagttttggaactctctttttgtaggatctgcaaggggatatttggaggcctttgcagcccataatggaaaaggaaatatcttccaataaaaactacacagaagcattctgggaaacttctttttgatgtgtgcatttatctcacagagttaaacatttcatttgatttatcagttttggaacactcattttctagaaactgccagtggatatttggatcactttgaggcctattgtgcaaaaggaaatatcttcatataaaaactacatagaggcattctcagaaacttctttgtgatgtgtgtattcatctcagacttcaacctttcttttgaatgagcattttggaaacactctttttgtagaatctgtgtgtggatacttggagccttttgaggcctattgtggaaaaggaaatatcttcacataaaaactacacagaaaaatttgagaaacttctttgtgatacttgcattcatctcacatatttgaaaatttcttttgatagagcacttttgaaactctctttttgtagaatctgcaagtggatatttggagcgctttgaggcctatggtggaaaaggaaatatcttaacataaaaactacacagaagcattctgagaaacttctttgtgatgtgtacattcaactcgcagagttgaaactatcttttgatagagcggttttcatactctctttttgtataatctgcaagtggatatttggagcccttggtggcctatggtggaaaaggagatatcttcacattaaaacttcaaagaagcattctgagaagcttctttgtgatgtgtgcattgatcccactgaggtgaacgtttctttttatttagaagtttggaaacactcctttgcagagtctgcaagtggatatttggagtgctttgagggctatggtggaaaaggaaatatcttcacataaaaactacacaacatcattctcagaaacttctttgtgatgtgtgcattcaactaacatagttgaacctatctttgatagagcagttttgaaattctcttcttatagaatctgcaagtggagttttggagcccgttgaggcctattgtggaaaaggaaatattttcacataaaaactatacacaagcattctgagaaacttctttgtgatgtgtgccttcatctcacagagatgaacctttcttttgatttagcaattttgaaacactctgtttgtatattcggcaagtggatgtttggagcgctttgtggcctatggtcgaaaaggaaatatcttcacataaaaactacacggggactttctcagaaacttctttgtgatgtgtgcattcaactcacagggttgaacctatcttttgatagggcagttttgaaactctctttttgtagaatctgcaagtgggtatttgtagccctttgtggcctatgttggaaaaggaaatatcttcacataaaaactacccagaggcattctgagaaacttctttgtgatgtgtgcattcatctaacagagttgaaactttcttttgatggagtagtttggaaacactctttttctagaatctgcatgtggatatttggagcgctttgaggcctatgatggaaaaggaaatatctttacataaaaactacaccaaagcattctgagaaacttctttgtgatgtgtccattcaactcacagggttgaacctatcttttgatagagcagttttgaaaccctctttttgtaggatgcgcaaatggatatttggagtagtttgaggccaattgtggaaaaggaaatatcttcacataaaaactacacagaagcattctcagaaacgttttgtgatgtgtgcattcaactcacagagttcaacctatcttttcatagagcagttttgaaactctattttgtagaatatgcaaggggatatttggagccatttgtggcctatgggggaaaaggacatatcttcacataaaaactacacagaagcattctgagaaacttctttgtgatgtgcacattcaactcgaagagttgaacatatcttttgacagagcagttttgaaactctttttttgtagaatctgcaagtggatatttggagtcctttacagcctatggtggaaaaggaaatatctttacataaaaacttcacagaagcattctgagaaacttcttcgtgatgtgtgcatgcaactcacagagttgaacctatattttgatagagtagttttgaaactctctttttgtagaatctgcaagtgaatattttcagccctttgcagcctatggtggaaaaggaaatatcttcacataaaaattaaacagaggcattctgagaaactactttgtgatgtgtgcattcatctcccacagtagaacctttctttggcttgagcagttttgaaacactctttttgtagtatctgcatgtggatatttgaagggatttgtggcctaatttggaaaaggaaatatcttcacaaaaaaactagaaagaagcattcttagaaacttctttttgatgtatgcattctaataacggagttgaacctttcttttgactaagcagttatgaaacactatttttgtagaatctgcaattggataattgcaacagtttatgacttctagtggaaaaggaaatgttttcacatacaaactagacagaagttttctgagaaacttctttgtgatgtgtgcattcatctaacagatttgaacctttattttaattgagcagttttcaaacactctttttgtagaatctgcgagtgcatatttggagtgctttgaggcctatggtggaaaaggaaatatcttcacataaaaactagactgaagcattctcagaaacttctttgtgatgtgtgcattaaactcacagaattcaacctctcttataattcagccgtttggaaattctctttttgtactatctgcatgttgatatttggagcactttgatgcctacagttttaaaaaaatcttcacataaaaacttgacagaagcattctgagaagctacttcatgatgtgtgcattcaactcacagagttgaacctttcttttgattgagcagtttggaaacaggctttctgtacaatctgcaagtggatattttgagcgctttgaggcccatggtagaaaagaaaatatcttcacgaaagaactagacagaagcattctgagaaacttctttgtgatgtgagcaatcatctcacagggttgaacctttctttcgatttagcagttttgaaacacaccttttgtagaatctgcaagtgtatatttggagcattttgaggcctatggtggaaaaggaaatatcttcacaaaaaaactagacagaagcattctgagaaacttctttgtgatgtgtgcgttcaactgaccgattcgaagctctcttttgcttgagcagtttggaaaccgtctttttgtaggatctgcaagtggatatttggaaccatttgaggcctatggtgtaaaactaaatatctacacataaaaactagacagaagcattctgagaaacttctttgtgatgtgtgcattcagttcaccgagctgaatatttctttagaggcagcagttttgaaacactctttttgttgtttctgcaaatggatattatgagcagtttcaggcctatggtggaaaaggaaatgtcttcacataaatacaagaaagaagcattctgagaaacttctttgtgatgtgtgcattgaactcccaggcttcaacctttcttttgatagagcagttttgaaacacactttttgtataatctgctagtggatatttgaagcaattaggggcctatggtggaaaagggaataacttcatctaaaaaatacatagacgtattctgagaaacttccttgtcatgtgtgtattcaactaacagagctgaatcttacttttgattcagcagttttgaaacacactttttgtattatctgctagtggatatttgaagcaattaggggcctatggtggaaaagggaataacttcgtctaaaaaatacatagaagtattctgagaaacttccttgtcatgtgtgtattcaactaacagagttgaaccttacttttgattcagcagttttgaaacactctttttgtagaagctgcaattggatatttggagtgctttgcagcctatggtggaaaaagaaatatcttcacataaaatctagcagaaacattctgagaaacttctgtgtgatgtgtgcattcatttcacagagatgaaactttcttttgattgaacagttttgaaacactctttttgtagaatctggaagtggatatttggagcgctttgaggcctattgtggaaaaggatatatctttatctaaaaactacacagaagcattctgagaaagttatttgtgttgtgtgcatttaactcacagagttgaacttttcttttgattgcacagtttgaaaaccgtgtttttgtggtatctgcaaatgaatatttggagaggtttgaggactatggtggaaaaggaaatatcttcacataaaaacaagacagaagcattctgagaaacttctttttgatgtgtgcattcatctcacagagttgaaactttcttttgattgaccagttttgaaacccgctttttgtagaatctgcaagtgggtatttggagcacatggatcactatggtggaaaaggatgtgacttcacagaaaaacacaacagaagcatgctgagaaactcctttgtgaagtgtgcattcatctcacagagttgaaacattctttttactgagcagttttgaatcacactttttgcagaatctgcaagtggatatttgcagccctttgagggctatggtggaaaagtaaatatgttcacataaaaactacacagaagcattctgagaaactgctttgtgatgtgtgcattcaactcacagagttgaacctatgttttcatagaagagttttgaaactctctttttgttgaatctgcaagtgattatttggagccttttgtgacagatggtgaaaaaggaaatatcttactataaaaactacacagaagtattctgagaaacttccttgtgatgtgtgcattcttctcacagagttgaacattacatttgattgagcagttttgaaacactctttttatagaatctgcaagtggccatttggagccctttgaggccaatggtggaaaaggaaatatcttcacataaaaactacacaaaagcattgtgggaatctgctttgtgatgtgtgcatttatctcacagaggtgaacctctcttttcattgagtagtttggaaaaactctttttgtagaatcggcaagtggatatatggagcgctttgaggcctattgcggaaagggaaatttcttcacataaaacctacacagaagcgttctgagaaacttctttgtgatgcgtgcattcatctcatagagttgtacctttctttgattgagcagttttgaaacattctttttgtagaatctgcaagtggatatttgtagtgctttgaggcctaaggaagaaaaggaaatatcttcacataaaaactacacagaagcattctgagaaacttctttgtgatgtgtacagtcatctcacagggttgaacctatcttttgatagagcagttacgaaaccgtctttttgtagaattggtaagtggatatttggaaccctttgcagcctatggtggaaaaggaagtatcttcacataaaaactacacagaagtattctgtgaaacttctttgtgatgtgtgcattcatctcacagagttgaacatttcatatgattgagcagttttgaaacactctttttctagaatctgcaagtggatatttgcagcgctttcaggcctattgtgaaaaatttaatatcttcccataaaaactacacagaagcattctcagaaacttctttgtgatgtgcacattcatctcatggagttgaacctttcttttgattgagcagtttggaaacactcttttagtagaatctgcaagtggatatttggagcccttggaggcctattgtggaaaaggaaatatcttcacataaaaactacagagaaggattctgagaaacttctttgtgatgtgtgcattcatctcacagagttgaatctttctttttattgagcagttttgaaacactcattgtagaatctacaagtggatatgtggagcacttagaggcctatggtggaaaaggaactatcttcacataaaaactacacaaaaacattctgagaaacttctttgtgatgtttgcattcaactcgcagagttgaacatatcttttgatagagcagttttgcaactcgctttttgcagtctgtgcaagtggttatttggagctttttttggccaattgtggaaaaggaaatctcctcccctaaaaactacactgaagcattctgagaaacttctttgtgatttgtgcattcatctcacagagttgaaactttcgtttgattgaacagttttgaaactgccttttttagaatctgtaagtggatatttgaagtgcattgaggcttatggtggaaaaggaaatatcttcacataaaaactacacggaagcattctcagaaacttacttgtgatttgtgcattcatctcacagagttgaaccgttcttttgattgagcagtttggaaacagtcttttagtagaatctgcaagtggatattcggaaatcttggaggccttttctggtaaaagaaatatcttctgataaaaactacacagaagaattctgagaaacttcttcgtgatgtgtggattcgtctcacagagttgaatatttcttttgattgagcagttttgcaacactcttttttgtagaatctgccagtggatatttgaagcactttgaggcctatggtggaaaaggaaatatcttcacacaaaaactacacagaagcattctgagaaacttttgttatgtgtgcattcaactcgcagagttgaccctttcttttgatagagcagtttggaaactctctttttgtacagtctgaaagtgcttatttggagccccttgcggcctgtggtggaaaaggaaatatcttcacacaaaaactacacagaagaattctgagaaacttcttagtgatgtgtgcattcatctcaaagagttgaaactttcttttgattgagcagttttgaaacactcttttgtagaaactgcaacttagatatttggagcgctttcaggcctctggtggtgaaggaaatatcttcacataaaaactacacagaagcattctgagaaacttctttgtaatgtgtgcattcaactcactgcgttgaatcactactttgatagagaaattttgaaactctctttttgtagaatctgcaagtggatatttggagtgctttgaagcctatggtggaaaaggaaatatcttcacataaaaactacacagaaacgttctcagaatcttttttgtgatgtgtgcattcatctcacagagctgaatttttcttttgattaagcagtttggaaatactctttttgtagaatcttcaagtggatatttggagcgctttaatgcctatggtagaaaaggaaatatattcacaaaaaaactacacagaagtattcagagaaacttctttgcaatgtgtgcattcctcccacagagtagaacctttgttttcattgagcagtttggaaacactctttttctagaatctgcaagtggatattttcagcgatttgaggcctatgctggaaaaggcaatatcttcacataaaaactacacagaagcattctgagaatcttctatatgatgtgtgcattcatctcacagagttgagcctttcttttgatggatcagctttgaaacactgtttttgaagaatctgcaagtggataattggagccctttgaggcctatggtggagaaggaaatatcttcacataaaaagtacacagaagcattctaagaaacttctttgtgatgtgtgaattcatctcacagagttgaacctctcttttgattgtgcacttttgaaaccctctttttgtggaatctgcaagtggatattgggaacaatctgacacctattgtggaaaaggaaacgtcttgagataaaaactacacagaagaattccgagatacttcattgtgatgtgtgcattcaactcacaaatttgaacctatcttttgattgagcagttttgaaactctctttttgtagcatcttcaagtggatacatggagccctttgtggcttatgatggaaaaggaaatatcttcacataaaaactacacagaagcattctgagaaacttctttgtgatatgtgaattcatctcacagagttgagtctttcattttattgagcagtttggaaacacactttctgtagaatctgcaaggggatatttgcagcactttgaggcctattgtggaaaaggaaatatcttcacataaaaactacacagaagcattctgagaaccttgtttgtgatgtgtgcactcaactcacagagttgagcctgtcgtttgattggacagttttga

SEQ ID NO: 520 - DNA, 4548 bp, Homo sapiens
  source 1..4548: mol_type = other DNA
ggggaaggagccaagatggccaaataggaacagctccggtctacagctcccagcatgagagacgcagaggacgggtgatttctgcatttccatctgaggtaccaggttcatctcactagggagtgccagacagtgggtgcaggtcagtgggtgcacgcaccttgcacgagccaaagcagggtaaggcattgactcacttgggaagcacaaggggtcagggagttccctttccgagtcaaagaaaggggtgatggacgcacctggaaattcgggtcactccaacctgaatattgcgcttttcggaccggcttaaaaaatggcgcaccatgagattatatgctgtacctggctcggagggccctacatacatggagtctcactgattgctagcacagcagtctgcgatcaaactgcaaggcggcagcgaggctgggggaggggcgcccgccattgcccagccttgcttaggtaaacaaagcagcctggaagctcgaaatgggtggagcccaccacagctcaaggagtcctgcctccctctgtaggctccacctctgggggcagggcacagacaaacaaaaagacagcagtaacctctgcagacttaaatgtccctgtctgacagatttgaagagagcagtggttcccccagcatgcagctggagatctgagaatgggcagactgcctcctcaagtgggtccctgacccctgacccccgagcaacctaactgggagacaccccccagcaggggcacactgacacctcacatggcagagtattccaacagacctgcagctgagggtcctgtctgttagaaggaaaactaacaaacagaaaggtcatccacaccaaaaacctatctgtacatcaccatcatcaaagaccaaaagtagatgaaaccacaaagatggggaaaaaacagaatagaaaaacaggaaactctaaaacgcagagtgcctctcctcctccaaaggaacgcagttcctcaccagcaatggaatgaagcttgatggagaatgactttgacgagctgagagaagaaggcttcagatgatcaaattactctgagctacaggaggacattcaaaccaaaggcaaagaagtcgaaaactttgagaaatatttagaagaatgtgtaactagaataaccaacacagagaagtgcttaaaggagctgatggagctgaaaaccaaggctcgagaactatgtgaagaatgcagaagcctcaggagccgatgtgatcaactggaagaaagggtatcagcaatggaagatgaaatgaatgaaatgaagcgagatgggaagtttagagaaaaaagaataaaaagaaatgagcaaagcctccaagaaatatgggactatgtgaaaagaccaaatctacgtctgattggtgtacctgaaagtgatggggagaatggaaccaagttggaaaacactctgcaggatattatccaggagaacttccccaatctagcaaggtaggccaacgttcagattcaggaaatacagagaatgccacaaagatactcctcaagaagagcaactccaagacacataattgtcagattcaccaaagttgaaatgaaggaaaaaatgttaagggcagccagagagaaaggttgggttaccctcaaagggaagcccatcagactaacagcggatctcttggcagaaaccaaacaagccagaagagagtgggggccaatattcaacattcttaaagaaaagaattttcaacccagaatttcatatccagccaaactaagcttcataagtgaaggagaaataaaatactttacagacaagcaaatgctgaaagattttgtcaccaccaggcctaccctaaaagagctcctgaaggaagcactaaacatggaaaggaaaaaccggtaccagccactgcaaaatcatgccaaaatgtaaagaccatcgagactaggaagaaactgcatcaactaacgagcaaaatcaccagctaacatcataatgacaggatcaaattcacacataacaatattatgtgtgtttgctttcaatgtaaatggactaaatgctccaattaaaagacacagactggcaaattggataaagagtcaagacccatcagtgtgctgtattcaggaaacccatctcatgggcagagacacacataggctcaaaataaaaggatggaggaagatctaccaagaaatggaaaacaaaaaaaggcaggggttgcaatcctagtctctgataaaacagactttcaaccaacaaagatcaaaagagacaaagaaggccattacataatggtaaagggatcaattcaacaagaagagctaactatcctaaatatatatgcacccaatacaggagcacacagattcataaagcaagtcctgagtgacctacaaagagacttagactcccacacattaataatggtagactttaacaccccactgtcaacattagacagatcaaggagacagaaagtcaacaaggatacccaggaattgaactcagctctgcaccaagcggacctaatagacatctacagaactctccaccccaaatcaacagaatatacattttttttcagcaccacaccacacttattccaaaattgaccacatacttggaaataaagctctcctcagcaaatgtaaaagaacagaaattataacaaactatctctcagaccacagtgcaatcaaactagaactcaggattaagaatctcactcaaaaccgctcaactacatggaaactgaacaacctgctcctgaatgactactgggtacataacaaaatgaaggcagaaataaagatgttctttgaaaccaatgagaacaaagacacaacataccagaatctctgggacgcattcaaagcagtgtgtagagggaaatttatagcactaaatgcccacaagagaaagcaggaaagatccaaaattgacactctaacatcacaattaaaagaactagaaaagcaagagcaaacacattcaaaagctagcagaaggcaagaaataactaaaatcagagcagaactgaaggaaatagagacacaaaaaacccttcaaaaaattaatgaatccaggagctggttttttgaaaggatcaacaaaattgatagaccgctagcaagactaacaaagaaaaaaagagagaagaatcaaatagacacaataaaaatgataaaggggatatcaccactgatcccacagaaatacaaactaccatcagagaatactacaaacagctctatgcaaataaactggaaaatctagaagaaatggataaattcctggacacatacactctcccaagactaaaccaggaagaagttgaatctctgaatagaccaataacaggatctgaaattgtggcaataatcaatagtttaccaaccaaaaagagtccaggaccagatggattcacagcagaattctaccagaggtacaaggaggaatggtaccattccttctgaaactattccaatcaatagaaaagagggaatcccccctaactcattttatgagaccagcatcattctgataccaaagccaggcagagacaaaacaaaaaaagagaattttagaccaatatccttgatgaacattgacgcaaaaatcctcaataaaatactggcaaaacgaatccagcagcacatcaaaaagcttacccaccatgatcaactgggcttcatccctgggatgcaaggctggttcaatatacaaaaatcaataaatgtaatccaccatataaacagagccaaagacaaaaaccacatgattatctcaacagacgcagaaaaagcctttgacaaaattcaacaacccttcatgctaaaaactctcaataaattaggtattgatgggacgtatttcaaaataataagagctatctatgacaaacccacagccaatatcatactgaatgggcaaaaactggaagcactccctttgaaaagtggcacaagacagggataccctctctccccactcctattcaacatagtgttggaagttctggccaaggcaattaggcaggagaaggaaataaagggtattcaattaggaaaagaggaagtcaaattgtccctgtttgcagacgacatgattgtatatctagaaaatcccattatctcagcccaaaatctccttaagctgataagcaacttcagcaaagtctcaggatacaaaatcaatgtacaaaaatcacaagcattcttatacacaaacaacggacaaacagagagccaaattatgagtgaactcccattcacaattgcttcaaagagaataaaatacctaggaatccaacttacaagggatgtgaaggacctcttcaaggagaactacaaaccactgctcaaggaaataaaagaggatacaaacaaatggaagaacattccatggtcatgtgtaggaagaatcaatatcttgaaaatggccatactgcccaaggtaatttacagattcaatgccatccccatcaagctaccaatgcctttcttcacagaattggaaaaaactactttaaagttcatatggaaacagaaa

SEQ ID NO: 521 - DNA, 154 bp, Homo sapiens
  source 1..154: mol_type = other DNA
gggtgaagaaggctgcatcaggaggcaggagacctaggttcacattccagctttgttcccaacactatctggtaacctctctgggcctcagtttctagtttggtaataagaggctgggactcacccatttttaaggcaatttgaggtctgattc

SEQ ID NO: 522 - DNA, 6008 bp, Homo sapiens
  source 1..6008: mol_type = other DNA
gatggccgaataggaacagctccggtctacagctcccagcgtgagcgacgcagaagacgggtgatttctgcatttccatctgaggtaccgggttcatctcactagggagtgccagacagtgggtgcaggccagtgtgtgtgcgcaccgtgcgcaagccgaagcagggcaaggcattgcctcacctgggaagggcaaggggtcagggagttccctttccgagtcaaagaaaggggtgacggacgcacctggaaaatcgggtcactcccacccgaatattgcgcttttcagaccggcttaagaaacggcgcaccacgagactatatcccacacctggctcagagggtcctacgcccacggaatctcgctgattgctagcacagcagtctgagatcaaactgcaaggcggcaacgaggctgggggaggggcgcccgccattgcccaggcttgcttaggtaaacaaagcagccaggaagctcgaactgggtggagcccaccacagctcaaggaggcctgcctgcctctgtaggctccacctctgggggcagggcacagacaaacaaaaagacagcagtaacctctgcagacttaagtatccctgtctgacagctttgaagagagcagtggttctcccagcacgcagctggagatctgagaacgggcagactgcctcctcaagtgggtccctgacccctgatccccgagcagcctaactgggaggcaccccccagcaggggcacactgacacctcacacggcagggtattccaacagacctgcagctgagggtcctgtctgttagaaggaaaactaacaaccagaaaggacatctacacctaaaacccatctgtacatcaccatcatcaaagaccaaaagtagataaaaccacaaagatggggaaaaaacagaacagaaaaactggaaactctaaaacgcagagcgcctctcctcctccaaaggaacgcagttcctcaccagcaacagaacaaagctggatggagaatgattttgatgagctgagagaagaaggcttcagacgatcaaattactctgagctacgggaggacattcaaaccaaaggcaaagaagttgaaaactttgaaaaaaatttagaagaatgtataactagaataaccaatacagagaagtgcttaaaggagctgatggagctgaaaaccaaggctcgagaactacgtgaagaatgcagaagcctcaggagccgatgcgatcaactggaagaaagggtatcagtgatggaagatgaagtgaatgaaatgaagcgagaagggaagtttagagaaaaaagaagcaagcaaagcctccaagaaatatgggactatgtgaaaagaccaaatctacatctcattggtgtacctgaaagtgatggggagaatggaaccaagttggaaaacactctgcagaatattatccgggagaacttccccaatctagcaaggcaggccaacattcagattcaggaaatacagagaacaccacaaagatactcctcgagaagagcaaatccaagacacataattgtcagattcaccaaagtggaaatgaaggaaaaaatgttaagggcagccagagagaaaggtcgggttacccacaaagggaagcccatcagactaacagcggatctctcagcagaaactctacaagccagaagacagtggggaccaatattcaacattcttaaagaaaagaattttcaacccagaatttcatatccagccaaactaagcttcataagtgaaggagaaataaaatactttacagacaagcaaatgctgagagattttgtcaccacaaggcctgccctaaaagagctcctgaaggaagcgctaaacatggaaaggagcaaccaataccagctgctgcaaaatcatgccaaaatgtaaagaccatcgagactaggaagaaactgcatgaactaacgagcaaaataaccagctaacatcataatgacaggatcaaattcacacataacaatattaactttaaatgtaaatggactaaatgctccaattaaaaggcacagactggcaagttggataaagagtcaagacccatctgtgtgctgtattcaggaaacccatctcacgtgcagagacacacataggctcaaaataaaaggatggaggaagatataccaagcaaatggaaaacaaaaaaaggcaggggttgcaatcctagtctctgataaaacagactttaaaccaacaaagatcaaaagagacaaagaaggccattacataatggtaaagggatcaattcaacaagaggagctaactatcctaaatatatatgcacccaatacaggagcacccagattcataaagcaagtcctcagtgacctacaaagagacttagactcccacacattaataatgggagactttaacaccccactgtcaacattagacagatcaacgagacagaaagtcaacaaggatacccaggaattgaactcagctctgcaccaagcagacctaatagacatctacagaactctccaccccaaatcaacagaatatacatttttttcagcaccacaccacacctattccaaaattgaccacatagttggaagtaaagctctcctcagcaaatgtaaaagaacagaaattataacaaactatctctcagaccacagtgcaatcaaactagaactcaggattaagaatctcactcaaagccgctcaactacatggaaactgaacaacctgctcctgaatgactactgggtacataacgaaatcaaggcagaaataaagatgttctttgaaaccaacgagaacaaagacaccacataccagaatctctgggatgcattcaaagcagtgtgtagagggaaatttatagcactaaatgcctacaagagaaagcaggaaagatccaaaattgacaccctaacatcacaattaaaagaactagaaaagcaagagcaaacacattcaaaagctagcagaaggcaagaaataactaaaatcagagcagaactgaaggaaatagagacacaaaaaacccttcaaaaaatcaatgaatccaggagctggttttttgaaaggatcaacaaaattgatagaccgctagcaagactaataaagaaaaaaagagagaagaatcaaatagacacaataaaaaatgataaaggggatatcaccaccgatcccacagaaatacaaactaccatcagagaatactacaaacacctctacgcaaataaactagaaaatctagaagaaatggatacattcctcgacacatacactctcccaagactaaagcaggaagaagttgaatctctgaatagaccaataacaggctctgaaattgtggcaataatcaatagtttaccaaccaaaaagagtccaggaccagatggattcacagccgaattctaccagaggtacaaggaggaactggtaccattccttctgaaactattccaatcaatagaaaaagagggaatcctccctaactcattttatgaggccagcatcattctgataccaaagccgggcagagacacaaccaaaaaagagaattttagaccaatatccttgatgaacattgatgcaaaaatcctcaataaaatactggcaaaccgaatccagcagcacatcaaaaagcttatccaccatgatcaagtgggcttcatccctgggatgcaaggctggttcaatatacgcaaatcaataaatgtaatccagcatataaacagaggcaaagacaaaaaccacatgattatctcaatagatgcagaaaaagcctttgacaaaattcaacaacccttcatgctaaaaactctcaataaattaggtattgatgggacgtatttcaaaataataagagctatctatgacaaacccacagccaatatcatactgaatgggcaaaaactggaagcattccctttgaaaactggcacaagacagggatgccctctctcaccactcctattcaacatagtgttggaagttctggccagggcaatcaggcaggagaaggaaataaagggtattcaattaggaaaagaggaagtcaaattgtccctgtttgcagacgacatgattgtatatctagaaaaccccatcgtctcagcccaaaatctccttaagctgataagcaacttcagcaaagtctcaggatacaaaatcaatgtgcaaaaatcacaagcattcttatacaccaacaacagacaaacagagagccaaatcatgggtgaactcccattcacaattgtttcaaagagaataaaatacctaggaatccaacttacaagggatgtgaaggacctcttcaaggagaactacaaaccactgctcaaggaaataaaagaggacacaaacaaatggaagaacattccatgctcatgggtaggaagaatcaatatcttgaaaatggccatactgcccaaggtaatttacagattcaatgccatccccatcaagctaccaatgactttcttcacagaattggaaaaaactactttaaagttcatatggaaccaaaaaagagcccgcatcgccaagtcaatcctaagccaaaagaacaaagctggaggcatcacactacctgacttcaaactatactacaaggctacagtaaccaaaacagcatggtactggtaccaaaacagagatatagatcaatggaacagaacagagccctcagaaataatgccgcatatctacaactatctgatctttgacaaacctgagaaagacaagcaatggggaaaggattccctatttaataaatggtgctgggaaaactggctagccatatgtagaaagctgaaactggatcccttccttacaccttatacaaaaatcaattcaagatggattaaagatttaaacgttaaacctaaaaccataaaaaccctagaagaaaacctaggcgttaccattcaggacataggcgtgggcaaggacttcatgtccaaaacaccaaaagcaatggcaacaaaagaaaaaattgacaaatgggatctaattaaactaaagagcttctgcacagcaaaagaaactaccatcagagtgaacaggcaacctacaacatgggagaaaattttcgcaacctactcatctgacaaagggctaatatccagaatctacaatgaactcaaacaaatttacaagaaaaaaacaaacaaccccatcaaaaagtgggcaaaggacatgaacagacacttctcaaaagagacatttatgcagccaaaaaacacatgaagaaatgctcatcatcactggccatcagagaaatgcaaatcaaaaccactatgagatatcatctcacagcagttagaatggcaatcattaaaaagtcaggaaacaacaggtgctggagaggatgcggagaaataggaacacttttacactgttggtgggactgtaaactagttcaaccattgtggaagtcagtgtggcgattcctcagggatctagaactagaaataccatttgacccagccatcccattactgggtatatacccaaatgagtataaatcatgctgctataaagacacatgcacacgtatgtttattgtggcactattcacaatagcaaagacttggaaccaacccaaatgtccaacaatgatagactggattaagaaaatgtggcacatatacaccatggaatactatgcagccataaaaaatgatgagttcatatcctttgtagggacatggatgaaattggaaaccatcattctcagtaaactatcgcaagaacaaaaaaccaaacaccgcatattctcactcataggtgggaattgaacaatgagatcacatggacacaggaaggggaatatcacactctggggactgttgtggggtagggggaggggggagggatagcattgggagatatacctaatgctagatgacacattagtgggtgcagcgcaccagcatggcacatgtatacatacgtaactaacctgcacaatgtgcacatgtaccctaaaacttagagtataataaaaaaaaaaaaa

SEQ ID NO: 523 - DNA, 288 bp, Homo sapiens
  source 1..288: mol_type = other DNA
gctgggtgcagtggctaatgcctataatcccagcaatttgggaggctgaggtgggtggattgcttgagagtaggagtttgagaccagcctggccaacatgacaaaaccccaatacaaaaaatacaaaaaattagctggctgtggtggtgcacatgtaatcccagctactcaggaggctgaggcatgagaattgcttaagcctggggacagaggttgcagtgagccaatactgtacctctgcactccagcctgggggacagagtgagactgtatcaaaaaaaaaaaaga

SEQ ID NO: 524 - DNA, 303 bp, Homo sapiens
  source 1..303: mol_type = other DNA
ccaggggcagtggctcatgcctgtaatcccagcactttgggaggccgaagtgggcagatcacctgaggtcaggaattcgagaccagcctgaccaacacggtgaaaccccgtctctgctaaacacaaaaagttagctgggcatggtggcgcatgcctgtaatcccagctacttgggaggctgaggcaggagaatcacttgaacctgggaggcagaggttgcagtgagccgagattgccccactgcactccagcctgggtgataagagcaaaattcaaaaaaaaaaaaaaaaaaaaaggaaaaga

SEQ ID NO: 525 - DNA, 5258 bp, Homo sapiens
  source 1..5258: mol_type = other DNA
cactcagaggagataaaagaaaaaagaataaaaaacaatgaagcatgcctacaggatcttgaaaatagcctccaaaggcaaatgtaagagttattggccttaaagaggaggtagagaaagaggggtaaaagttttattcaaagggataatagaacttcccaaacctagagaaagatatcaatatccaaatacaagaaggttgtagaacatcaagcagatttaacccaaagattactacctcaaagcatttagtaatgaaattcccaaaggtcagggataaaggatcctaaaaggaacaagagagaagaaacagataacatacaatggagctccagtacatctggcagcacacttttcagtggaaatcttagaggttgggggtgattgacatgacatatttgctgaaaggaaaaaaaatttaccttagaatagtatatctggtgaaaatacccttcaaacatgaaaaagaaataaagactttcccagacaaacaatagctgagggacttcataaacaccagaactgtcctgcaagaaatgctaaagggagtacttcaatcaaaaagaaaaggatgttaatgagcaataagaaatcatctaaaggtacaaaactcactggtaatagtaagtacaaagaaaaacccagaatatcgtaaaactgtaactatgatgtatgaaccactcttaagcagaaagactaaatgatgaaccaatcagaaataataactacaacttttgaagacacagttcaataagatacattaataaatagaagcaacacaaagttaaaaagtggggggactaagttaaagtgcagaatgcttattttctttttgcttgtttctttgttgtgtatgcaaacagtgttcagttgtgttcagcttaaaataatgggttgcaaaatagtatttgcaagcttcatggtgacctcaaaccaaaaaacatacaacagatacacaaaaaaataaaaagtaagaaactaaattatatcatgaaagaaaatcatcttcactaaaaggaaaacaggaaggaaagaaagaaacgagaggaccacaaaacgaccacaaaaataacaaaatggcaggagaaagttcttacttatcaataatagcattgaatgtaaatagactaaaccctccaatcaaaagacatagagtggctaaatggatttttttaaaaaagacctagtgatctgttgcccacaagaaacacacttcaactataaagacacacatagactgaaaataaaggaatgaaaaaagatattccatgccatgggaaaccaaaaaagagcaagagtagctatacttatatatcaggcaaaatagatttcaagacaaaaactgtaagaagagacaaataggtcactatataatgataaaggggtcaatacagcaagagaatataacaattgttaatatatgtgcaccaaacactggagcacccagatatatatactaaatactattagagctaaagcgagatataggcctcagtgcaatcatagttaaagacttcaacaccctgcattcagcattggacagatcttccagacagaaaatcaacaaagaaacattggacttaatctgctctatagaccaaatggacctaatagatatttacagaacgtctcatctaatggctgcagaatatacatttttttcctcaacacatggatcattctcaaggataaaccgtatgttaactcataaaacaatattcaaaaaatattgaaataatatcaagcaccttctctgaccacagtggaataaaaccagagatcaacaacaagaagaattttggaaactatgcaaacaaatgaaaattaaatagtatgctcctgaatgaccagtggatcagtgaggaaattaagaaggaaattgaaaaatttattgaaacaaacaataatggaaatacaacatttcgaaacctatggtatacagcaaaaaactgtactaagagggaagtttatagctcttagtgcttacatcaaaaaagacgaaaaacttgaaatgaacagcctaatgatacatcttaaagaactggaaaagcaagagcgaaccaaatccaaaattgatagaagaaaataaataataaagatcagagcagaaattgaaatgaagaaaacaacacaaaagatcaatgaaacaaaaagttggttttttgagaagttaaacaaaataggcaaacctttagccagattaactaagaaaaaaagagagaagacccaaataaataaaatcagagatgcaaaaggagacattaaaactgataccacagaaattcaaaggatcattagtggctactatgagcaactatatacaaataaattggaaaatttagaagaaatggataatgaatcattagtggctactatgagcaactacataccaataaatttgaaatgttagaagaaatggataaatttcttgacacatacaacctgccaagattgaaccttgaagaaatccaaaactttaacagaccaataatgagtaatgagattgaagccttaataaaaagtctcccagtagagaaaagcccaggatcctatggcttcactgctgaattctaccaaacatttaaagaagaactaataccaatcctgctcaaactattttgaaaaataaaggaggaggcaatacttccaaactcattctacatggccaatatcatcctaataccaaaactaaagacacattaaaaaaaaaaaactacgggccaatatctctgatcaatattgatacaaatatcctcaacaaaatactagcaaaccaaattcaacaatacaataaaaagatcattcatcatgaccaagcgagatttatccctgggatgcaaggatggttcaaaatgtgcaaatcaatcaatatgataggtcatattaacataatgaagggcaaaaaccataggatcatttcaattgatgcaaaaaagcatgtgacagaattcaatatcccttcatgataaaaaccctcaaaaactaagtatagaaagaacatacctcaagagaatgaaagccatatatggctgacctcaagccaatatcatactgaatgggaacaaactgaaagcccttcctctaagatttggatcaccacaaggacactctttttcactgttattgttcaatatagtactggaggtcctagctagagcaatcagacaacagaaagaaataaagggcatccaaacaggaagataagtcaaattatccttgtttgcagatatatgatcttatatttggaaaaatccagagacgccatcaaaactgttagaactgataaacaaatttagtaaagttgcaagatgtaaaatcaacatacaaaaatcagtatcattcctgtatgctgactgaacaatctgagaaagaaatgcaaaaagtaatcccatttacaacagccacaaataaagtgaaatacgtaggaatcaacttgatcaaagatgtgaaagatctctataatcagaattaggaaacactgataaaagagattgaagaagacctcaaaaaatggaaagatatttcatgttcatgaattggaagaatcaatattgttaaaatgtccatgctacccaatgcaatctacagattctatgcaatatgtagactgcattctgtgacattcttcacagaaatagaaaaaacagtcctaaaactaatatggaattacaaaagacccggaatacccaaagctatcttatgcaaaaagaacagaactggccaaattactttacctgactgtaaattgtactgtagagctgtagtaacaaaaacaacatggtacaggcataaaaacagacacacagactaatggaacagagtatagaacccataaacaaatccacatacttagagttaactcatttttgagaagggtaccaagaatgtacactgtggaaaagacagtctcttcaataaatggtgctgggaagactggatgtccatatgcagaagaatgaaactggacccctgtctctctatatatatacaaaaatcaagcaaatggattaaagaattaaatataagacctcaaatacgaaactactacaagaaaacattggggaaaatctccaggacattagtctgggcaaaaattcctttcttgagtaatagcccacaagcacagacaaccaaagcaaaaattgacgaatggaatcatatcaagttaaaaagcttctatacagcaatggatatagtcaacaaagtgtagaaaaacccacagactgggagaaaatatttgcaaactacccacctgacaaggaattaatagccagagtatgtaaggagctcaaacaactctataagaaaaatatctaataatccagtttttaaatggtcagaagaagacatacgaaggtgctcagcatcattgatcatcagagaaatacaaatcacaactgcaaagagatttcatctcacctctgttaaaatggctaatatccaaaagacaggcaataacaaatgccggcaaggttgtggagaaaagagtaccctcatacatgttgatgaaactgtaagttagtgcaaccagtagggagaataatttggaggttcctgaaaaaactaaaaatagagctaccatatgatccagcaatcctgctcctaggtatatacacaaaagaaaggaaatcagtatatcagagagatatctgcactcctatgtttgttactgcattgttcacaatagctaaaatttggaagcaagttaagtgtccatcaacggatgaatggataaaaaaatgtggtacatatacacaatggagtactattcagccataaaaggaatgagatcctgtcattttcaacaacgtggatggaactggaggtcatcatgctaagtgcaataagccaggcatagaaagacaaatatcacatgttcttacttatttgtgggatctgaaagtcaaaacaatagaactaatggagatagagagtaaaaggatggttactagaggctgggaagggtagttggagtataagtggaaggtgaggatggttaatgggtcaaaagaaaaaaaggaaagaatgtgaacaagacctagtatttgacagcacaatagggtgtctatagtcaaaaataatgttattgtacattttaacataactaaaagataattggattgtttgtaacacaaatgtaaatgtttgaggggatatccaattttacatgatatgattattacacattgcatgcctgtgtcaaaacatctcatgtaccctgtaaatacatatgcgactatgtatgcacaaaaattaaa

SEQ ID NO: 526 - DNA, 2881 bp, Homo sapiens
  source 1..2881: mol_type = other DNA
acatagacacaataaaaaatgataaaggggatatcaccaccgatcccacagaaatacaaactaccatcagagaatactacaaacacctctacgcaaataaactagaaaatctagaagaaatggatacattcctcgacacatacactctcccaagactaaaccaggaagaagttgaatctctgaatagaccaataacaggctctgaaattgtggcaataatcaatagtttaccaaccaaaaagagtccaggaccagatggattcacagccgaattctaccagaggtacaaggaggaactggtaccattccttctgaaactattccaatcaatagaaaaagagggaatcctccctaactcattttatgaggccagcatcattctgataccaaagccgggcagagacacaaccaaaaaagagaattttagaccaatatccttgatgaacattgatgcaaaaatcctcaataaaatactggcaaaccgaatccagcagcacatcaaaaagcttatccaccatgatcaagtgggcttcatccctgggatgcaaggctggttcaatatacgcaaatcaataaatgtaatccagcatataaacagagccaaagacaaaaaccacatgattatctcaatagatgcagaaaaagcctttgacaaaattcaacaacccttcatgctaaaaactctcaataaattaggtattgatgggacgtatttcaaaataataagagctatctatgacaaacccacagccaatatcatactgaatgggcaaaaactggaagcattccctttgaaaactggcacaagacagggatgccctctctcaccgctcctattcaacatagtgttggaagttctggccagggcaatcaggcaggagaaggaaataaagggtattcaattaggaaaagaggaagtcaaattgtccctgtttgcagacgacatgattgtttatctagaaaaccccatcgtctcagcccaaaatctccttaagctgataagcaacttcagcaaagtctcaggatacaaaatcaatgtacaaaaatcacaagcattcttatacaccaacaacagacaaacagagagccaaatcatgagtgaactcccattcacaattgcttcaaagagaataaaatacctaggaatccaacttacaagggatgtgaaggacctcttcaaggagaactacaaaccactgctcaaggaaataaaagaggacacaaacaagtggaagaacattccatgctcatgggtaggaagaatcaatatcgtgaaaatggccatactgcccaaggtaatttacagattcaatgccatccccatcaagctaccaatgactttcttcacagaattggaaaaaactactttaaagttcatatggaaccaaaaaagagcccgcatcgccaagtcaatcctaagccaaaagaacaaagctggaggcatcacactacctgacttcaaactatactacaaggctacagtaaccaaaacagcatggtactggtaccaaaacagagatatagatcaatggaacagaacagagccctcagaaataatgccgcatatctacaactatctgatctttgacaaacctgagaaaaacaagcaatggggaaaggattccctatttaataaatggtgctgggaaaactggctagccatatgtagaaagctgaaactggaccccttccttacaccttatacaaaaatcaattcaagatggattaaagatttaaacgttagacctaaaaccataaaaaccctagaagaaaacctaggcattaccattcaggacataggcgtgggcaaggacttcatgtccaaaacaccaaaagcaatggcaacaaaagccaaaattgacaaatgggatctaattaaactaaagagcttctgcacagcaaaagaaactaccatcagagtgaacaggcaacctacaacatgggagaaaattttcacaacctactcatctgacaaagggctaatatccagaatctacaatgaactcaaacaaatttacaagaaaaaaacaaacaaccccatcaaaaagtgggcgaaggacatgaacagacacttctcaaaagaagacatttatgcagccaaaaaacacatgaagaaatgctcatcatcactggccatcagagaaatgcaaatcaaaaccactatgagatatcatctcacaccagttagaatggcaatcattaaaaagtcaggaaacaacaggtgctggagaggatgtggagaaataggaacacttttacactgttggtgggactgtaaactagttcaaccattgtggaagtcagtgtggcgattcctcagggatctagaaatagaaataccatttgacccagccatcccattactgggtatatacccaaaggactataaatcatgctgctataaagacacatgcacacgtatgtttattgcggcactattcacaatagcaaagacttggaaccaactcaaatatccaacaatgatagactggattaagaaaacatggcacatatacaccatggaatactatgcagccataaaaaatgatgagttcatgtcctttgtagggacatggatgaaattggaaaccatcattctcagtaaactatcgcaagaacaaaaaaccaaacaccgcatgttctcactcataggtgggaattgaacaatgagatcacatggacacaggaaggggaatatcacactctggggactgtggtggggtcgggggaggggggagggatagcactgggagatatacctaatgctagatgacacgttagtgggtgcagcgcaccagcatggcacatgtatacatatgtaactaacctgcacaatgtgcacatgtaccctaaaacttagagtataataaaaaaaaaaaaa

SEQ ID NO: 527 - DNA, 6043 bp, Homo sapiens
  source 1..6043: mol_type = other DNA
ggaggagccaagatggccgaataggaacagctccggtctacagctcccagcgtgagcgctcccagcgtgagctacgcagaagacggtgatttctgcatttccatctgaggtaccgggttcatctcactagggagtgccagacagtgggcgcaggccagtgtgtgtgcgcaccgtgcgcgagccgaagcagggcgaggcattgcctcacctgggaagcgcaaggggtcagggagttccctttccgagtcaaagaaaggggtgacggatgcacctggaaaatcgggtcactcccacccgaatattgcgcttttcagaccggcttaagaaacggcgcaccacgagactatatcccacacctggctcggagggtcctacgcccacggaatctcgctgattgctagcacagcagtctgagatcaaactgcaaggcggcaacgaggctgggggaggggcgcccgccattgcccaggcttgcttaggtaaacaaagcagccgggaagctcgaactgggtggagcccaccacagctcaaggaggcctgcctgcctctgtaggctccacctctgggggcagggcacagacaaacaaaaagacagcagtaacctctgcagacttaagtgtccctgtctgacagctttgaagagagcagtggttctcccagcacgcagctggagatctgagaacgggcagactgcctcctcaagtgggtccctgactcctgacccccgagcagcctaactgggaggcaccccccagcaggggcacactgatacctcacacggcagggtattccaacagacctgcagctgagggtcctgtctgttagaaggaaaactaacaaccagaaaggacatctacaccgaaaacccatctgtacatcaccatcatcaaagaccaaaagtagataaaaccacaaagatggggaaaaaacagaacagaaaaactggaaactctaaaacgcagagcgcctctcctcctccaaaggaacgcagttcctcaccagcaacagaacaaagctggttggagaatgattttgacgagctgagagaagaaggcttcagacgatcaaattactctgagctacgggaggacattcaaaccaaaggcaaagaagttgaaaactttgaaaaaaatttagaagaatgtataactagaataaccaatacagagaagtgcttaaaggagctgatggagctgaaaaccaaggctcgagaactacgtgaagaatgcagaagcctcaggagccgatgcgatcaactggaagaaagggtatcagcaatggaagatgaaatgaatgaaatgaagcgagaagggaagtttagagaaaaaagaataaaaagaaatgagcaaagcctccaagaaatatgggactatgtgaaaagaccaaatctacgtctgattggtgtacctgaaagtgatgtggagaatggaaccaagttggaaaacactctgcaggatattatccaggagaacttccccaatctagcaaggcaggccaacgttcagattcaggaaatacagagaacgccacaaagatactcctcgagaagagcaactccaagacacataattgtcagattcaccaaagttgaaatgaaggaaaaaatgttaagggcagccagagagaaaggtcgggttaccctcaaaggaaagcccatcagactaacagcggatctctcggcagaaaccctacaagccagaagagagtgggggccaatattcaacattcttaaagaaaagaattttcaacccagaatttcatatccagccaaactaagcttcataagtgaaggagaaataaaatactttatagacaagcaaatgttgagagattttgtcaccaccaggcctgccctaaaagagctcctgaaggaagcgctaaacatggaaaggaacaaccggtaccagccgctgcaaaatcatgccaaaatgtaaagaccatcgagactaggaagaaactgcatcaactaatgagcaaaatcaccagctaacatcataatgacaggatcaaattcacacataacaatattaactttaaatataaatggactaaattctgcaattaaaagacacagactggcaagttggataaagagtcaagacccatcagtgtgctgtattcaggaaacccatctcacgtgcagagacacacataggctcaaaataaaaggatggaggaagatctaccaagcaaatggaaaacaaaaaaaggcaggggttgcaatcctagtctctgataaaacagactttaaaccaacaaagatcaaaagagacaaagaaggccattacataatggtaaagggatcaattcaacaagaggagctaactatcctaaatatttatgcacccaatacaggagcacccagattcataaagcaagtcctcagtgacctacaaagagacttagactcccacacattaataatgggagactttaacaccccactgtcaacattagacagatcaacgagacagaaagtcaacaaggatacccaggaattgaactcagctctgcaccaagcagacctaatagacatctacagaactctccaccccaaatcaacagaatatacatttttttcagcaccacaccacacctattccaaaattgaccacatagttggaagtaaagctctcctcagcaaatgtaaaagaacagaaattataacaaactatctctcagaccacagtgcaatcaaactagaactcaggattaagaatctcactcaaagccgctcaactacatggaaactgaacaacctgctcctgaatgactactgggtacataacgaaatgaaggcagaaataaagatgttctttgaaaccaacgagaacaaagacaccacataccagaatctctgggacgcattcaaagcagtgtgtagagggaaatttatagcactaaatgcctacaagagaaagcaggaaagatccaaaattgacaccctaacatcacaattaaaagaactagaaaagcaagagcaaacacattcaaaagctagcagaaagcaagaaataactaaaatcagagcagaactgaaggaaatagagacacaaaaaacccttcaaaaaatcaatgaatccaggagctggttttttgaaaggatcaacaaaattgatagaccgctagcaagactaataaagaaaaaaagagagaagaatcaaatagacacaataaaaaatgataaaggggatatcaccaccgatcccacagaaatacaaactaccatcagagaatactacaaacacctctacgcaaataaactagaaaatctagaagaaatggataaattcctcgacacatacactctcccaagactaaaccaggaagaagttgaatctctgaatcgaccaataacaggctctgaaattgtggcaataatcaatagtttaccaaccaaaaagagtccaggaccagatggattcacagccgaattctaccagaggtacaaggaggaactggtaccattccttctgaaactattccaatcaatagaaaaagagggaatcctccctaactcattttatgaggccagcatcattctgataccaaagccgggcagagacacaaccaaaaaagagaattttagaccaatatccttgatgaacattgatgcaaaaatcctcaataaaatactggcaaaccgaatccagcagcacatcaaaaagcttatccaccatgatcaagtgggcttcatccctgggatgcaaggctggttcaatatacgcaaatcaataaatgtaatccagcatataaacagagccaaagacaaaaaccacatgattatctcaatagatgcagaaaaagcctttgacaaaattcaacaacccttcatgctaaaaactctcaataaattaggtattgatgggacgtatttcaaaataataagagctatctatgacaaacccacagccaatatcatactgaatgggcaaaaactggaagcattccctttgaaaactggcacaagacagggatgccctctctcaccgctcctattcaacatagtgttggaagttctggccagggcaatcaggcaggagaaggaaataaagggtattcaattaggaaaagaggaagtcaaattgtccctgtttgcagacgacatgattgtttatctagaaaaccccatcgtctcagcccaaaatctccttaagctgataagcaacttcagcaaagtctcaggatacaaaatcaatgtacaaaaatcacaagcattcttatacaccaacaacagacaaacagagagccaaatcatgggtgaactcccattcacaattgcttcaaagagaataaaatacctaggaatccaacttacaagggatgtgaaggacctcttcaaggagaactacaaaccactgctcaaggaaataaaagaggagacaaacaaatggaagaacattccatgctcatgggtaggaagaatcaatatcgtgaaaatggccatactgcccaaggtaatttacagattcaatgccatccccatcaagctaccaatgactttcttcacagaattggaaaaaactactttaaagttcatatggaaccaaaaaagagcccgcattgccaagtcaatcctaagccaaaagaacaaagctggaggcatcacactacctgacttcaaactatactacaaggctacagtaaccaaaacagcatggtactggtaccaaaacagagatatagatcaatggaacagaacagagccctcagaaataatgccgcatatctacaactatctgatctttgacaaacctgagaaaaacaagcaatggggaaaggattccctatttaataaatggtgctgggaaaactggctagccatatgtagaaagctgaaactggatcccttccttacaccttatacaaaaatcaattcaagatggattaaagatttaaacgttagacctaaaaccataaaaaccctagaagaaaacctaggcattaccattcaggacataggcgtgggcaaggacttcatgtccaaaacaccaaaagcaatggcaacaaaagacaaaattgacaaatgggatctaattaaactaaagagcttctgcacagcaaaagaaactaccatcagagtgaacaggcaacctacaacatgggagaaaatttttgcaacctactcatctgacaaagggctaatatccagaatctacaatgaactcaaacaaatttacaagaaaaaaacaaacaaccccatcaaaaagtgggcgaaggacatgaacagacacttctcaaaagaagacatttatgcagccaaaaaacacatgaagaaatgctcatcatcactggccatcagagaaatgcaaatcaaaaccactatgagatatcatctcacaccagttagaatggcaatcattaaaaagtcaggaaacaacaggtgccggagaggatgcggagaaataggaacacttttacactgttggtgggactgtaaactacttcaaccattgtggaagtcagtgtggcgattcctcagggatctagaactagaaataccatttgacccagccatcccattactgggtatatacccaaatgagtataaatcatgctgctataaagacacatgcacacgtatgtttattgcggcactattcacaatagcaaagacttggaaccaacccaaatgtccaacaatgatagactggattaagaaaatgtggcacatatacaccatggaatactatgcagccataaaaaatgatgagttcatatcctttgtagggacatggatgaaattggaaaccatcattctcagtaaactatcgcaagaacaaaaaaccaaacaccgcatattctcactcataggtgggaattgaacaatgagatcacatggacacaggaaggggaatatcacactctggggactgtggtggggtcgggggaggggggagggatagcattgggagatatacctaatgctagatgacacattagtgggtgcagcgcaccagcatggcacatgtatacatatgtaactaacctgcacaatgtgcacatgtaccctataacttagagtataataaaaaaaaaaaaa

SEQ ID NO: 528 - DNA, 705 bp, Homo sapiens
  source 1..705: mol_type = other DNA
ttgtatctctatgtactagcaataagcacatgggtactaaaattaaaaacataataaatactgtttttaattgcctgaaaaaaatgaaatacttacatataaatctaacaaaatgtgcaggacttgtgtgctgaaaactacaaaacgctgataaaagaaatcaaagaagacttaaatagcgtgaaatataccatgcttataggttggaaaacttaatatagtaaagatgccaattttatccaaattattacacaggataacattattactaccaaaatcccagaaaaattttacatagatatagacaagatcatacaaaaatgtatacggaaatatgcaaaggaactagagtagctaaaacaaatttgaaaaagaaaaataaagtgggaagaatcagtctatccagtttcaagacttacatagctacagtaatcaagactgtgatattgacagagggacagctatagatcaatgcaaccaaatagagaactaagaaagaagcacacacaaatatgcccaaatgatttctgacaaaggtgttaaaacacttcaacgggggaagatatgtctctcattaaagggtgtagagtcattgcacatctataggcaaaaagatgaacctgaacctcacaccctacagaaaaattaactcaaaatgactcaaggactaaacataagatatacatctataaaacatttagaaaa

SEQ ID NO: 529 - DNA, 2257 bp, Homo sapiens
  source 1..2257: mol_type = other DNA
agtggcgcccaaatgtggggctcgaacctgggtcgaagtgctgccggagcaacggttggagaatgtggacctacactggaggacacccgagtactcttaagcaatccctgtggtgagtaaggggagctcggaagcatccgggtaacaatgggacaagggtccagcaggcaggaggcttatatgagtctgcttcggcagctgctcagaaaggaggagtgaaggttagcactagccaacttatgcagctttttagtgcagtagagaaatattgcccctggtttctggactgaggaactatgaatgtagaggtctgggagaaggtaggcagctcactgaaaaaggcatataaggatagtgctgaggatattcctataactgtctggtcagtgtgggctctggttcgttccaccttggagccttttcacacagatgacaaggaggaggaatcagaggaagaaggagagtataacgaagtaacagaagaggtgacagagcaggtttgcttgccagctaaagcggcaaaggagggagaggtttgtccctacccctctacaccgcctcattattttgaagaaaaagagtggcctgaccctcagatctttcttttccagaggacactggacgaaaagcagttgcccaagtgactattcgagcagcgcctcgagtgaccactctcagttctattcaggcaggaatccagcaagctagacgagagggtgatatgaatgcttggcagttccctgttagaacacacccacctgatcaacaggggaatattatagctacatttgagccttttccttttaaagtacttaaataatttaaacaagctagtaatcaatatggaccagtttctccttttgtgatgtgacagttaaagaatgttgctgtctccagtgggatgatttctactgactgggatgcttttactcgagcttgcctgactctgctcagttcttacgatttaaaacttggtgggcagatgaagcttccattcaggctgcttgcaacgcccaggcccaacctcaaattaatataactgcagaccaacttttgggggtcggcagctgggttggtttagatgcataagtggtaatgcaggatgatgccatagagcagcttagaggagtgtgcattagagcatgggaaaaatcacttcaggaggagaacaatacccttcctttagtgctataaaatagggaccaaaagaaccatatgcagattttatagttcggttacaggagtctcttaaaaaggtgattgcagattcggctgctcaggatatagtgttgcggttactagctttcaacaatgccaatcctgagtgccaagccgctctgcgacctattagagggaaagcacatttagttgattatattaaggcctgtgacagtattggaggtagtctgcataaagctactttgttggcacaagctatggcagaactgagagtgggtaaaggaaatactgtgtttcctggagcttgttttaaccatgggaagcatggtcatattaaaaaaatagagaaagaatcagcgagtcaggctgccagatggaggaaaaaagaaaactgctgagtctgaaatatgtccaaaatgtaaaaaaggaaaacattgggctaataaatgtcactctaagtttgataaagatgggaacgtgattttgggaaatgccatgaggggcctgtcctgggccccgttctaaaccagggcatttccagctcaggccattccctcacccctgtacaatgtctgtcccctgctacagccggtagtgccgcagtagatttatgctgcacaaaagctgtgagccttctgcctggggaacccctgcaaaaagtgctaacaggcgtctgtggacccttgccagcagggatggtaggattgcttctaggcaggtctcgtttaaatttaaaaggagtgcaagtacatataggagtcattaagattacaatggggaaattcaaattgttataactacttctgttccctggaaagcagagccaggagagcatacagcatagctccttgttgtgccgtatatggaaatggggaaaagtaaaattaaatgaacaggaggatttggaagcacaaataaataaggcaaagcagcttattggctaaatcaaattactaataaacgtcctacctgtgaaataactattcagggaaagaaatttaaaggattggtagatacaggagtggacatttcaatcatttttctacagcactggccgtccgcgtggacaattcaaccc

SEQ ID NO: 530 - DNA, 171 bp, Homo sapiens
  source 1..171: mol_type = other DNA
aaaaatacaaaaattagccaggtgtggtggtgcacgtctgtaatcctaggtacttgggaggctgaggcacaagaattgcttaaacccaggagaaagaggttggagtgaggagctgagatcatgccactgtactccagcctgggcaacaaagcaagaatctgtctcaaaaaa

SEQ ID NO: 531 - DNA, 5165 bp, Homo sapiens
  source 1..5165: mol_type = other DNA
tttttttaaaattttttttaaaggttttcaactaaagtttgctaaaagttaacagtgtaacatgtatatagtaacttatattcttgtggcctagtccacaagacacaaaaaaggttcgctttggaaaagaatggttatcatcttcgaaaaaaaaaaggaaaaaaagggggggcggaatttatataaaaagagtattatatggtaaattcttgtcctgaaacaaattaactggttgtttaaagaaataaatatttgtaataagtcagaaagttgaggcatatcgaagaattgtctgcgaaagtcacgaaagagaaaaatgttataaaaaaatttatgcaaaaaatgttgtataatttaaaagtaactaggcctcctgaatgtaaaactgttgaaaaaaaaaacagtttatatgcaaggtgtataagaaaagtaaaatatatctttggtaaaagaattgtaaggaggcataaggatgtacattttcacctacattaaaaggttaaaaataattattgttttgaagatttaagcaagtttcaaaatgttaattgtaaagaaaattctgtgtgtaaacatattagctaaagttaaagaagtatcatccagtttttctgtgaactggacattaaagtaaaagcataacaggttttttcttaaagcaccaacctgctcttttgcaaaaattataaagggttaaaaagaatctataaaatcttaccttatggtcaaacattaacaattagatacatatgtctacaaggttttattaaaattaagtttaatattaataacacactaatataaagataaaatttagcttatctggtataaaaatcatacgagaagcactgttaaatgtaaaatggtatttggctttctttggtttaaaaactaataaaaataggtgctaaaggaaatttctcaggaaaaaggcactaaggactataaagtccactgccaaggtccccacatttaaaacaaaaggtcagttccttagaattatatgcttggtttattttccactttcctttctctcaaaaactaaaagtcttttagcacatgtaccacccctagaatttctagtaaaccagcaccagcctgaagatcacattctcatcgaaaggtggaaagaagaaaaactcgagccagcctggaaggaccctaccttgtgttgctaaccaccaagactgctgttcgtacagcaaaaaaggatggactcgtcacaccagaatcaagaaagtgccaccccctccagagtcatgggccacagtcccagaggaaaaccctgccaaactaaagctacgaaaaatctcttttcatctattctattactcttctttctttcctcgtgctattgctgaccatctagttattaacataaccaagtcaatttcacctcaaactattgcatttaatgcttgccttgttataccctgtggggacttgccaagtcaaagacagctctctacttcagaaaagtacttctgtccctcctgactctcctcagactggacattagtaaactaggaccatttaatccagggagatttcgataaagaccccagtgccaaccaggagtcttgtcccctgatgtagagtttttatgccgtagttggtccaacgttctgtggaccactaaagagcaagaatggactgccccaaccagtttttgtaatttcctaaaaccatacattcgttttactagaggatcatagaagttaaagagttaaaacaaactttaccaatgaagacaggataccaagatgcaaatgcctggttaaaatgcatcaaatattccatctgcacgttaaacaaaagcaattgttatgcttgtgcacatggcaggccagaggcccagattgtcccctttccactaaggtggtcctccagtcgaccagatgtgggctgcctggtagctcttttccaggattctacagcctgtattaataagtcatgccaagctctctctgctatatcccaaagtccagcaccctgcgggtcagcccccgagggccatccatcctccatctcccaacactaagttcacttcatgtctctcacaacagggaggaaacttagcgttccttggagacctgaaaggatgcagttagcttaagaattttcaagagcttatcaatcagtcagcccttgttcatccccgagcagatgtgtggtggtattgtggtggacctttactgggcactctgccaaataactggagtggcacttgtactttagtccaattggctatccctttcaccctggcatttcatcaaccagaaggaaaaaaagaaagacattgtaaagcgagagaagccccttatgggtctttcgactctcatgtctatttagatgcaattggagtcccacgaagaataccagatcaatttaaagcttgaaatcaaatagctgcaggatttaagtcaatattttagtgggtgacagttaataaaaatgtagattagataaactacatctattacaaccaacaacaacgaggttttcatgagttaaaagaaaacctcatgttggtcccagccctgaggctacctgacctgacaaaactctttacactctatgtgtcagaaagagaaaaaatggcagttggagttttaacccatactgtgaggccctggccaaggccagtggcctatctctcaaaacaactagacaggatttccaaaggctggcccccaggtctaagggccctagcagcaacagccctgttagcacaagaagcagataaactaacccttaggaaaacctgaatataaaggccccccatgctgtggtaactttaatgactaccaaaggacctcattggttacaaatgctagattaaccaagtaccaaagcttgctatgtgaaaatccccacataaccactgaagtttgcaacaccctaaaccccaccaccttgctcctggtatcagagagcctagttgaacatactgtgtagaggtgttggactcagtttattctagcaggcccaacctccgagactatccttaaacatcagtagactgtgaggggtacgtggacgggagtagcttcgccaacccctgcaaagtgactctgaagaagacgacaagctctgctccagtcacacccagaagctgactggtccacgcacggccgaagcatgagaaaactcattgcggaactcattttccttaaaatttggacttttacagtaaggacttcaactgaccttcctcagactgaggactgttccagtgtatacatcaagtcactgaggtaggacaaaaggttgctacagtcctattattttatggttattataagtgtactggaactctaaaaataacttgtttgtataatgttattctgtacaaggtatgtagcccaggaagtgaccaacctgatgtgtgttatgacccatctgagcctcccatgaccacggtttttaaaataagattaaggactgaggactggtgggggctcataaatgatatgagtaaagtgttagccaaaacagaagaaaaaggggtgcccaaacaagtcaccttaaaatttgatgcctgtgctgtcattaatagtaataagttaggaataaagtgtggttctcttaattagaaaagaggctatatggcagaaaataagtacatctgtcataaattaggactgtgtggaaataaatgtaaatactggtcttgtgtcatttaggccacttggatttaaaaaaaatgaaaaggatccagtccaccttcagaaaggaaaaaaatggcccttcctgtgctaagggacaatgtaaccccttagagctagtaataaccaatccccttgatcctcgctggaaaaaagagtagcgtgtgaccttaggaatcaatggggctggactgaatccccgagtaaatatcttggttcgaggagaagtttacaaatgctctcttgagccagtgtttcaaactttctatgatgaactaaatgtgccaataacagaatttccaggaaaaacaagaaatttgtttttgcaattagccgagcatgtagcccagtctctcactgtcacttcatgttatgtatgtggaggaactgtaatagcagatcaatggccatgggaagcccgagaattagtacctacagacccagttcctgatgaattcccagctcaaaagaatcaccctgataatttctgggtcctaaaagcctcaatcattagacaatactatatagcaagagtggagaaggacttcacccttcctgtaggaagactacatggtggagttcaaaccacacagagaaaaatccattcagtaaatttccaaagttgcagaccgtttaggcccacccagaatcccaccgggactggacagcccccactgggctatactggatatgtggacatagagcctacactaagctgcctgacaagtagttgtgttattggcactattaaaccatctttcttcctactgtccataaaaacaggagaactcctgggcttccctgtctatgcttcccgtgaaaagcatagctataagaaattgaaacaatgataaatggccccctgagagaatcatacagtattatgggcctgctacttaggcacaagatggctcgtggggataccggatccccatttatatgatcaactgaatcatacggttacaagctgtcttaaaaataatcactgcaaccggcagagccttgactattctggcccagcaagaaactcagatgagaaatgctatctatcaaaatagattagctctcgactacttgctagcagctgaaggagaggtctgtaggaaatttaaccttactaattgctgcctacacatagataaccaagggcaagtagttgaagacatagttagagatatgacaaaagtggcacatgtgcccgtgcaagtgtggcatggatttgatcctggggccatgtttagaaaatggttcccagcgctaggaggatttaaaactcttataataagagttataatagtaataggaacctacttactgctccctcgtttgctacctgtacttcttcaaatgataaaaagcttcatcgctaccttagtataccaaaatgcatcagcacaagtgtactatataaatcactattgatctgtctagcaagaagacatgggtagtaaacatgaaacaactcctgctattgagtgagagtctcaaagtggggga

SEQ ID NO: 532 - DNA, 816 bp, Homo sapiens
  source 1..816: mol_type = other DNA
tccgacttaggatttttcaactttaggatggtgtgaaagagacacccattcagtagaaactgtacttcgagttttgcattttgatcttttcctggcctagtgataatgtggtacagtacactcttgtgatgctgggcagcggcagcgagccacagctcccagtcacccatgtgatcacgggaatcaacaacccatcctctaccgtgtactgtgttgtcagcttttttggatattgtgttttgtgttttcacattccatcatgtctacaaaatgtccatcagtgtctcctgtttctggtgagatgaagaagaggaaggcaattactcttgaaatgaaactcaagataattgcccagcatgaaggtggcaagccagtaatggccattgcacgtgagttaggactttggcaatccacgatttcaaccatcttaagggataagaagcaaatcagtgatgcagcgaaatcgtcagcatcagttaaatccactgtcatcacaaagaaaagggctggaccaattgatgatatggaaaaattacttgttatgtggatggaagaccagatacagaagcgtataccacttagcctactgatgatccaggctaaggcaagaagtctttttaatatgctaaaagaccgtgccagtgatcctacatatacacaaatgtttaaagcaagtcatggatggttccagcgcttcaaaaggcgtcataattttcacaatgtaaagatcactggtgaggcagcacgtgctggtaatgaaggtgccatagcttttaaggaacagctgcataggataattatggctaaagatctttg

SEQ ID NO: 533 - DNA, 129 bp, Homo sapiens
  source 1..129: mol_type = other DNA
tagagtggaaataatgtagagtcgtcagactgaaaggccaggttgtagtcccagctcttatctgccatcttggacaaagcttttcccatctccagtctcagtttcccatccataaaatgggggaagtgg

SEQ ID NO: 534 - DNA, 322 bp, Homo sapiens
  source 1..322: mol_type = other DNA
ggccaggcatggtggctcacacctgtaatcccagcactttggaaggctgaggcaggaggatctcctaagtggagaagttcaagaccagcctgggcaacctggagaaaccccatatctactggagaggaaaaaaaaaaagtaaaaaaaattagccaatcacagtggcgcgtacctgtagtcccagctacttgggaagccaaggtgggaaaagcacttgagccaggaggtcaaagctgcagagagccgggatcactcactgcacgctgttgccactgcactccagcatgggcaatagaatgagactctgccaaaaaaataaaaa

SEQ ID NO: 535 - DNA, 6030 bp, Homo sapiens
  source 1..6030: mol_type = other DNA
ggggaggagccaagatggccgaataggaacagctccggtctacagctcccagcgtgagcgacgcagaagacggtgatttctgcatttccatctgaggtaccgggttcatctcactagggagtgccagacagtgggcgcaggccagtgtgtgtgcgcaccgtgcgcgagccgaagcagggcgaggcattgcctcacctgggaagcgcaaggggtcagggagttccctttccgagtcaaagaaaggggtgacggacgcacctggaaaatcgggtcactcccacccgaatattgcgcttttcagaccggcttaagaaacggcgcaccacgagactatatctcacacctggctcggagggtcctacgcccacggaatctcgctgattgctagcacagcagtctgagatcaaactgcaaggcggcaacgaggctgggggaggggcgcccgccattgcccaggcttgcttaggtaaacaaagcagcagggaagctcgaactgggtggagcccaccacagctcaaggaggcctgcctgcctctgtaggctccacctctgggggcagggcacagacaaacaaaaagacagcagtaacctctgcagacttaagtgtccctgtctgacagctttgaagagagcagtggttctcccagcacgcagctggagatctgagaacgggcagactgcctcctcaagtgggtccctgacccctgacccccgagcagcctaactgggaggcaccccccagcaggggcacactgacacctcacacggcagggtattccaacagacctgcagctgagggtcctgtctgttagaaggaaaactaacaaccagaaaggacatctacaccgaaaacccatctgtacatcaccatcatcaaagaccaaaagtagataaaaccacaaagatggggaaaaaacagaacagaaaaactggaaactctaaaacgcagagcgcctctcctcctccaaaggaacgcagttcctcaccagcaacagaacaaagctggatggagaatgattttgatgagctgagagaagaaggcttcagacgatcaaattactctgagctacgggaggacattcaaaccaaaggcaaagaagttgaaaactttgaaaaaaatttagaagaatgtataactagaataaccaatacagagaagtgcttaaaggagctgatggagctgaaaaccaaggctcgagaactacgtgaagaatgcagaagcctcaggagccgatgcgatcaactggaagaaagggtatcagcaatggaagatgaaatgaatgaaatgaagcgagaagggaagtttagagaaaaaagaataaaaagaaatgagcaaagcctccaagaaatatgggactatgtgaaaagaccaaatctacgtctgattggtgtacctgaaagtgatgtggagaatggaaccaagttggaaaacactctgcaggatattatccaggagaacttccccaatctagcaaggcaggccaacgttcagattcaggaaatacagagaacgccacaaagatactcctcgagaagagcaactccaagacacataattgtcagattcaccaaagttgaaatgaaggaaaaaatgttaagggcagccagagagaaaggtcgggttaccctcaaaggaaagcccatcagactaacagcggatctctcggcagaaaccctacaagccagaagagagtgggggccaatattcaacattcttaaagaaaagaattttcaacccagaatttcatatccagccaaactaagcttcataagtgaaggagaaataaaatactttatagacaagcaaatgttgagagattttgtcaccaccaggcctgccctaaaagagctcctgaaggaagcgctaaacatggaaaggaacaaccggtaccagccgctgcaaaatcatgccaaaatgtaaagaccatcaagactaggaagaaactgcatcaactaatgagcaaaatcaccagctaacatcataatgacaggatcaacttcacacataacaatattaactttaaatataaatggactaaattctgcaattaaaagacacagactggcaagttggataaagagtcaagacccatcagtgtgctgtattcaggaaacccatctcacgtgcagagacacacataggctcaaaataaaaggatggaggaagatctaccaagccaatggaaaacaaaaaaaggcaggggttgcaatcctagtctctgataaaacagactttaaaccaacaaagatcaaaagagacaaagaaggccattacataatggtaaagggatcaattcaacaagaggagctaactatcctaaatatttatgcacccaatacaggagcacccagattcataaagcaagtcctcagtgacctacaaagagacttagactcccacacattaataatgggagactttaacaccccactgtcaacattagacagatcaacgagacagaaagtcaacaaggatacccaggaattgaactcagctctgcaccaagcagacctaatagacatctacagaactctccaccccaaatcaacagaatatacatttttttcagcaccacaccacacctattccaaaattgaccacatagttggaagtaaagctctcctcagcaaatgtaaaagaacagaaattataacaaactatctctcagaccacagtgcaatcaaactagaactcaggattaagaatctcactcaaagccgctcaactacatggaaactgaacaacctgctcctgaatgactactgggtacataacgaaatgaaggcagaaataaagatgttctttgaaaccaacgagaacaaagacaccacataccagaatctctgggacgcattcaaagcagtgtgtagagggaaatttatagcactaaatgcctacaagagaaagcaggaaagatccaaaattgacaccctaacatcacaattaaaagaactagaaaagcaagagcaaacacattcaaaagctagcagaaggcaagaaataactaaaatcagagcagaactgaaggaaatagagacacaaaaaacccttcaaaaaatcaatgaatccaggagctggttttttgaaaggatcaacaaaattgatagaccgctagcaagactaataaagaaaaaaagagagaagaatcaaatagacacaataaaaaatgataaaggggatatcaccaccgatcccacagaaatacaaactaccatcagagaatactacaaacacctctacgcaaataaactagaaaatctagaagaaatggatacattcctcgacacatacactctcccaagactaaaccaggaagaagttgaatctctgaatcgaccaataacaggctctgaaattgtggcaataatcaatagtttaccaaccaaaaagagtccaggaccagatggattcacagccgaattctagcagaggtacaaggaggaactggtaccattccttctgaaactattccaatcaatagaaaaagagggaatcctccctaactcattttatgaggccagcatcattctgataccaaagccgggcagagacacaaccaaaaaagagaattttagaccaatatccttgatgaacattgatgcaaaaatcctcaataaaatactggcaaaccgaatccagcagcacatcaaaaagcttatccaccatgatcaagtgggcttcatccctgggatgcaaggctggttcaatatacgcaaatcaataaatgtaatccagcatataaacagagccaaagacaaaaaccacatgattatctcaatagatgcagaaaaagcctttgacaaaattcaacaacccttcatgctaaaaactctcaataaattaggtattgatgggacgtatttcaaaataataagagctatctatgacaaacccacagccaatatcatactgaatgggcaaaaactggaagcattccctttgaaaaccggcacaagacagggatgccctctctcaccgctcctattcaacatagtgttggaagttctggccagggcaatcaggcaggagaaggaaataaagggtattcaattaggaaaagaggaagtcaaattgtccctgtttgcagacgacatgattgtttatctagaaaaccccatcgtctcagcccaaaatctccttaagctgataagcaacttcagcaaagtctcaggatacaaaatcaatgtacaaaaatcacaagcattcttatacaccaacaacagacaaacagagagccaaatcatgggtgaactcccattcacaattgcttcaaagagaataaaatacctaggaatccaacttacaagggatgtgaaggacctcttcaaggagaactacaaaccactgctcaaggaaataaaagaggagacaaacaaatggaagaacattccatgctcatgggtaggaagaatcaatatcgtgaaaatggccatactgcccaaggtaatttacagattcaatgccatccccatcaagctaccaatgactttcttcacagaattggaaaaaactactttaaagttcatatggaaccaaaaaagagcccgcattgccaagtcaatcctaagccaaaagaacaaagctggaggcatcacactacctgacttcaaactatactacaaggctacagtaaccaaaacagcatggtactggtaccaaaacagagatatagatcaatggaacagaacagagccctcagaaataatgccgcatatctacaactatctgatctttgacaaacctgagaaaaacaagcaatggggaaaggattccctatttaataaatggtgctgggaaaactggctagccatatgtagaaagctgaaactggatcccttccttacaccttatacaaaaatcaattcaagatggattaaagatttaaacgttaaacctaaaaccataaaaaccctagaagaaaacctaggcattaccattcaggacataggcgtgggcaaggacttcatgtccaaaacaccaaaagcaatggcaacaaaagacaaaattgacaaatgggatctaattaaactaaagagcttctgcacagcaaaagaaactaccatcagagtgaacaggcaacctacaacatgggagaaaatttttgcaacctactcatctgacaaagggctaatatccagaatctacaatgaactcaaacaaatttacaagaaaaaaacaaacaaccccatcaaaaagtgggcgaaggacatgaacagacacttctcaaaagaagacatttatgcagccaaaaaacacatgaagaaatgctcatcatcactggccatcagagaaatgcaaatcaaaaccactatgagatatcatctcacaccagttagaatggcaatcattaaaaagtcaggaaacaacaggtgctggagaggatgcggagaaataggaacacttttacactgttggtgggactgtaaactagttcaaccattgtggaagtcagtgtggcgattcctcagggatctagaactagaaataccatttgacccagccatcccattactgggtatatacccaaatgagtataaatcatgctgctataaagacacatgcacacgtatgtttattgcggcactattcacaatagcaaagacttggaaccaacccaaatgtccaacaatgatagactggattaagaaaatgtggcacatatacaccatggaatactatgcagccataaaaaatgatgagttcatatcctttgtagggacatggatgaaattggaaaccatcattctcagtaaactatcgcaagaacaaaaaaccaaacaccgcatattctcactcataggtgggaattgaacaatgagatcacatggacacaggaaggggaatatcacactctggggactgtggtggggtcgggggaggggggagggatagcattgggagatatacctaatgctagatgacacattagtgggtgcagcgcaccagcatggcacatgtatacatatgtaactaacctgcacaatgtgcacatgtaccctaaaacttagagtataataaaaaaaaaaaaa

SEQ ID NO: 536 - DNA, 272 bp, Homo sapiens
  source 1..272: mol_type = other DNA
gctgggtgtggtggctcacacctgtaatcctagcactttgggaggccaaggcgggtggattgcctgagctcaggagtttgagaccaacctgggcaacatggttgaaaccctgtctctactaaaacaaaaaaaatcagccaggtgtggtagcgtgcacctgtagtcccagttacttgggaggctgaggcacaagaattgcttgaacctgggaggtagaggttgcagagatcatgccactgcactcccagcctgggtgacagagcaagactgtc

SEQ ID NO: 537 - DNA, 106 bp, Homo sapiens
  source 1..106: mol_type = other DNA
ctcttatctgctgccatgtgagatgtggctttcaccttccgccatgattgtgaggccttcccagccatgtagaactgtaagtccaataaacctcttttgtaaatta

SEQ ID NO: 538 - DNA, 425 bp, Homo sapiens
  source 1..425: mol_type = other DNA
ggcccagccacggccattgcaagggctcagcctggcaggctttgtgggggacgccgccctctctgccgcaggctgggtgcacggccgggcaccacagtgggactcaggcccgggaaggtcatgttctcgaccagagctttgctcccagtccaggcgcctcattcggaggcctcttgactgggaccacagagatgttttctccgctctgacttgtggctcaggactactttctgggtcgtgctcctgccccactgtgcctgggcccataaacaacaggagccttttgttccgctgacctgcccatcccagcagacccacctccccgcctggtgccttccatggagggaaatgggacaggggccgtcatctcccctctgcctcctgctttgctgttgccgagcacgagtaaagcttttgttcttact

SEQ ID NO: 539 - DNA, 10814 bp, Homo sapiens
  source 1..10814: mol_type = other DNA
tgcttctgggttctgagaatttgtcactaacataggattccagaacactgctgcagggttctgagtgattgttgctcacatgggattcaaaaacactcctgctgggttcagagtgttatccctcacatacgattccagaacactactacgaggttctgaatgtttgtccctcacaaaggattccagaacactgctgctgggttctgagtgtttgtccctcacataggattccagaacactgctgctgggttctgaatgtttgtccctcacataagattccagaactctgctatgcagttctgaatgtttgtggctcacataggattccagaacactgctgctgggttctgagtgtttgtccctcacataggattctggaacgatgctgctggtttctgagtgcttgtcccttatattggattccagaacaatgttatgagggtctgaatgtttttccctcatgtaggattcaagaacactgctaagagggtctcaatgtttttccctcacaaaggattgcagaactctgttgctgggttctgagtgtttgtccctgatataggattccagaacactgctatgagggtctgaatgtttttccctcacaaaggattccagaacgctgctgggttctgtttgtttgtcccccacaaaggattccagagcactgctgctggtttcttagtgtttgttccgcacataggattccagaacacttctgcggtggtttgaatatttgtccctcagataggattccagtacacagtgtctgggttctgagtgttggtccctcacataggattccagaacactgcttctgggttctgagtgtttgtcactcacataggattccagaacactgcttcgagtgtctgagtgtttgtccctcacaaaggatgctggaacactgctgctggtttctgagtgtttgtcactcacagaggattccagaacactgcttctgggttctgagtgtttgtccctcacacgagattccagaaaactgctatgagcgtctgaaggtttgtccataacaaaggattccagaacaatgctgctggatctgaatgtttgtccctcacacaggattccagaacactgcttcgagggtctgagtgtttgtccctcacacaggattccagaccactgcttctgggttctgagtgtttgttccacatataggattccagaacacagctacaaggctatgaaagtttgtctctcacaaaggatttcagaaaaatgctgctgggttctgagtgtttgtccctcacattggattccagaccactgcttctgggttctgagtgtttgttcctcacataggtttccagaaaactgctgctgggatctgagggattgtccctgtcattgagtacgagaacactgctgctgggttctgaaggtttgtccttcacttagaattgcagaatactgctgctaggttatgagggtttgtccctcacatagaattctagaactctgctgctgggttctgagcgtttctctatcacatgagattctggaacactgctaaaatgtaggaatgtttgtccctcacaaagagtccagagcaccgcttgtgggttctgagtgtttgtccctcacataggattgcagaacacagctgctaggttctgagtgtttgtcccaaacataggattccaaaacactgctcagagggtctgaaagtttcttcctcaccaaggattccagaacactgctgctgggttctgaaagtttgtccctcacatatgattccggaacactgctatgagggtctgaatatttgtccctcaaagggattccagaacactgcttttgagttctgagtgtttgtccgacacaaaggattccagaacactgctgctggcttctgagtgtttgtccctcacataggatttcagaacactgctatgagggtctgcatgtttttccctcagaaagcattctgtatcactgctacgagtgtctggatgcttgtccctcacataggattccagaacactgctactgggttctgactgttggtccttcacataggattccagaacactgctccgagggtctgaatgtttgtccctcacataggattccagaacatttgctgctggtttgtgagtgtttgtccctcatatgggattccagaacacttctgctgggttctgagtgtttgtccctcatataggataccagaacactgctattggcttcagagtgtttgtccctcacataggattccagaaaacttctaagaggttccgaatgttttccttcagataggattccagaacactgctgctgggttctgagtgtttgtccctcacataggattccagaacactgctaagagggtctgaatgtttgttcctcagataggattccaggacactgctgctgggttgtgtgtgtttgtcactcacatagaattccagaacactgctacgagtgtctcaatgtctgtccctcacatagaattccagaatacccctgctgtggtctgaatgtttgtccctcacatatgattccaggacgctgctgctgtgttctgcgtgtttgtcccccacataggattcaagaacactcctgctgtcttctgaacgtgtgtccttcacagaggattccagaacactgctactagcctctgaattgttgtcccccacagaggattccagaacactggtactagggtctgaatgtgagtctctcacataggattccagaacactaatgctagggtctgaatgtttgtccctcacctaggattgtagaacactgctacgaggttctgaatctttgtccatcacatagcattatagaacactgctacgaagttctgaatgtttttccctcagagagaatcaaagaacactgctgctagcgtctgaaattttgatgatcacataggattccagaactctcctgctgtggtctgtatgtttatctctcacataggattccagaatactgctacgagggtctgaatgtttgtccctcacaaaggattctagaacactgctgctgggttctgagtgattgtccctcacataggattccagaacactgctgctgggttctgagtgtttgtctctcacataggattccagaacactgctacgagggtctgaatgtttatccctcacaaagggttccagaacactgttactggattctgagtgtttgtccctcatattggattccagaacaatgctacgagggtctgaatatttttccctcacataggattctaaaacactgttacgagggtgtgaatgtttttccctcccaaaggaatccagaacactgcagctgggctctgaatgtttgtccctcatataggattccagaacactgctacgaggatctgaatgttttcccttacaaaggattgtagaactctgctactgggttctgtttatttgcccctcacaaaggattccagagcactgctgcatatttcttagtgttggcccctcacataggattccagaacacttctccgaggttctgaatgtttgccctcagataggattccagtacactggctggattctgagtgtttgtccctcacataggattccagatcactgctacaggttctgaatgtttgtccctcacaaaggattctagaacactgctactggtttctgagtgtttgtccctcacaaaggattctagaacacggcttctgggttctgtgtgtttgtccctcacataggatgccaaaacactgatgctgggttctgagtgtttgtccctcacttagcattccagaacactgctgctcggttctgagtgtttgtccctcacatacaattccagaacactgctacgaacttctgaaggtttgttgctcacataggactccagaacactgctgctgggttctgagtgtttgtccctcacataggattccagaacactgctacgagggtctgaatgtttatccctcccaaaggattccagaacactgctgctgggttctgagtgtttgcccctcaaataagattccagaacactactgtgacggtctgaatgtttttccctcacataggattcaaaagactgttacgagggtctgaatatttttccctaacaaaggattgtagaacactgtcactgggttctgtttgtaggtccctcccagaggattccagaacactaatacgagggtctgaatgtttgtccctcacataggattccagaacagagctgctgtgtcctgattgcttgtccctcacaaaggattccagaacactgatgctgggttctgagtgttcgtctatcacataggattccagaacaaagctgctgggtcctgattgtttgtccctcacaaaggattccaaaacactgctacgagggtctgaatgtttgtccctcatataggattccagatcactgttgctgtgttctgagtgtttgtccctcacataggattccagaacactgctgctcggttcttcgtgtttgtacctcatataggattccagagcactgctacaagactgaatgcttgtcccttacataggattccagaacactggtttgagagtctcaatatttgtccctcacaaaagattgcagacaactgctgctgagttctgagagtttgtccttcacttaggaatccactgattctgggttctgaatatttgtccttcacataggattccagaacagtgctgctggcttctgagtgattgtcccgcacgtaggattccagaacactgctacgagggtctgaatgttcttccctcacaaaggcttccagaacactgctgctggtttctgtttgtttgtccctcacaaaggattccagagcactgctgctggttatttagtgtttgttgcgcacataggattccagatcacttctgcgaaggtctgaatgtttagccctgagataggattccagtacacactggctcagttctgagtgtttgtaccacacactggattccagaacactgctgctgggttctgagtgtttgcccctcacataggattccagaaaactgctacgaggaccttaatgtttgtccatcactaaagattctagaacaatgctgctggatctgagtgtccctcacataggataacagaacactgcttcgagagtctaaatgtttgtccctcgcaaaggattctagaacgttgctgctggtttctgagtgtttgtcactcacataggattccagaacactactgctgagttctgaggctttgtacctcacatagtatttcagaacactgctacgaggttctgaatgtttgaccctcacagagcattgcagaacagggctatggggatctgaatgcttgtccctcacatatgaatccagaacactgctgcagggttcagagtgtttatccctcacataggattacagagcactgttctgagcgtctgagtgtttgacccccacaaaggattgcagaacactgctgctgggctctgagtgtttgtccctcacataggattctagaacattgctgctgggttctgagtgtttgtctctcacataggattccagaacacttctctgaggatctgaatgtttgtcccccacaaaggattccagaacactgctgctgggttctgagtgtttgtccatcaaataggattccagaacacggctgctgggctctgtttgtttgtccctcacaaaggattccagagcactgctgctggtttctgaatgtttgtctctcacataggattccagaacacttctacgaggctccgaatgtttgtccttcagataggattccagaacacagtggctgtgtgatgagtgtttttccctcaaataggattccacaacactgctttgagggtctgaatgtttgtatctcacaaaccagtctaaaacactacttctgggttctgagcgtttgtcactcactaaggattccagaacactgctgctgggttctgagtgcttgtccctcacatagaattctagaacactgcagctcgtttctgagtgtttctccatcactttggattccagaacactgctaatattgtctgaatgttcatcccttaccaaatattccagaacactgctgctgggttctgagtgtttggccctcacattggtttccagaacactgctgtgattgtctgaatgtttgtccctcaaaaattattccagagtactgctgctgggttctgagggtttgtctctcacatagaattaaagaatactgctgctgagttctgagattttgtacctcacatatgattccagaacactgctatgagggtctgaatatttgttcctcacagagcattccagaagggtgctatgagggtctgaatgcttgtcccttacataggattccagaacactgctctgagagtctgagtgtttaaccctcacaaaggattccagaacactgctgctgggttctgagtgtttgtcccacacataggattccagaacactgctgctggtttcttagtgtttgtctctcacataggattccagaacactgctacgaggatctgaatgttgtccctcacaaaggattagagaacactgctgctgagttctgagtgtttgtccctcacataggattccagaaccctgctgctggtttctttgggtttgtctctcacataggattgcagaacactgctacgattatctgaatgttgtccctcacaaagtattacagagcactgctgctgggttctctctgtttgcccctcacattggattacagaacactgctgctaggtttgagggtttgtccctcacataggattccaaaacactgttgctgggttctgagtgtttgtccctcacatacgattccagaacactgctacgattgtctgaatgtttgtccctcacaaagtattccagagcactcctgctgtgtaaagagtgtttgtccttcacataggattccagaacagtgctgctgggttctaagtgtttgtccctcacataagattccagaacactgctacgaggatctgaatgtttgtccctcacaaattattccagagtactgctgctgggttctgagtgtttgtccctcacataggattccagaacagtgctgctggattctgagagtttgtccctcacataagattccagaacactgatatgaacgtctgaatgtttgtccctcagataggattacagaacacagctacgagggtctgaatgattgtccctcacataggattccagaacacagtggctgggttctgagtgtttgtcccttatataggatttcagaacactgctatgaatttctgaatgtttgtcgctcacagaggattctagaactctgcggctgggttgtgtttgtcccccacataggattccagaatactgctgctgggttctgagtgtttgtccctcacgtaggattccagaacactgctacgagagtctgaatatttttgcctctcaaaggattccagaacactgctgcttggttgtgtttgtttgtccctcacaagggactccagtgcactgctgcaggtttctgagagtttttccctcacataggattcgagaacacttctacgagggtctgaatgtttgtatctcacagtggaatctacaaaactgctgcagggttctgagtgtttctcactcatataggattacggaacactgctgctgggttctgagagtttattcctcacatgggattccagaacacagctgctgggttctgagtgtttgtccctcacataggattgcagaacactgctacgagggtcagaatgtttgtccatcacaaaggactccagaatattgctgctgggttctgagtgtttgtccatcacataggattccagaacactgttccaagggtctgaatgtttttcccgctcaaaggattctagaacactgctgctgggttctgagtgtccctcacatacgattccagaacactgctgtgaggttctgaaacttcgtccatcacaaaggattccagaacacagctgctgtgttctgagtgtttgtcgctcacataggattccagacctctgctgctaggttctgagtgtttgtcccacacatagcattccagaacaatcctgctgggttctgagtgtttttccctcacataggattccagagcactgctgctgggttctgagtgtttgtcccatatatagaattccagaacaatgctacgatggtctgaatgtttttccctcacataggattccagaacactgctgagtgtctgaatgtttgtccttcacaaaggattccagagcactgctgctgggttctgagtgtttgtccctcatataggattccagaacactgctacgggggtctccatgtttttcccccacaaaggcttccagaacactgcgctggtttctatttgtttgtccctgtcaaaggatttgggagcacttctgctggtttcttagtgtttgtcacgcacatacgtttccagaacacttctacgagtttctgaacgcttgtccctcacaaaggattccagaaaactgctgctgggttctgagtgtttgtccctcacataggattccagaactctcctgctgggttctgtttgtttacccctcacaaaggaatccagagcactgctgctggtttctgagtgtttgtccctcactcaggataccagaacactgctacgatggtctgaatgtttgtccgtcacaaaggattcataacattgctatgggttctgactgtttgtccctcacaatggatttcagaaaactgctttgagagtctcaatgtttgtccctcacaaagtattccagagcactgctgcggggttctgtgtgtttgtccctcacatgggattcgaaaacactcctgctgggttcagagtgttttccctcacataaaattccagaacactgctacaaggttctgaatgtttgtccctcacaaaggattccagaacactgctgctgggttcttagtgtttgaccctcacataggattccagaacactgctgctgggttccgagtgtttctccctcacataggattccagaacactgctgctcggttctgagtgtttgtccctcacatagcattccagaacacaggtacgaagttctgaatgttcgtcactcaaataggattccagaacaatgctgctgggttctgaatgtttgacactcacacaggattccagaacactgctgctgggttctgagtgtttgtccctcacataggattccagaacactgcttcgaggatctaaatgtttttccctcacaaaggactccagaacactgttgctgggttctgagtgtttgcccctcatataggattccagaacaatgctacgagtatctgaatgtttttccctcacataggattccagaacgttgctacgagggtctgaatgaatactcacagagtattccagaacactgctgctgggttctgaatgtttgttcctcacataggattccagaacactgctgctgggttctgagtgtttgtccctcactttggattccagaaaacggctatgacagtctgaatttttgtccatcacaaaggattttagaacactgctgctggatctgagtgtttgtccctcacacaggattccagaacactgcttcgatggtctgaatgtttgtccctcacaaaggattctagaacactgctgctggtttcttagtgtttgtcactcacataggattccagaacactgctgctgggttctgagtgtttgtccctcacatacgattccagaacactgctacgaggttctgaatgtttctccctcacaaaggattccagaacactgcttctgagttctgagtgtttgtctgtcaaataggattccagaacactgctgctgggctctgtttgtttgtccatcacaaaggattccagaacactgctataggtttctgagtgtttgtccctcacataggattccagaacaattctacgaggctccgaatgtttgtccttcagataggatttcagaacacagtggctgggttctgagtgtttgtccctcacatagggtatcagaactctgctgctgggatctgagtgtttgtctttcacagaggattccagaacactgctgctttgttctgagtgtttgtccctcacataggattccagaacactgccgctcggtactgagggtttgtccctcacatagaattctagaacactgcagctcatttctgagtgtccctcacttaggattctagaacaatgctacgattgtctgaatgtttgttccttaccaagtattccagaacgctgctgctgggttctgagtgtttggcactcacattggtttccagaacactgctacgagggtctgaatgtttttccctcagaaaggattctggaaccctgctactggattctgtttgtttgtcccttacaaaggatttcagagcactgctcctggttgctgagtgtttgtccctcacttaggatcccagaacactgctgctgggttctgagtatttgtccctctcatgggattccagaaacctgctgttgagttcagagtgtttgtccctcacattggattccagaacactgctgctgggttttgagtgtttgtccctcacatagaattccagaacactgctacgaagttctgaatgtttgtcgctcacacaggattccagaacactgctgctgggttctgagtttttgtccctcacataggattccggaacaatgctatgagggtctgaatgtttatcccttacaaaggattacagaacagttctggaatcctatgtgagggacaaacactcagaacccagcagtgttctggaatcctatgtgagg

SEQ ID NO: 540 - DNA, 264 bp, Homo sapiens
  source 1..264: mol_type = other DNA
ggccaggcatggtggctcacacctgtaattccaaaaccttggcaggaagatcgattgaggccaggagctcaagacgagcctgggcaacatagaaagaccctatctttacaaaaaaaactttaaaaattagccaggtgtaatagcacatgcctgtctgtaatcccagctacttggcaggctggaaggtcaaggctgcagtgagccatgatcatgccactgcactccagcctaggtgacagagcaagaactcatctctaaaaaaaa

SEQ ID NO: 541 - DNA, 2073 bp, Homo sapiens
  source 1..2073: mol_type = other DNA
taagctcactatgaacaatcccttccactgattatactaaaaactctggaaggaatatacaacataactccctgagaactctgagaaacaaacaatagcagggtaaatgaggatggatgtcaactgcaagtacacagcacaaggggtgagtttcctttgccctgcccccttcatctactggatttaatctaagggcagcctcagtcatgaaactgcacaatgaaagcagacagtacaaattttgaagaaaagctctttctgtccagaggaccaggaatagggttccttgacacctgcagaatgtggagggatcaccatgtctatttttttcctcccattttcactaatagcctagcatgagggcagccctgctcatggagctgcactgctgatgtgatggtggcagtgccagcagagaggggcctaaaaacctcagtggaaaaacctgtctctggccagaggaacagaaaacagaagttcccttggtccctgtggcaaaagagtgtgtgtgagattctctttttcagggctacatgttcctggagatggcctcaatcccatggaattgtgtaacagtgcacataactaaaactctaagaagtaagaaagttttcaggcaagaaacatcagaaaaaaagtaatctgttgggaattagagagtgtgagggaaattccaaagagaagatcccctaaatcttgtattaactgtgttcattgtcaagctaagaatgtgcagaatatatgcaaagcaccatggcaaagtctttgagaactgaaatatgatataaaccactgcacaaactaagactgacctctgagttgcatgtatgcaaggtagaaccaaagaaacatatcaaaatttaaaaactgaactgacattggaatcattaactgtgaagacaagacagaatttttggtgtcagtctaatgggatttactgcatgctatccaaatataatattttttttctggaggattttaacaagactaagagttccacaacatagtattcaaaatgttcaggttacatctgaaattatttggcatataaaaacaatgaaaagggaacaaatcttaaaaaagaaaaaaatcagaagatgtcaaccctgagttggaccagatgttggaattataaaggatttaaaggcagctaacataatcatgctctatattgaaaatgcaaacactcttgaagtaaatgaaaagatagaccttttcagcacacaaactatcaaaagaatcaaatgtcaatatttgaattaaaaaatacatgataaaaattcactaggtgggctcaaaagtagaatggagatggcagatgaaagagtccatgaatttaaaattcatggactcaatagaaattatcgttgctgaaaaacagagtagaaaaaatatttaaaaaaacagactcaggaatctgtagtgcagtatcaaaagatctaatatttgtgccagtggaatcatagaaggagaaaacaaaggaattggtagataaaaaaaatagaaaaataatggctgaatgttttccaaatttgttcgcagggcaattcaaaatgcttggtggaactgaaacaagataaactcaaagaaaaatgattcccaaacacatcataattgaaactaatgaaagaaaaccatcttgaaagaagccaggggaaaattacacgttatttgtaggcaaacagtaattgaaattactgcagacttagtcagaaaccatgaagcccacaagacaaaaatttctaaaatgctgaaagaaaataattgtatctctagtgaaacatttttttagaaaacaggtgatataagattttctcagatgaagaaaaaccatgaattaatttccagcaggcctattctaaaataaatgctgaaggaagttcttcagtatgaatagatatgatattacaaggatatctggagcttcagtaatgtaaaaagaccaaaagaaattataagtagattactcttattctatacattatttaaaatatgtatgactgatgaaaaaatacagcattgtatggtagggctttaaatctctgtgtagatgtgatattgtgatatgtatgg

SEQ ID NO: 542 - DNA, 1604 bp, Homo sapiens
  source 1..1604: mol_type = other DNA
cttctattttctgtgtattcaaattatccatttccatgaacttttttgatatgagcattcaaatatcttcaaacttatttaaaattgacatttaaaaaacgttcttcaatttgggttccccatttagctacctctcattttcctttctacaccatcaaatttcccaaatagcaatcttatgttgactgtctaaacttctccatctccctttcaccttttaccccagtgcaaactagctcattttcccaccactacactgaacctgttcccagtaagactgtctctgacctctgaattggggaagccaacaggaacttctgtctttaccaatcttgtttgtttcgtataataccacttgcagtactccctgaaaaaagttcttcccttggttttggtaaaaccattctgtccttattttcacccctccatctctttggctaattattctcagtgtctcatgatgatacaattaactttttctcaaccaaaatcataagtgttctctagggttcttccccatgcttcttttctttctgatacacatccttcttgggataactcatactgctcatagctttaaatacttatatacaaatgacttttaaatcagtatctctacaccagatatgtcatcccatttatcctaatgactactggatattttagtttggatatcccactaaaacctccaactcaaaatgtccaaagccattgtgttcatcctttccatacatgaaccttttcccacatcctctatcacagtggatgacattaccatccattctgttgtcagagccctgggaaccatccttgatatgtcttttcctcctgacctcccatccaatctttaaatcatgttgattctatttatgaagtatctcttaaatttctcctccctttcctatctcattgacattatcactgtgatttccttagaacattaggctctaatttttccttgcttggaatttgtggtatattgcttctttgctattcttcctggtttgaggttctctgccatccattctttctttcagactgtggcaacagtggtttttctaacactgagattggttatgccattgcctgttcataattcttaaatggttttccactgacccagtataaatgttaacctgtttaacacagtgttaaagaccttttatgatgcttcccccaatgtgcccagtcttattctgtaccactcattacaacacatcttaggctttagcaatgctaaaccatttgcatttaactaaagatatcatactcttgcccctccaataccttttaaatgatatttactttttccagaatattattttgcactcatattgcatgcacacacaaacgcaaatctgcctgacacacttgtagtcatcttccaaccttcatcgcatttatctttccctgaattaattctctgcttcctctataatgccttttggggcttctattgtatctgtcatatgaaatattaacaatttacttgtatgtgtctttcccctacactctttgagctccctggggcagagattgcatccacagacttaataaattaattggtacatggctgatgatcaaagtagatgataaatgaatga

SEQ ID NO: 543 - DNA, 1993 bp, Homo sapiens
  source 1..1993: mol_type = other DNA
cctccatttgacctcagccatccacttgcttgaccactagagctggttaccttcaggaaattaaccacttccacaatcaaaataagatacttctgtctccaaataccacatgctccacttccagctcttttgctctgatatctcacatttgtgattctttgtgttcattaaagggtcttttgggcctcattctttctcactatcagactcctcctgtctttattttcttccttacttgcttctattacatagtttatcccttgtacaagctttccttttatataccttcaagtccctacctcctgtcctgccatcacattcaccaggcattagtgaactcactcacctgatttactattacttgtgtctatgtagctgagctttgttgcagaaaaccacacagcagaccatgctgaaatcctactaggctcataataagcacttcaggtgtgcttgcagcactccatgtctatcctactatttctatagtcagctcacactcctcctctgcatggtgactggttcatcactttcccatttgcatcatgcttcttctcccactccgtgtctgagctaccaaccttgcttcttacttcattgaaaacataaaagccattagatagactccctcttccttaggtttccaaacatgcaagtataccatcatctgcagccttcaactcctttttccctagtgtcgcaggaaaggcagtttcttgccacatacactctgtatcctatctcctttcaccctcttaaggactgagtgcattcaaccagccattttctctctcacatgctccgtctctctgcctgtagtggaccactcagcaggtaaatatttttaagagtctcctatatttagaaatctttccctgacttcatatttcctttcaattgctgccctacatttgctctcgtacaaattaaagtttctaaaaacacaaaaagttgtctacacaggctgactccacttccttgacctctatccttctcctgttcctcaacattcccccaaaaaaggttcttgttaagtcactgtaatctccatattccaaagccagtggatgtttttcccattctcatcttactcaacttctcagtagctttcaactcaagaatcacctgtttcttcctgaaaaattcccttgttttcaagtccatagaagcacgctcacatggtgtttctcctgcttcctaggtctccctgagctggggcagcatcctaggcatgatctcgatgtgtgcagtctcttctcttcccaggacttaaaaaaaaattcctctctacctacaacttccacatgtgtatctgcatccaagccctattttcagagcttcaggttaatacagacacagcctatgtgacatctcaaattcaaaactgttcctggcacacacctctcccctcattacattccctcagcgcattcctgcaccaagccagcttctgcattaaagtaaatggcatctccatttatctcagaatgctgggaggttgtttaaatactttattctcactcgttttcccacattcaatctgtgactgatccctgtccattctaccttcaaaatatgtttcaaatgtgtcgcttgtcattgtccccattgtcagcatccagtccagcatcatcagtcagcctccaaactcgtttcactatccaccctttcctctgtcccatccactcttcacaccatagacagagtgttattttaaaaacaaaagttgtgttttatcactattatcattgaaattcttcagaagctttgtgctgccctgagaataaatttcagaatccctaacatgggcttcaaagtcctggtccctgtgtgaccctgtccccatctgcacagtgctccagccacactgctgttcctgcattcctccatcacaccaggcttcctcctactcacggactcgggtctccctttgcctgaaatccctcgcctcctttttcacaggtgtcatctcaaatgtcactttctcagaaag

SEQ ID NO: 544 - DNA, 97 bp, Homo sapiens
  source 1..97: mol_type = other DNA
ggccaggtatggtggctcacacttgtaatctcagcctaggagttccagaccagcctgggtaatatagagaggccctatttctacaaaaaataaaaaa

SEQ ID NO: 545 - DNA, 6153 bp, Homo sapiens
  source 1..6153: mol_type = other DNA
ggaggagccaggatggccaaataggaacagctccggtctacagctcccagcgtgagcgacgcagaagatgggtgatttctgcatttccatctgaggtatcgggttcatctcactagggagtgccagacaatgggcacaggacagtgggtgcagctcaccgtgcgcaagctgaagcagggcaaggcattgcctcactcgggaagtgcaaggggtcagggagttccctttcctggtcaaggaaaggggggacagacggcacctggaaaatcaggtcactcccacccgaatactgcgcttttccgacgggcttaggaaatggcgcaccaggagattatatcccacacatggctcagggggtcctacgcccacggggtctcgctgattgctagcacagcagtttgagatcaaactgcaaggtggcagcgaggctgggggaggggcgcccaccattgtccaggctcacttaggtaaacaaagcagccaggaagctcgaactgggtggagcccaccacagctcaaggaggcctgcctgcctctgtaggctccacctctgggggcagggcacagacaaacaaaaagacagcagtaacctctgcagacttaaatgtccctgtctgacagctttgaagagagcagtggttctcccagcatgcagctggagatctgagaacgggcagactgcctcctcaagtgggtccctgacctgtgacccctgagcagcctaaatgggaggcaccccccagtaggggcagactgacacctcacacggccaggtattcctctgagacaaaacttccagaggaaggatcagacggcagcattcgcagttcacgaaaatccacggttctgcagacactgctgctgatacccaggcaaacagggtctggagtggacctctagcaaactccaacagacctgcagctgagggtcctgtctgttagaaggaaaaccaacaaacagaaaggacatccacaccaaaaacccatctgtacatcaccatcatcaaagaccaaaagtagataaaaccacaaagatggggaaaaaacggagcagaaaaactgtaaactctaaaaagcagagcgcctctcctcctccaaaggaatgcagctcctcaccagcaacggaacaaagctggacagagaatgactttgacgaattgagacaagaaggcttcagacgatcaaactactccgagctacaggaggaaattcaaaccaaaggcaaagaagttgaaaactttgaaaaaaatttagacgaaggtataactagaataaccaatacagagaagtgcttaaaggagctgatggagctgaaagccaaggctcgagaactacatgaagaatgcagaagcctcaggagccaatgggatcaactggaagaaagggtatcagtgatggaagattaaatgaatgaaatgaaaagagaagggaagcttagagaaaaaagaataaaaagaaacgaacaaagcctccaagaaatatgggactatgtgaaaagaccaaatctgcatctgattggtgtacctgaaagtgacagggagaatggaacccagttggaaaacactctgcaggatattatccaggagaacttccccaatctagcaaggcaggtcaacattcagattcaggaaatacagagaacgccacaaagatactcctcgagaagagcaactccaagacacataattgtcaggttcaccaaagtcgaaatgaaggaaaaaatgttaagggcagccagagagaaaggtcgggttacccacaaagggaagcccatcagactaacagcggatctctcggcagaaactctacaagccagaagagagtgggggccaatattcaacattcttaaagaaaagaattttcaacccagaatttcatatccagccaaactaagcttcataagtgaaggagaaataaaatactttacagagaagcaaatgctgagagatttttgtcaccaccaggcctgccctaaaagagctcctgaaggaagcactaaacatggaaaggaacaaccagtaccagccactgcaaaatcatgccaaaatgtaaagaccatcgagactaggaagaaactgcatcaactaacaagcaaaataaccagctaacatcataatgacagggtcaaattcacacataacaatattaactttaaatgtaaatggactaaatgctccaattaaaagacacagactggtaaattgtataaagagtcaagacccatcagtgtgctgtattcaggaaacacatctcacgtgcagagacacacataggctcaaaataaaagcatggaggaagctctaccaagcaaatggaaatcaaaaaaaggcaggggttgcaatcctagtctctgataaaacagactttaaaacaacaaagatcaaaagagacaaagaaggccattacataatggtaaagggatcaattcaacaagaagagctaactatcctaaatatatatgcacccaatacaggagcacccagattcataaagcaagtcctgagtgacctacaaagagacttagactcacacataataataataggagactttaacaccccactgtcaacattagacagatcaacgagacagaaagttaacaaggttaccgaggaattgaactcagctctgcaccaagcaggcctaatagacatctacagaactctccaccccaaatcaacacaatatacatttttttcagcaccacaccacacctattccaaaattgaccacatagttggaagtaaagctctcctcagcaaatgtaaatgatcagaaattataacaaactgtctctcagaccacagtgcaatcaaactagaactcaggattaagaaactcactcaaaaccactcaactacatggaaactgaacaacctgctcctgaatgactactgggtacataacgaaatgaaggcagaaataaagatgttctttgaaaccaacgagaacaaagacacaacataccagaatctctgggacacattcaaagcagtgtgtagagggaaatttacagcactaaatgcccacaagagaaagcaggaaagatccaaaagtgacaccctaacatcacaattaaaagaactagaaaagcaagagcaaacacattcaaaagctagcagaaggcaagaaataactaaaatcagagcagaactgaaggaaatagagacaaaaaaaacccttcaaaaattaatgaatccaggagctggttttttgaaaggatcaacaaaattgatagaccgctagcaagactaataaagaaaaaaagaagaatcaaatagacacaataaaaaatgataaaggggatatcgccacctatcccacagaaatacaaactaccatcaaagaatactacaaacacctctacacaaataaactagaaaatctagaagaaatggataagttcctcgacaatacaccctcccaagactaaaccaggaagaagttgaatctctgaatagaccaataacaggatctgaaattgtggcaataatcaataggtaaccaaccaaaaagagtccaggaccagatggattcacagccgaattctaccagaggtacaaggaggaactggtaccattccttctgaaactattccaatcaatagaaaaagagggaatcctccctaactcattttatgaggccagcatcaccctgataccaaagccaggcagagacacaaccaaaaaagagaattttagaccaatatccttgatgaacattgatgtaaaaatcctcaataaaatactggcaaaccgaatccagcagcacatcaaaaagcttatccaccatgatcaagtgggcttcatcgctgggatgcaaggctggttcaatatatgcaaatcaataaatgtaatccagcatataaacagaaccaaagacaaaaaccacatgattatctcaatagatgcagaaaaggcctttgacaaaattcaacaaccttcatgctaaaaactctcaataaattaggtattgatgggacgtatctcaaaataataagagctatctatgacagacccaaagccaatatcatactgaatgggcaaaaactggaagcattccctttgaaaactggcacaagacagggatgccctctctcactactcctattcaacatagtgttggaagttctggccagggcaattaggcaggagaaggaaataaagggtattcaattaggaaaagaggaggtcaaattgtccctgtttgcagatgacatgagtgtatatctagaaaaccccattgtctcagcccaaaatctccttaagctgataagcaacttcagcaaagtctcaggatacaaaatcaatgtacaaaaatcacaagcattcttatacactaataacagacaaacagagagccaaattatgagtgaactcccattcacaattgcttcaaagagaataaaatacctaggaatccaacttacaagggacgtgaaggacctcttcaaggagtactacaaaccactgctcaaggaaataaaagaggatacaaacaaatggaagaacattccatgctcatgggtaggaagaatcaatatcatgaaaatggccatactgcccaaggtaatttacagattcaatgccatccccatcaagctaccaatgactttcttcacagaattggaaaaaactactttaaagttcatatggaaccaaaaaagagcccgcatcaccaagtcaatcctaagccaaaagaacaaagctggaggcatcatgctacctgacttcaaactatactacaaggctacagtaaccaaaacagcatggtactggtaccaaaacagagatatagatcaatggaacagaacagagccctcagaaataacgccgcatatctacaaccatccgatctttgacaaacctgagaaaaacaagcaatggggaaaggattccctatttaataaatggtgctgggaaatctggctagccatatgtagaaagctgaaactggatcccttccttatatcttatacaaaaattaattcaagatggattaaagacttgaatgttagacctaaaaccataaaaaccctagaagaaaacctaggcattaccattcaggacataggcatgggcaaggacttcatgtctaaaacaccaaaagcaatggcaacaaaagccaaaattgacaaatgggatctaattaaactaaagagcttctgcacagcaaaagaaactaccatcagagtgaacaggcaacctataaaatgggagaaaattttcacaacctactcatctgacaaagggctaatatccagaatctacaatgaactcaaacaaatttacaagaaaaaaacaaacaatcccatcaaaaagtgggcaaaggatatgaacagacacttcttaaaagaagacatttatgcagccaaaagacacatgaaaaaatgctcatcatcactggccatcagagaaatgcaaatcaaaaccacaatgagataccacctcacaccagttagaatggcaatcattaaaaagtcaggaaacaacaggtgctggagaggatgtggagaaataggaacacttttacactgttggtgggactgtaaactagttcaaccattgtgggagtcagtgtggcgattcctcagggatctagaactagaaataccatttgacccagccatcccattactgggaatatacctaaaggactataaatcatgctgctataaagacacatgcacacgtatgtttattgcggcactattcacaatagcaaagacttggaaccaacccaaatgtccaacaatgatagactggattaagaaaatgtggcacatatacaccatggaatactatgcagccataaaaaatgatgagttcatgttctttgtagggacatggatgaaattggaaatcatcattctcagtaaactatcacaaggacaaaaaaccaaataccacatgttctcactcatagatgggaattgaataatgagaacacatggacaaaggaaggggaacatcacactctggggactgttgtggggtggggggaggggggagggatagcattaggagatatacctaatgctaaatgacgagttaatgggtgcagcacaccagcatggcacatgtatacatatgtaactaacctgcacattgcgcacatgtaccctacaacttaaagtataataataataaaaaaa

SEQ ID NO: 546 - DNA, 1998 bp, Homo sapiens
  source 1..1998: mol_type = other DNA
aggaaatcaagctgtctctatttgcagataatatgatcccatgtctagaaaaccctatcgtctcagccccaaagcttcttaagccaagaagcaactacagcaaagtctcaggatacaaaattaatgtgcaaaaatcataagcattcctatatacagagattcctatatctctgtgtctgtactgcacacctgaacaacaataagacaaccagagagccaaacatgattaactcccattcacaattgctacaaagagaataaaatacctaggaatacagctaacaagggaggtgaagggcctcttcaaggagaactacaaaccactgctcaaggaaatcagagaggacacaaacaaatggagaaacattccatgcttatggataggaagaattaatatcatgaaaatggccatactgcccaaagtaatttatagattcagtgttattcccattaaactaccattgacattcttcacagaattagaaaaaaatactttaaaattcatatggtacaaaaaaaagagcccttatagccaagacaatcctaagcaaaaagaacaaagctggaggcatcatgccacctgccttcaatctgtactacaaggctactataacccaaacagcatggtactggtacaaaaacagacacatagaccaatggaacagaatagagatctgagaaataagactgcacatctacaaccacttgatatttgacaaacctgacacaaacaagcaatggggaaaggattacctatttgataaatggtgctgggaaaactggctagccatatgcagaaaactgaaactggatccctcctttacaccttgtacaaaaataaactcaacatggactaaagacttaaatgtaaaacccaaaactataaaatccctagtaaaaaaatctaggtaataccattcaggacataggcatgggcaaagatttcatgatgaaaatgtcaaaagcaattgcaatagaagcaaaaattgacaaatgggacgtaattaaagagcttttgcacagcaaaagaacctattataagagtgaacagacaatgtacagaatgggagaaaatttttgcaatctatccatctgacaaaggtctaatatccaggatctacaagaaacttaaacaaatttacaagaaaaaaacaaccccattaaaaagtgggcaaaggacatgaacagagacctcaaaagaagacatttatgcaccaaaaaatatataaaaaatagctcaacatcactgatcattagagaaatgcaaatcaagaccacaatgagaaacaatctcatggcagtcagaatggcgattattaaaaagtcgagaaacaacagatgctggcaatgctgtggaggagtaggaacacttttacagtgttggtgggaatgtaaattagttcaaccattgtggaagacagtgtggtgattcctcaaagacctagaaccagaaataccacttgacccagcaatcccattactgggtatatactgaaaggaatataaattatcctattataaagatatatgcatgcatatgttcattgcagtactactcacaatagcaaagacatggattcaactcaaatgcctaccagtgatagagtggataaagaaaatgtggtatgtatacaccatcgaatactatacagccataagcaggaatgagttcatgtcctttgcagggacatagatggagcctgaagccattatcctcagcaaactaacacaggaacagaaaaccaaacaccacgtgttctcacttataagtgggagctgaacaatgagaacacatagaaacagagagaggaacaacacacactggggcctgtgggggtgggagagaaagcatcaggataaatagctaatgcatgtggggcttaatacctaggtgatgggttgataggtgcagcaaaccaccatggcacacatttacctacgtaacaaacctgcatgtcctgcacatgcatcctggaacttaaattaaacttttaaaaa

SEQ ID NO: 547 - DNA, 942 bp, Homo sapiens
  source 1..942: mol_type = other DNA
acatgggagaaaattttcgcaacctactcatctgacaaagggctaatatccagaatctacaatgaactcaaacaaatttacaagaaaaaaacaaacaaccccatcaaaaagtgggcgaaggacatgaacagacacttctcaaaagaagacatttatgcagccaaaaaacacatgaagaaatgctcatcatcactggccatcagagaaatgcaaatcaaaaccactatgagatatcatctcacaccagttagaatggcaatcattaaaaagtcaggaaacaacaggtgctggagaggatgtggagaaataggaacacttttacactgttggtgggactgtaaactagttcaaccattgtggaagtcagtgtggcgattcctcagggatctagaactagaaataccatttgacccagccatcccattactgggtatatacccaaatgagtataaatcatgctgctataaagacacatgcacacgtatgtttattgcggcactattcacaatagcaaagacttggaaccaacccaaatgtccaacaatgatagtctggattaagaaaatgtggcacatatacaccatggaatactatgcagccataaaaaatgatgagttcatatcctttgtagggacatggatgacattggaaaccatcattctcagtaaactatcgcaagaacaaaaaaccaaacaccgcatattctcactcataggtgggaattgaacaatgagatcacatggacacaggaaggggaatatcacactctggggactgtggtggggtcgggggaggggggagggatagcattgggagatatacctaatgctagatgacacgttagtgggtgcagcgcaccagcatggcacatgtatacatatgtaactaaccggcacaatgtgcacatgtaccctaaaacttagagtataataaaaaaaaaaa

SEQ ID NO: 548 - DNA, 1509 bp, Homo sapiens
  source 1..1509: mol_type = other DNA
agggaatttttaaaaaccagaaacctcatgaggatagggagaagaggtaaggagaaaacagaagcaaaattttaatggctggaaaatgggtgagcagtaattgaacagatcagaaactactaactctaggctagctgtaggaaaagctgaaaaccattgattaacacagaaacctcaaaaagttaaggaaccaacagcaagtcacggcaggaactgagggccaggcaggggaaggaataataggtagcacttgttaagagctttgtagaaaggaattcagttcttagatttccgcccctactgtctctggataactaatcctctgcctcaacgtttactttctgcaaaggggaaaacaaaatccctggactaggagatggcctgggtataagtaggaagaaaagagggtgtgaatgaacatgagcacgctgtgttaaatgtcgactcccaaaccccttcctccactgggttttggctcccaaatactagcagccagacctccgcccagttattcagatcaaaagacttcactagggtacctgaccgacccaggaggaaaggcatatagatgctaatattgggagtttaccaacaaacagcctgcctgctcagatccctctccagtgaaactgaaaggagacaagtttcacccacatgttgagtttttgatcagctttttagatccccacttcttaagaattactttatctgaggaaaaacgtcaaacaaaaccagaaaaattcagcttcaggaaaagactatacagagaaagaaaacatttttaaaacatcaacatggccagagaaataagactgagcaaccctgaagaaagagcagcatgctctcaaaggcagcattcagagaacttaacagctcttgcatagcttgacagcagaaacgggggaaaaaaatcaatagaagtgctagaagataaagtagaagaaatcttccagaaagtagaaaagaaagatgggaaacagtagagaaaatgaaaaaaattggaagactggttccagaggtccaatgtcccaacaacagttccaaacagagatgcagagtaggggagtcaaatagataaattaagaaaaagcccctgaactgaaagatgggagtttctagatggaaagggcccatcaagaccccagtaaaacagatgaaaacaaacctacatgaaggcccatggtagcaaaaccagaatgccaaagacaaagaaagggcttaaagtttccaaggaggaaaaaaaataggttatatagaaaacaatcaaaatggctttggttttgtcaacagtatactgtaaacaaagtcaagagagcaatggcttcgtaattctgggcttcataatttttcaaaaaaaaatttccaacctagacttatgttagccagaacaaaggcattttcagacatgcaacatctccaagtatttaccgccccacccccaacacactctccaggaaggtcctgaagaatatgtctcatcaaaaggagatactagtaaaacaaaaagga

SEQ ID NO: 549 - DNA, 1496 bp, Homo sapiens
  source 1..1496: mol_type = other DNA
ccaaaaaagagcccgcatcgccaagtcaatcctaagccaaaagaacaaagctggaggcatcacactacctgacttcaaactatactacaaggctacagtaaccaaaacagcctggtactggtaccaaaacagagatatagatcaatggaacagaacagagccctcagaaataatgccgcatatctacaactatctgatctttgacaaacctgagaaaaacaagcaatggggaaaggattccctatttaataaatggtgctgggaaaactggctagccatatgtagaaagctgaaactggatcccttccttacaccttatacaaaaatcaattcaagatggattaaagatttaaacgttagacctaaaaccataaaaaccctagaagaaaacctaggcattaccattcaggacataggcgtgggcaaggacttcatgtccaaaacaccaaaagcaatggcaacaaaagccaaaattgacaaatgggatctaattaaactaaagagcttctgcacagcaaaagaaactaccatcagagtgaacaggcaacctacaacatgggagaaaattttcgcaacctactcatcggacaaagggctaatatccagaatctacaatgaactcaaacaaatttacaagaaaaaaacaaacaaccccatcaaaaagtgggcgaaggacatgaacagacacttctcaaaagaagacatttatgcagccaaaaaacacatgaagaaatgctcatcatcactggccatcagagaaatgcaaatcaaaaccactatgagatatcatctcacaccagttagaatggcaatcattaaaaagtcaggcaacaacaggtgctggagaggatgtggagaaataggaacacttttacactgttggtgggactgtaaactagttcaaccattgtggaagtcagtgtggcgattcctcagggatctagaactagaaataccatttgacccagccatcccattactgggtatatacccaaaggactataaatcatgctgctataaagacacatgcacacgtatgtttattgcggcactattcacaatagcaaagacttggaaccaacccaaatgtccaacaatgatagactggattaagaaaatgtggcacatatacaccatggaatactatgcagccataaaaaatgatgagttcatgtcctttgtagggacatggatgaaattggaaaccatcattctcagtaaactattgcaagaacaaaaaaccaaacaccgcatattctcactcataggtgggaattgaacaatgagatcacatggacacaggaaggggaatatcacactctggggactgtggtggggtcgggggaggggggagggatagcattgggagatatacctaatgctagatgacacgttagtgggtgcagcgcaccaacatggcacatgtatacatatgtaactaacctgcacaatgtgcacatgtaccctaaaacttagagtataataaaaaaaaaaaa

SEQ ID NO: 550 - DNA, 2190 bp, Homo sapiens
  source 1..2190: mol_type = other DNA
gcaagccggaagtcagcatgtgccatctttaaagcactggggaagaaagagaaaccgtgaacctggaaatccacacccaacaaaaatctatcaaaaatgaagtcaaaataaagactgctaaagagaaacaaaagatcaaagagctcaatacaagccaatcttcagggagaagaaataagataccagctagaatcttacaaaagaactcagaacatgattaaaataaagttgatttttctaattttcagtcactggaagtgataaccatctagagcaaagctagtagctacgcaatgtgagttgaggcatatgtaaaagcagaacgcatgacagcaataccgcataagactgcagagtgaaattagaagcaggctggtgtaagatttttatagtacatgggaagcagtgtgttattatatgaagatatattgtaacaaattaaagatacacattataaagtctaggacagccacaagatatatttttaagatacataaataatgaataaacagtggagatgaaattaaaacctaacacaacttgagccaaaagcaggtgaaaagagatggagagaaatacaagaactggtggaacaaatagaaaatataagaaattagtagatacaaacatattaataatcatataaagtatagacagactacacataccaactaaatacagatattctctgacttgggataaaaaagaaatattcaactacatgctgtcagcaaggtgtatgcaaggtgtctgcaaggtatcttcacagtgacttaaatacaatggcatagataggttaaaataaaaagatacaaaatacattccatgctgacactaatgaaagtatggctattataatatcagacaaagtaaactttgaaagaagggagattgctatggataatgagggaccgtatgttatgataatgggtcaaccatacatcatgatatatgagtcaaggtatcacagtctgaatgtgtatgcatgtaacaacagggcttcaaaatacaaaaaacaaagactgagtgaactgaaagaagaaacagaaaatccaaaattataattagatttatggtgtcagctccaagatataaggaacttggcagtcgccaccccccaaattttacgataaggaaaagctgaacaaactgaaaattcacacctttcttggatccattagcgcactgagttgcaaggcaaactgtcattccaaaacctggaaagcccgaagagatatagcacctcagttcagctacctggagcagaaagaagctactggaggccttaaactcctaggagcacttacttggtgagcaattgggacccgttgctggaagttgggagcagaatggtgtgagaatgagaagcccctggggctgcagacataccaggactcatacactctttagggcttgtgagtagaattccccaatatttataaaatatatgaaaccataagtccaagccatccagagatacctaagcaatataattataataaatgcaagaaaaatgagaacattttaaaaataaaagcaacaccatcacacctagatatgtcgtattcatacttcagaaaaccaatcaggaagaataatattctgaagttagccagtttacctaaatcaaggggaaatgacaaatataaagataagagcagaaatcaatgaaattgaaaacagaaaaacaataaagaaaatcaccaaaagctgttttttttttgttttttttttagaaaatctataatattgataaatctctagtcagtataaccaagaaaaaaggagaaaagacacaaattaccagtatcaggaatgaggggtgggatttccctacagatcaaacatcatttgaaaaagaataagtgtagaggaataacaactttatgcccataaattcagcaacttagatgcaatcgacaaattccttcagagacacaaactatcaaaggtcactcaagaagccatggataaaccaaatagccctgtatctattaaagaagttgaattcatagttaagaatcttcccataaagaaaactcagacccagatgttttcatgagtggatttcattagtcaattaaggcacaaatgctaccaattcaaaaactttcccagaaattagaatcaaaggaaatacttttctttttaaataaattttaagtcacatctttttaattttatttaatt

SEQ ID NO: 551 - DNA, 6157 bp, Homo sapiens
  source 1..6157: mol_type = other DNA
gggggaggagccaagatggccgaataggaacagctctggtcaacagctcccaacgtgagcgatatagaagatgggtgatttgtgcatttccaactggggtactgggttcatctcactggggagtgccagacagtaggcgcaggatggtgggtgcagcgcactgtgcacgagccaaagcagggcgaggcatcgcctcacccaggaagtgcaaggggtcagggaattccctttcctagtcaaagaaaagggtgacagatggcaactggaaaatttggtcactcccaccctaatactgcgcttttccaacgggcttaaaaaacggcacaccaggatattatatccctcacccagctcagagggtcctacgccaatggagtctcactcattgctagcacagcagcccgagatcaaactgcaaggcagcagcgaggctgggcgaggggcgcccaccattgccgagttagttgtttgattaggtaaacaaagcagccgggaagctcaaactgggtggagcccaccacagctcaaggaggcctgcctgcctcttaggctccacctctgggggcagggcacagacaaacaaaaagacagcagtaacctctgcagacttaaatgtccctctctgacagctttgaagagagtagtggttctcccagcatgcagcttgagatctgagaatgggcagactgccttctcaagtgggtccctgacccccaagtagcctaactgggaggcaccccccagtaggggtggactgacacctgacacggccgggtactcctctgagacaaaacttccagaggaacgatcaggcagcagtatctgcggttcagcaaaatccgctgttctgcagccaccgctgctgatacccaggcaaacagtgtctggagtggacctccagcaaacttcaacagacctgcagctgagggtcctgtctgttagaaggaaaactaacaaagagaaaggacatccacaccaaaaacccatctgtacatcaccatcatcaaagaccaaaggtagataaaaccacaaagatgggaaaaaaacagagcagaaaaactggaaactctaaaaatccgagcgcctctcttcctccaaaggaacgcagctcctcaccaggaacagaacaaagctggacagagaatgactttgacgagttgagagaaggcttcagatgatcaaactattccaagctacaggaggaaattcgaactaatggcaaagaagttaaaggctttgaaaaaaaattagacgaatagataactagaataaccaatgcagagaagttcttaaaggacctgatggagctgaaaaccaaggcacgagagctatgtgacgaatgcagaagcctctgtagccgatgcgatcaactggaagaaagggtatcagcgatggaaaatgaaatgaatgaaatgaagcgagaagagaagtttagagaaaaaagaataaaaagaaacgaacaaagcctccaagaaatatgggactatgtgaaaagaccaaatctacatctgattggtgtatctaaaagtgacggggagaatggaaccaagttggaaagcattctgcaggatattatccaggagaacttccccaatctagcaaggcagaccaacattcaaatcaggaaatacagagaacgccacaaagatactcctcgagaagaggaattccaagacacataattgtcagattcaccaaagttgaaatgaaggaaaaaatgttaagagcagccagagagaaagctcgggttatccacaaagggaagcccagcagactaacagctgatctcttggcagaaactctacaagccagaagagagtgaggatcaatattcaacatttttaaagaaaagaattttcaacccggaatttcatatccagccaaactaagctgcataagtgaaggagaaataaaatactttacagacaagcaaatgctgagagattttgtcaccaccaagtctgccctaaaggagctcctgaaggaagcactaaacatggaaaggagcaaccggtaccagccgctgcaaaatcatgccaaaatgtaaagaccattgagactaggaagaaactgcatgaactaacgagcaaaataaccagctaacatcataatgacaggatcaaattcacacataacaatattaactttaaatgtaaatgggctaaatgctccaattaaaagacacagactggcaaattggataaagagtcaagacccatcagtgtgctgtattcaggaaacccatctcacgtgcagggacacacataggctcaaaataaagggatggatgaagatctaccaagcaaatggaaaacaaaaaaaaaggcaggggttgcaatcctagtctctgataaaacagactttaaaccaacaaagatcaaaagagacaaagaaggccattacataatggtaaagggatcaattcaacaagaagagctaactatcctaaatatatatgcacccaatacaggagcacccagattcataaagcaagttcttagtgacctacaaagagacttagactcccacacaataataatgggagactttaacactgcactgtcaacgttagacagaaagttagacagatcaacgagacagaaagttaacaaggatacccaggaattgaactcagctctgcaccaagaggacctaatagacatttatagaactctccaccccaaatcaacagaatatacattattttcagcaccacaccacacctacttcaaaattgaccacatagttggaagtaaagcactcctcagcaaatgtaaaagaacagaaattataacaaactgtctctcagaccacagtgcagtcaaactagaactcaggattaagaaactcactcaaaaccactcaactacatggaaactgaacaacctgctcctgaatgactactgggtaaataatgaaatgaaggcagaaataaagatgttctttgaaaccaacgagaacaaagacacaacataccagaatctctgggacacattcaaagcagtgtgtagagggaaatttatagcactaaatgcccacaagagaaagcaggaaagatctaaaattgacaccctaacaccacaattaactagagaggcaagagcaaacattcaaaagctagcagaagacaagaaataactaagatcagagcagaactgaaggaaatagagacacaaaaaacccttcaaaaaaatcaatgaatccagaagctggtttttcgaaaagatcaacaaaattgatagaccactagcaagactaataaagaagaaaagagagaagaatcaaatagacacaataaaaaatgataaaggggatatcaccaccgatcccacagaaatacaaactaccatcagagaatactataaacacctctatgcaaataaactagaaaatctagaagaaatggataaattcctcgacacatacatcctcccaagactaaaccaggaagaagctgaatctctgaatagaccaataataggagctgaaattgaggcaataatcaatagcttaccaatcaaaaaaagttcaggaccagatggattcacagccgaattctaccagaggtacaaagaggagctggtaccattccttctgaaactattccaaccaatagaaaaagagggaatcctccctaactcattttgtgaggccagcatcatcctgataccaaagcctggcagagacccaaccaaaaaagagaattttcgaccaatatccttgatgaacatcgatgcaaaaatcctcaataaaatactggcaaaccgaatccagcagcacataaaaaagcttatccaccatgatcaaatgggcttcatccctgggatgcaaggctggttcgacatacgcaaatcaataaacatactccagcatataaacagaaccaaagacaaaaaccacatgattatctcaatagatacagaaaaggcctttcacaaaattcaacaacacttcatactaaaaactctcaataaattaggtattgatgggtcttatctcaaaataataagagctatctatgacaaacccacagccaatatcatactgaacgggcaaaaactggaagcatgtcctttgaaaactggcacaagacagggatgccctctctcaccactcctattcaacatagtgttggaagttctggccagggcaatcaggcaggagaaggaaataaagtgtattcaattaggaaaagaggaagtcaaattgtccctgtttgcagatgacatgattgtatatctagaaaaccccattgtctcagcccaaaatctccttaagctgataagcaacttcagcaaagtctcaggatacaaaatcaatgtacaaaaatcacaagcattcttatataccaataacagacagagagccaaatcatgagtaaactcccattcacaattgcatcaaagagaataaaatacctaggaatccaccttacaagggatgtgaaggacctcttcaaggaggactacaaaccactgctcagtgaaataaaagaggatacaaacaaatggaagaacattccatgctcatgaataggaagaatcaatatcgtgaaaatagccatacagcccagggtaatttatagattcaatgccatccccatcaagctaccgatgactttcttcacagaattggaaaaaactactttaaagttcatatgaaaccaaaaagagcccgcatccccaagtcaatcctaagccaaaagaataaagctggaggcatcacactacctgacttcaaactatactacaaggctacagtaaccaaaacagcatggtactggtaccaaaccagagatatagaccaatggaacagaacagagccctcagaaataatgccgcttacctacaactatctgacctttgacaaacctgacaaaaacaagcaatggggaaaggattccctatttaataaatggtgctgggaaaactggctagccatatgtagaaaggtgaaactggatccgttccttacaccttatacaaaaattaattcaagatggattaaagacttaaatgttagacctaaaaccataaaaaccctagaagaaaacctaggcagtaccattcaggacataggcatgggcaagggcttcatgtctaaaacaccaaaagcaatggcaacgaaagccaaaattgacaaatgggatctaattaaactaaagaggttctgcacagcaaaagaaaccaccatcagagtgaacaggcaacctacagaatgggagaaaatttttgcaacctgctcatctgacaaagggcaaatatccagaatctacaatgaactcagacaagtttacaagaaaaaaacaaacagccccatctttttgatgggcgaaggatatgaacagacacttctcaaaagaagacatttatgcagccaaaaaaacagatgaaaaaatgctgataattactggccatcagagaaatgcaaatcaaaaccacaatgagataccatctcacaccagttagaatggcaatcattaaaaagtcaggaaacaacaggtgctggagaggatgtggagaaataggaacacttttacactgttggtgggactgtaaactagttcaaccattgtggaagtcagtgtggtgattcctcagggatctagaactagaaataccatttgatccagccatcccattactgggtatatacccaaaggattataaatcatgctgctataaagacacatggacatgtatgtttattgcagcactattcacaatagcaaagacttggaaccaacctaaatgtccaacaacgatagactggattaggaaaatgtggcacatacacaccatggaatactatgcagccataaaaaatgatgagttcatgtcctttgtagggacatggatgaaactggaaaccatcattctcagcaaactatcgcaaggacaaaaaaccaaacaccgcatgttctcactaataggtgggaattgaacaatgagaatacatggacacaggaagggaaacatcacacaccggggactgttgtggcgtcaggggcagggggagggatagcattgggagatacacctaatgctaaatgacgagttaatgggtgcaacacaccaacatggcacaagtatacatatgtaacaaacctgcacgttgtgcacatgtaccctaaaacttaaagtgtaataataataaa

SEQ ID NO: 552 - DNA, 6009 bp, Homo sapiens
  source 1..6009: mol_type = other DNA
ggaggagccaagatggccaaataggaacagctccagtctacagctcccagcctgagtgacgcagaagatgggtgatttctgcatttccatctgaggtaccgggttcatctcactagggagtgacagacagcgggcgcaggtcagtgggtgcacgcaccgtgcgcgagctgaagcagggtgaggcattgcctcactcgggaagtgcaaggggtcagggagttccctttcctaatcaaacaaaggggtgacggatggcacctggaaaatcgggtcactcccacccaaatactgtgcttttccgacgggcttaaaaaacagcacaccatgagattatatcccgtgcctggctcggagggtcctaccccacggagtctcgctgattgctagcacagcagtctgagatcaaactgcaaggcagcagcgaggctgggggaggggcacccacctttgcccaggcttgcttaggtaaacaaagcagccgggaagctcgaactgggtgaagcccaccacagctcaaggaggcctgtgtgcctctgtaggctccacctctgggggcagggcacagacaaacaaaaagacagcagtaacctctgcagacttaaatgtccctgtctgacagctttgaagagagcaggggttctcccagtacgcagctggagatctgagaacgggcagactgcctcctcaagtgggtccctgacccctgacgcccgagcagcctaactggggggcaccctccagcaggagcacactgacacctcacactgcagggtactccaacagacctgcagctgagggtcctgtctgttagaaggaaaactaacaaacagaaaggacatccacaccaaaaacccatctgtacatcaccatcatcaaagaccaaaagtagataaaaccacaaagatggggaaaaaacagaacagaaaaaattggaaactctaaaaatcagagtgcctctcctcctccaaaggaacgcagctcctcaccagcaacagaacaaagctggacggagaatgactttgacaagctgagagaagaagccttcagacgatcaaattactctgagctacgggaggatattcaaaccaaaggcaaagaagttgaaaactttgaaaaaaattcagaagaatgtataactccaataaccaacacagagaagtgcttaaaggagctgatggagctgaaaaccaaggctcgagaactacatgaagaatgcagaagcctcaggagccgatgcgatcaactggaagaaagggtatcagcaatggaagatgaaatgaatgaaatgaagcgagaaggaaagtttagagaaaaaagaataaaaagaaatgagcaaagcctccaagaaatatgggactatgtgaaaagaccaaatctacatctgattggtgtacctgaaagtgatggggagaatggaaccaagttggaaaacactctgcaggatattatccaggagtatttccccaatctagcaaggcaggccaatgttcagattcaggaaatacagagaacaccacaaagatattcctcgagaagagcaactccaagacacataattgtcagattcaccaaagttgaaatgaaggaaaaaatgttaagggcagccagagagaaaggtcaggttaccctcaaagggaagcccatcagactaacagcggatctctcggcagaaaccctacaagccagaagagagtggggaccaatattcaacattcttaaagaaaagaattttcaacccagaatttcatatccagccaaactaagcttcataagtgaaggagaaataaaacactttacagacaagcaaatgctgagagattttgtcaccaccaggcctgccctaaaagagctcctgaaggaagcgctaaacatggaaaggaaaaaccggtaccagccactgcaaaatcatgccaaaatataaagaccatcgagactaggaagaaactgcaacaactaacaagcaaaataaccagctaacatcataatgacaggatcaaattcacacataacactattaactttaaatgtaaatggactaaatgctccaattaaaagacacagactggcaaattggataaagagtcaagacccatcagtgtgctgtattcaggaaacccatttcacatggagagacacacataggctcaaaataaagggatggaggaagatctaccaagcaaatggaaaactaaaaaaggcaggggttgcaatcctagtctctgataaaacagactttaaaccaacaaagatcaaaagagacaaagaaggcaattacataatggtaaagggatcagttcaacaagaagagctaactatcctaaatatatatgcacccaatacaggagcacccagattcataaagcaagtcctgagtgacctacaaagagacttagactcccacacattaaaaatgggagactttaacagcccactgtcaacatcagacagatcaatgagatagaaagtcaacaaggatacccaggaattgaactcagctctgctccaaacggacctaatagacatctacagaactctccaccccaaatcaacagaatatacatttttttcagcaccacaccacacctattccaaaattgaccacatacttggaagtaaagctctcctcagcaaatgtaaaagaacagaaattataacaaactgtctctcagactacagtgcaatcaaactagaactcaggattaagaatctcactcaaaaccgctcaactacatggaaactgaacaacctgctcctgaatgactactgggtacataacgaaataaaggcagaaataaagatgttctttgaaaccaacgagaacaaagacacaacataccagaatctctgggacacattcaaagcagtgtgtagagggaaatttatagcactaaatgcccacaagagaaagcaggaaagatcaaaaattgacaccctaacatcacaattaaaacaactagaaaagcaagagcaaacacattcaaaagctagcagaaggcaagaaataactaaaatcagagcagaactgaaggaaatagagacacaaaaaacccttcataaaattaatgaatccagaagttggttttttgaaaggatcaacaaaattgatagaccgctagcaagactaataaagaaaaaaagagagaagaatcaaatagacacaataaaaaatgataaaggggatatcaccactgatcccacagaaatacaaactaccatcagagaatactacaaacacctctacacaaataaactagaaaatctagaagaaatggataaattcctggacacatacactctcccaagactaaaccaggaagaagttgaatctctgaatagaccaataagatgatctgaaattgtggcaataatcaatagcttaccaaccaaaaagagtccaggaccagatggattcacagccgaattctaccagaggtacaaggaggagctggtaccattccttctgaaactattccaatcaatagaaaaagagggaatcctccctaactcattttatgaggccagcatcattctgataccaaagccaggcagagacacaaccaaaaaagagaattttagacccatatccttcatgaacattgatgcaaaaatcctcaataaaatactggcaaactgaatccagcagcatatcaaaaagcttatccaccatgatcaagtgggcttcatccctgggatgcaaggctggttcactatacgcaaatcaataaatgtaatccagcatataaacagaaccaaagacaaaaaccacatgattatctcaatagatgcagaaaagacctttgacaaaattcaacaacccttcatgctaaaaactctcaataaattaggtattgatgggacatatttcaaaataataagagctatctagaacaaacccacagccaatatcatactgaatgggcaaaaactggaagcattccctttgaaaatgggcacaagacagggatgccctctctcaccactcctattcaacatagtgttggaagttctggccagggcaattaggcaggagaaggaaataaagggtattcaattaggaaaagaggaagtcaaattgtccctctttgcagatgacatgattgtatatctagaaaaccccattgtctcagcccaaaatctccttaagctgataagcaacttcagcaaagtctcaggatacaaaatcaatgtgcaaaaatcacaagcattcctatacaccaacaacagacaaacagagagccaaatcataagtgaactcccattcacaattgcttcaaagagaataaaatacctaggaatccaacttacaagggacgtgaaggacctcttcaaggaaaactacaaactgctgctcaaggaaataaaagaggatacaaagaaatggaagaacataccatgctcatgggtaggaagaatcaatatcgtgaaaatggccatactgcccaaggtaatttacagattcaatgccatcctcatcaagctatcaatgcctttcttcacagaattggaaaaaactactttaaagttcatatggaaccaaaaaagagcccgcatcgccaagtcaatcctgagccaaaagaacaaagctggaggcatcacactatactacaaggctacagtaaccaaaacagcatggtactggtacaaaaacagagatataaatcaatggaacagaacagagccctcagaaataatgccgcatatctacaactatctgatctttgacaaacctgagaaaaacaagcaatggggaaaggattccctatttaataaatggtgctgggaaaactggctagccatagtagaaagctgaaactggatcccttccttacaccttatacaaaaatcaattcaacatggattaaaaacttaaacgttagacctaaaaccataaaaaccctagaagaaaacctaggcgataccattcaggacataggcatgggcaaggacttcatgtctaaaacaccaaaagcaatggcaacaaaagccaaaattgacaaatgagatctaattaaactaaagagcttctgcacagcaaaagaaactaccatcagagtgaacaggcaacctacaaaatgggagaaaattttcgcaacctactcatctgacaaagggctaatatccagaatctacaatgaactcaaacaaatttacaagaaaaaaacaaccccatcaaaaaaagtgggcgaaggacatgaacagacacttctcaaaagaagacatttatgcagccaaaaaacacatgaaaaaatgctcaccatcactggccatcagagaaatgcaaatcaaaacaacagtgagataccatctcacaccagttagaatggcaatcattaaaaagtcaggaaacaacaggtgctggagaggatgtggagaaataggaacacttttacactgttggtgggactgtaaactagttcaaccattgtggaagtcagtgtggcgattcctcagggatctagaactagaaataccatttgacccagccatcccattactgggtatatacccaaaagactataaatcttgctgctataaagacacatgcacacgtatgtttattgcggcattattcacaatagcaaagacttggaaccaacccaaatgtccaacaatgatagactggattaagaaaatgtggcacatatacaccatggaatactatgcagccatcaaaaatgatgagttcatgtcctttgtagggacatggatgaaattggaaatcatcattctcagtaaactatcacaagaacaaaaaaccaaacaccgcatattatcactcataggtgggaattgaaaaatgagatcatatggacacaggaaggggaacatcacactctggggactgttgtggggtggggggagggggggagggatagcactgggagatatacctaatgctagatgatgagttagtgggtgcagcacaccagcatggcacatgtatacgtatgtaactaacctgcacaatgtgcacatgtaccctaaaacttaaagtataataaaaaaaaa

SEQ ID NO: 553 - DNA, 2946 bp, Homo sapiens
  source 1..2946: mol_type = other DNA
ctggttttttgaaaggatcaacaaaattgatagaccactagcaagactaataaagaaaaaaacatagaagaatcaaatagatgcaataaaaaatgataaagggaatatcaccactgatcccacagaaattacaaagtaccatcagagaatactacaaacacctctatgcaaataaactagaaaatctagatgaaatggacaaattccttgacacatacactctcccaagagtaaaccaggaagaagctgaatctctgaagagaccaataaaaggagctgaaattgtggcaataatcaagagcttaccaatgaaaaagagtcctggatcagatggattcacagccaaattctaccagaggtgcaaggaggaactgataccattccttctgaaactattccaatcaatagaaaaagagggaatcctccctaactcattttatgaggccagcatcatcctgttaccaaagccgggcagagacacaaccaaaaaagagaattttagaccaatatccttgatgaacatcgatgcaaaaatcctcaataaaatactggcaaactgaatccagcagcacatcaaaaagcttatccaccatgatcaagtgggcttcatccctgggatgcagggctggttcaatatatgccaattaatcaataaatgtaatccagcatataaacagaaccaaagacaaaaaccacatgattatataatagatgcagaaaaggcctttgacaaaattcaatgacacttcatgctaaaaactctcaataaattaggtattgatgtgacgtatctcaaaataataagagctatctatgccaaacccacagccaatatcatactgaatgggcaaaaactggaagcattccctttgaaaactggcacaagacagggatgccctctctcaacactcctattcaacatagtgttggatgttctggccagggcaattaggcaggagaaggaaataaagggtattcaattaggaaaagaggaagtcaaattgtccctgtttgcagatgacatgattgtatacctagaaaaccccattgtctcaacccaaaatctccttaagctgataagcaacttcagcaatgtctcaggatacaaaatcaatgtacaacaatcacaagcattcttatacaccaataacagagagccaaatcatgagtgaactcccattcataattgcttcgaagagaataaaatacctaggaatccaacttacaagggatgtggaggacctcttcaaggagaactacaaaccactgctcaatgaaataaaagaggatacaaacaaatggaagaacattccatgctcatgggtaggaagaatcaatatcatgaaaatggccatactgcccaaggtaatttatagattcaatgccatccccatcaagctaccaatgattttcttcagagaattggaaaaaactactttaaagttcacatggaaccaaaaaagagcccgcatcgccaagtcactcctaagccaaaagaacaaagctggaggcatcatgctacctgacttcaaactatactacaaggctacagtaaccaaaacagcatggtactggtacgaaaacagagatatagatcaatggaacagaacagagccctcagaaagaacaccacatatctacaactatctgatctttgacaaacctgagaaaaacaagcaatggggcaaggattccctatttaataaatggtgctgggaaaactggctagccgtatgtagaaagctgaaactggatcccttccttacaccttgtacaaaaatcaattcaagatggattaaagacttaaacgttagacctaaaaccataaaaaccctagaagaaaacctaggcattaccattccggacataggcatgggcaaggacttcatgtctaaaacaccaaaagcaatgggaacaaaagccaaaattgagaaatgggatctaattaaactaaagagcttctgcacagcgaaagaaactaccatcagagtcaacaggcaacctacaaaatgggagaaaattttcgcaacctactcatctgacaaagggctaatatccagaatctacaatgaactcaaacaaatttacaagaaaaaaacaaccccatcaaaaagtgggcaaaggacatgaacagacacttctcaaaagaagacatttatgcagccaaaaaacacatgaaaaaatgctcaccatcactggccatcagagaaatgcaaatcaaaaccacagtgagttaccatttcacaccagttagaatggcaatcattaaaaagtcaggaaacaacaggtgctggagaggatgtggagaaataggaacacttttacactgttggtgggactgtcaactagttcaaccattgtggaagtcagtgtggcgattcctcagggatctagaactagaaataccatttgacccacccaacccattactgggtagatacccaaaggactataaatcatgctgctataaagacacatgcacaagtatgtttattgtggcagttttcacaatagcaaagacttggaaccaacccaaatgtccaacaatgatagactggattaagaaaatgtggcacatatacaccatggaatactatgcagccatcaataatgatgagttcatgtcctttgtagggacatggatgaaattggaaatcatcattctcagtaaactatcgcaagaacaaaaaaccaaacaccgcatattcccactcatggggggaattgaacaatgagaacacatggacacaggaaggggaaaatcacactctggggattgatgtgggatggggggatgggggagggatagcattgggagatatacctagtgctagatgacgagttaatgggtgcagcacaccagcatggcacatgtatacatatgtaactaacctgcacattgtgcacatgtaccgtaaaacttaaagtataataataataaaaaaa

SEQ ID NO: 554 - DNA, 5467 bp, Homo sapiens
  source 1..5467: mol_type = other DNA
tttttttgtagaatctgtgcaggcacatttctgaggcctacagtgaaaaattgtaggcctcattgaggcctacagtgaaaaattgaatatccctcaataaaaattacaaacaagctatctgtggaaatgctttgtgatgtctggattcatctcacagagtgaaacctttcttttgattcattaggttgaaagcacactttttgtaaaaattacaaaggaacatttctgggcctatttaggcctgtggtgaaaaatcagaaaactagtgataaaatctagaaacaggcttgtgtgaaaatgctttgggttgtgtgcatttatctcacagagttaaacatttattttgatttaacaagttggaaacactctttttgtagaatctatgaggggacataattgagcttattgaggcctatagtaaaaatttgaggattctgctataaaaactagaaacaagctatctgtaaaaatgctttgctgtgtgtgtattcctatcacaaagttacagctttgttttgattcaacaggttgcaaacactctttttgcagaatctatgaaggaacatttctgaaccaattttggcctatagtggaaaactgaacattctgtgatataaactagagaaaagatatctgtgaaaatgctttgcaatgtgtggattcatctcactggatggaacctatgctttgatttagtaggttggaaatactcattttgtagaatctacaaaggatatttctgagcccctttgagcctgtagtgaaaaatcaaggatcccatgaagaaaaacagaaaaacactatctgtcaaaatgcttattggtgtgtggattcttcttaccaaatggaacctgtgttttgattcaccaggttggaaacacttttttgtagagtctatgaagggacatttctcagcccattgaggcctatagtgatgaacaaaatatcccataatagaagctagaaaaaagctatttccaaaaatgctttgcaatgtgtggatttatcttacagaattaaacctttattttgatttgacagtctgcaaacacttttttttgtagaaagtacagagggacatttctgagaccatcaagaactatagtaaaaaaatcaaacaacctgccttaatatttagaaacaagctatctgttaaaatgctttagaatattttcattcatgtcacagatttcaaccttttttttgattcaacaagataaaaacactcttttagttgaatctacaaaaagatatttcaaagtccgttgaggcctatagtgaaaaactgaatatcccatgataaaaactagaagtgagccctgtgtgaaaatgctttgtgatgtgtggattcatctcacagagttaaacttatatttttattcaacaccttggaaacactctttttgtagcatctatgaagggacattctgaggccattgaggcctatagtgaaaagcagaatatccttccttaaaatctagaaacaatctatctgtgaagatgatttatgatgtgagcatttatctcacagatttaaaactatgttttaattcaacaggtaggaaaaagtctttttgtagaatctatgaaaggacacttctgagcccacggagacctatagtgaaaaactgaatatccagcattaaaaactagaaacaagctatatgtaaaaatgttttgtgatgtgtggattcatctctcccaatggaacctgtgttttgattctccaggttggaaacactttttgtgaaatctatgaagcgacatttctgagcccattgaggcatattgtaaaatttgaatattccacgataagaactagaaacaagctatctctgaaaatccttttcaatgtgtggcttctcctcacagagttaaatctttgtttcaattcaacaccttgaaaacacttttttggtagaatctacgaagggacatttctgacccattgaggcctacagtaaaaaatgtagggacatttctgagcccattgaagcctatagttaaaaaactaatttctggtgataaaatctagaaacaagccatctgtgaaaatgctttgtgatgtatggatttatctcaaaaagttaaaactatgtttttaaccaacaggttgaaatcactctttttgtagaatctatgaaaagacgtttctgagcccactgaggcctgtagagaaaaactgtatatcctgcaataaaagctagaagaaaagctctccgtgtaaatggttcccgatgtgtgggttaatctcacagagttaaacatttgtttttatttaacaggttagaaacgttctttttgtagaatctacgaaggaatatttctgagcccattgaggcctatagcaagaagccatatatccgtcaataaaaactggaaacaagctatctgtgaacattttttgtgatgtatgcatttatctcaccaaatggaacctgtgttttgattcaccagtttggaaacactcttttgtggaatgcatgaagggacatttcttagccaattgaggtgtatagtgatataccaaatatcccgggatagaaactagaaacaagttatctgcaaaaatgctctgtgatgtgtggatttatctcacagagatgaagctttgttttgattcaacatgttggaaacactttttttgtagaatctacaaagggacatttctgagaccattaaaaactacagtaaaaaaaggtataatgcaccttaaaatctagaaacaaagctatctgtgaaaatgctttgcaatatgtggattcatgtcacagatttaaacctttgttttgattgaacaaattggaaacactgttttagtagattatataaagggacatttcaaagcccattgaagcctatagtgaaaaatcaaaaatcccgtgagcaaaaatagaaacaacctctgtgggaaaatgctgtgtgatacgttcattcatctcacagggataacctttgtttttattcaacaccttggaaacattctttttgtagagtctatgaaaaaaatttctgagccaattgaagtctgtagtgaaaaagctaatatcccattttaaaatataaaacaaactatgaaaatgagttttgatgtgtggattcatcgagagttagacctttgttctaaatcaacaggttaagaacactctttttgtagaatctatgaaaaaacatttctgagcccgttgaggcctattgcgaagtgaatctcttgcaataaaaagcagaaaccagctctctgtgaaataattttgtgatgtacaaatttatcttgcagagttaaaactttgttttaattcaacaagttgaaaccttctttttgtagaatctgcaaagagacatttctgagcccattgaggccaatagcaaaaaaatgaatatcccacaataaaaactagaaacaaaacagctgtgtaaatgctttgcaatatgtggattcgtctcactgagttaaacctatgttttgattcaacaagttaaaaaacttgtttttgtagtatcttcgaagggacaattctgagcctatggagattatagcaaaaaactgaatatcctgcaataaaaactagaaacaagatatccgtggaaatgctttgagatgtgtagatttatttcacagaattaaacctttgttttgatttaacaggttggaaccactctattttaagaatctatgaagaaatatctttgtccctattgtacactatagtggacaactgaatacttcatgacaaaaactagaaacaagctagctgtgaaaatgctttgcaatgggtgaattcatctcactcagttaaaccttcgttttgattcaacaagggtgaaacactcttttggtagaatctacaaagaaacatttatgagccccttgaggactatagtgaaaaaatgaatctcctgcattaatatctagaaacaatctatttgtgaaaatgctgtgtgatgcatggatccatctcacagatttcaaactttattttgattcaacaggctggaaacactcttgttatagaagctacgaagggtcatttctgaacccattgaggccaatagtgaaaaactaaatatcctgcaataaacctagaaaaaatctatctgcgaaaatactttgtgtagtgtggatgagtgtctcagggttaaacatttgtttttattcaccaggttcgaaacactctttttgttgaacagacaaagggacatttcttagcccagttaggcctataaaggtaaaccgaatatcccgtgatacatagtagaaacaagctatctgcaaaaatgctttgtgaattgtagattcatctcacagaattaagcctttgttttaattcaacaggttaaaaacactatttttgtagactctacgaagaaacatttctgaaaccattgaaacctatgggggaaaaaaacccccgaaattcctgtgataagaaatggaaagcagctatctgtgaaaatgctttgtaatgtgtggattcttctcacagagttaaacctttgttctgattcaacattgttcagaacactctttttgtagaatctacagagatactttttagcattttgaggcctctagtgaaaaaccgaatgtcctgcaatagaaactggaaacaaccttctgtgaaaatgctttgtgattcgtctattcatctcaaagaatgaaacttgtgctttgattcaacaggttggaaaaccctttttgtagaatctacgtaggaacatttctgagcccattgaggcctctagtgaaaaaactgaatatcccagaattaaaactataaacaagctatctgtgaagaagctttgtaatatgtgcattcatctaacagatataagcgtgtattttgatttgcctggttgggaacactctttttgtacagtctataaagaaacatttctgagtgcattgagtcatatgttgaaaaatcgaatatctcgtgataaaaactaggcaggaggtatctgtgaaaatgctttgagatgtgtgggtattggcctcacagagttaaacttttgttttgattcaacagtttggaaacatactttgtagaatctacaatgacatatttctgagcccattgaggcctgtagtgaaaaaccgaatatcccatgataaaaactcaaaacaagcgatatgtgaaaatgctttgtgacgtgtggttcatctcatagagttaaacctggttttgatccactacattggaaacactcttattgtagaatctacaaaaaaaaatttctgagaccattgaggtctctagtgaaaaactgaatatcccatgataaaaactagatacaagctatctgtgaaaatgctttgcaatgtgtggatttgtctcacaaagttaaacctgtgtttgattcaacgggttggaaacactttttttgtagaatctatgaagaaacatttctgagaccattgaagcctatagtaaaaaattgaatatcctgtgatataaatgagaaacaa

SEQ ID NO: 555 - DNA, 999 bp, Homo sapiens
  source 1..999: mol_type = other DNA
gcctctgcccggccgcccctactgggaagtgaggagcccctctgcccggccagccgccccgtccgggagggaggtgggggggtcggccccccgcccggccagccgccccgtccgggagggaggtggggggggtcggcccccctgcccggccagccgccccgtccgggaggtgaggggcgcctctgcctggccgcccctactgggaagtgaggagcccctctgcccggccagccgccccgtccgggagggaggtgggggggtcagccccccgcccggccagccgccccgtccgggagggaggttggggggtcagccccccgcccggccagccgccccgtccgggagggaggtgggggggggtcagcccccctgcccggccagccgccccgtccgggaggtgaggggcgcctctgcccggccgcccctactgggaagtgaggagcccctctgcccggccaccaccccgtctgggaggtgtgcccaacagctcattgagaacgggccaggatgacaatggcggcattgtggaatagaaaggcgggaaaggtggggaaaagattgagaaatcggatggttgccgtgtctgtgtagaaagaagtagacatgggagacttttcattttgttctgcactaagaaaaattcctctgccttgggatcctgttgatctgtgaccttacccccaaccctgtgctctctgaaacatgtgctgtgtccactcagggttaaatggattaagggcagtgcaagatgtgctttgttaaacagatgcttgaaggcagcatgctcgttaagagtcatcaccaatccctaatctcaagtaatcagggacacaaacactgcggaaggccgcggggtcctctgcctaggaaaaccagagacctttgttcacttgtttatctgctgaccttccctccactattgtcccatgaccctgccaaatccccctctgtgagaaacacccaagaattatcaataaaaaaataaatttaaaaaaaaaa

SEQ ID NO: 556 - DNA, 1483 bp, Homo sapiens
  source 1..1483: mol_type = other DNA
gggatttcacaaagggcggcacccaactctccctcactacaggagcagcagggtctcagcaatgtaggacagttcacagagttgcatgctctggacttggggtagagactctgccatgatgcctatcttaattgtagctggcagagaggcggatctacagtccacaacagcactttggctgggaaccaaaggatgaagactttataaccagaaggtcatgtgccatgtaacaggggtgtagggaagtagatcatgcttctgttggcttaggacaaggagctggtgcaccccttacccctttctgtgtcacttcagagcaccccatcacgatctcttcctgccactcctgtcaaggaaggtgtgaccactgggccctggcctacctgccagctcttcttaagtgccatctactagacttcagcttaaattgcaccacgaaacaaaaatatattgctacaacatgcggcatctgagaaagcaaccgcatgaacctatctgcaaccaagaacttgtacagagccttggccctccgaaagcatccagaaatgaagccagttgatcatacacaacacacaccatagtcataccttcaacagaaaaaaagaataaaaaaattaaaaagccccacccaaatgaaagcaaattttgaaaaagaagcatcagccctctcagatgagaaggaatcagcacaggactctggcagtacaaaaagccagaatgttttgtcacctccaaaggatctcactagctccctagaaatgtatcctgaccaaattgaaatgctgaaaatgacagatctagaattcagaatgtgagtggcaaggaaactcagcaagacccaagagaaagttgaaatgcaatactaagaagccgtaaaaatgagccaggatgtgaaagatatatatatagggggggaaaaaaactatatatagagagaaagaaccaaaacacaaaaagaatcaagcagaacttctggaattgaaaaatttactacaggaatttcaaaatactgttggacacctcaacaatagactagaccaagtagaagaatttcagaggcagaatgaattttttaaattaacctagtcacacaaaaataaagaaaaataattttaagaaatgaacaaaggctttgagaagtataggattatgggaaatgaccaaactatgacccactggcattcctgacagagaagaagaaaaaataagcaacttggaaaatgcattttaacgtataattcaggaaaatgtccctaatcttgctaaagaggtcaacatgcagatataagaaattcagggactgcctgagaggtactatacaaaatgaccatccccaaggcacatagtcatgagactgcatgaaagaaaaatatctttaaggaagctagaaaaaagagccaaattacctataaaggaagtccactcagaataacagtggatttcttagcagaagtcttacaatttagaagagattgggtgccta

SEQ ID NO: 557 - DNA, 1689 bp, Homo sapiens
  source 1..1689: mol_type = other DNA
ctctccctctccttctccccacggtctccctctccctctccccacggtctccctctccctctctttccacggtctccctctgatgccgagccaaagctggactgtactgctgccctctcggctcactgcaacctccctgcctgattctcctgcctcagcctgccgagtgcctgcgattgcaggcgcgcgccgccacgcctgactggttttcgtatttttttggtctccaccaaacacagggtttcgctgtgttggccgggctggtctccagctcctaaccgcgagtggtccgccagcctcggcctcccgaggtgccgggattgcagacggagtctcgtttactcagtgctcaatgtttcccaggctggagtgcagtggcgcgatcttggctagctacaacctccacctcccagccgcctgccttggcctcccaaagtgccgagattgcagcctctgcccggccgccaccccgtctgggaagtgaggagcgtctctgcctggccgcccatcgtctgggatgtgaggagcccctctgctcggctgcccaatctgggaagtgaggagcgcctcttcccggctgccattccgtctagaaagtgaggagcgtctctgcccggccgcccatcgtctgagatgcggggagcgcctctgccccgccaccccgtctgggatgtgaggagcgcctctacccggccgcgaccctgtctgggaggtgaggagcgtctctgcctggccgtcccatctgagaagtgaggagcccctccgcccggcagccgccccgtctgagaagtgaggagcccctccgcccggcagctgccccgtctgggaagtgaggagcgtctccgcccagcagccgccccgtcccggagggaggtgggggtcagcccccgcccggccagccgcccagtccgggagggaggtggggggagtcagcccccgcccggccagccgctccgtccgggagggaggtggggggttagcccccgcccggccagccgccccgtccaggagggaggtgggggtcagcccctgcccagccagccggcccgtcagggagggaggtgggggtccgcctccgccctgccgccgccccgtccgggagatggggggtgcctctgcccggccgccccttctgggaagtgaggagcccctctgcccggccaccaccccgtctgggaggtgtacccaacagctcattgagaacgggccatgatgacgatggcggttttgtggaatagaaaagggggaaaggtggggaaaagatagagaaatcagattgttgctgtgtctgtgtagaaagaagtagacatgggagacttcattttgttctgtactaagaaaaattcttctgccttgggatgctgttgatctatgaccttacccccaaccctgtgctctctgaaacatgtgctgtgtccattcagggttaaatgcattaagggcggtgcaagatgtgctttgttaaacagatgcttgaaggcagcagactcgttaagagtcatcaccactccctaatctcaagtacccagggacacaaacactgcggaagcccgcagggtcctctgcctaggaaaaccagagacctttgttcacttgtttgtctgctgaccttccctccactattgtcctaagaccctgccaaaccccctctgggagaaacacccaagaatgatcaataaaaaaaaataa

SEQ ID NO: 558 - DNA, 3135 bp, Homo sapiens
  source 1..3135: mol_type = other DNA
tggaggccccagcgagaaacgtcaccgggagaaacgtcaccgggcgagagccgggcccgctgtgtgctcccccggaaggacagccagcttgtaggggggagtgccacctgaaaaaaaaatttccaggtccccaaagggtgaccgtcttccggaggacagcggatcgactaccatgtgggtgcccacaaaaattccacctctgagtcctcaactgctgaccccggggtcaggtaggtcagatttgactttggttctggcagagggaagcgaccctgatgagggtgtccctcttttgactctgcccatttctctaggatgctagagggtagagccctggttttctgttagacgcctctgtgtctctgtctgggagggaagtggccctgacaggggccatcccttgagtcagtccacatcccaggatgctgggggactgagtcctggtttctggcagactggtctctctctctctctttttctatctctaatctttccttgttcaggtttcttggagaatctctgggaaagaaaaaagaaaaactgttataaactctgtgtgaatggtgaatgaatgggggaggacaagggcttgcgcttgtcctccagtttgtagctccacggcgaaagctacggagttcaagtgggccctcacctgcggttccgtggcgacctcataaggcttaaggcagcatccggcatagctcgatccgagccgggggtttataccggcctgtcaatgctaagaggagcccaagtcccctaagggggagcggccaggcgggcatctgactgatcccatcacgggaccccctccccttgtttgtctaaaaaaaaaaaaagaagaaactgtcataactgtttacatgccctagggtcaactgtttgttttatgtttattgttctgttcggtgtctattgtcttgtttagtggttgtcaaggttttgcatgtcaggacgtcgatattgcccaagacgtctgggtaagaacttctgcaaggtccttagtgctgattttttgtcacaggaggttaaatttctcatcaatcatttaggctggccaccacagtcctgtcttttctgccagaagcaagtcaggtgttgttacgggaatgagtgtaaaaaaacattcgcctgattgggatttctggcaccatgatggttgtatttagattgtcataccccacatccaggttgattggacctcctctaaactaaactggtggtgggttcaaaacagccaccctgcagatttccttgctcacctctttggtcattctgtaacttttcctgtgcccttaaatagcacactgtgtagggaaacctaccctcgtactgctttacttcgtttagattcttactctgttcctctgtggctactctcccatcttaaaaacgatccaagtggtccttttcctcctccctgccccctaccccacacatctcgttttccagtgcgacagcaagttcagcgtctccaggacttggctctgctctcactccttgaacccttaaaagaaaaagctgggtttgagctatttgcctttgagtcatggagacacaaaaggtatttagggtacagatctagaagaagagagagaacacctagatccaactgacccaggagatctcgggctggcctctagtcctcctccctcaatcttaaagctacagtgatgtggcaagtggtatttagctgttgtggtttttctgctctttctggtcatgttgattctgttctttcgatactccagccccccagggagtgagtttctctgtctgtgctgggtttgatatctatgttcaaatcttattaaattgccttcaaaaaaaaaaaaaaaggggaaacacttcctcccagccttgtaagggttggagccctctccagtatatgctgcagaatttttctctcggtttctcagaggattatggagtccgccttaaaaaaggcaagctctggacactctgcaaagtagaatggccaaagtttggagttgagtggccccttgaagggtcactgaacctcacaattgttcaagctgtgtggcgggttgttactgaaactcccggcctccctgatcagtttccctacattgatcaatggctgagtttggtcaggagcaccccttccatggctccactcatgcaccattcataattttacctccaaggtcctcctgagccagaccgtgttttcgcctcgaccctcagccggtttagctcgccctgtactgcctctctctgaagaagaggagagtctccctcacccagtcccaccgccttaaaaccagcctactcccttagggtcatcccatgtctcctcggctatgtcccctgtaggctcatcacccattgcctcttggttgcaaccgtggtgggaggaagtagcccctctactaccactgagagaggcacaagtccctctgggtgatgagtgctccacccccttcctggtttatgtcccttctttctacttctgacttgtataattggaaaacccataatcctcccttctctgaaaagccccaggctttgacctcactgatggagtctgtactctggacacattggcccacctgggatgactgtcaacagctccttttgacccttttcacctctgaagagagggaaagtatccaaagagaggccaaaaagtacaacctcacatcaaccaataggccggaggaggaagctagaggaatagtgattagagacccaattgggacctaattgggacccaaatttctcaagtggagggagaacttttgacgatttccaccggtatctcctcgtgggtattcagggagctgctcagaaacctataaacttgtctaaggcgactgaagtcgtccaggggcatgatgagtcaccaggagtgtttttagagcacctccaggaggcttatcggatttacaccccttttgacctggcagcccccgaaaatagccatgctcttaatttggcatttgtggctcaggcagccccagatagtaaaaggaaactccaaaaactagagggattttgctggaatgaataccagtcagcttttagagatagcctaaaaggtttttgacagtcaagaggttgaaaaacaaaaacaagcagctcaggcagctgaaaaaagccactgataaagca

SEQ ID NO: 559 - DNA, 184 bp, Homo sapiens
  source 1..184: mol_type = other DNA
aaacaactgctatgttctcagcaacccactccaaagccaaagtcaaaactaaaattgtaaaatatctcaaaaacaataaaaatggtatatatatatcagaagctctggtatatagcaaaactgtactaaaaataatttagaaaaataatttatctcatgcaaatgaataaaaaaatctaaatga

SEQ ID NO: 560 - DNA, 967 bp, Homo sapiens
  source 1..967: mol_type = other DNA
gtggggaaaagcaagagagatcagattgttactgtgtctgtgtagaaagaagtagacataggagactccattttgttatgtactaagaaaaattcttctgccttgagattctgttaatctatgaccttacccccaaccccgtgctctctgaaacatgtgctgtgtcaactcagagttgaatggattaagggcggtgcaggatgtgctttgttaaacagatgcttgaaggcagcatgctccttaagagtcatcaccactccctaatctcaagtacccagggacacaaaaactgcggaaggccgcagggacctctgcctaggaaagccaggtattgtccaaggtttctccccatgtgatagtctgaaatatggcctcgtgggaagggaaagacctgaccatcccccagcccgacacccgtaaagggtctgtgctgaggaggattagtaaaagaggaaggaatgcctcttgcagttgagacaagaggaaggcatctgtctcctgcctgtccctgggcaatggaatgtctcggtataaaacccgattgtatgctccatctactgagatagggaaaaaccgccttagggctggaggtgggacctgcgggcagcaatactgctttgtaaagcactgagatgtttatgtgtatgcatatctaaaagcacagcacttaatcctttacattgtctatgatgccaagacctttgttcacgtgtttgtctgctgaccctctccccacaattgtcttgtgaccctgacacatccccctctttgagaaacacccacagatgatcaataaatactaagggaactcagaggctggcgggatcctccatatgctgaacgctggttccccgggtccccttatttctttctctatactttgtctctgtgtctttttcttttccaaatctctcgtcccaccttacgagaaacacccacaggtgtgtaggggcaacccacccctaca

SEQ ID NO: 561 - DNA, 5109 bp, Homo sapiens
  source 1..5109: mol_type = other DNA
agactgcttctttaagcaggaccctgatccattcctccccactgtgtggggtctccctgtggggggtcttcagtcactccagccaggcttatactgacagaaatctaatctctacctcagatggagctcccaggggagtggcgaccactgtctctatggttcggttgacaaagctgttccagcctgctggctttggagagtctgggcaatctgggtgaggaagggtcctcccccaccgcagcacacctgctgtaccaaaagcagttggactgcttctgtaagtaggtccctgatcctgttcctcctgactcagtgagacctcccaacaggagtctctagacacctcctacaggagtcttcaggccagaaactggtcagtatccccctgggacagagtttccaaaagaaggagaaggctgccatctttgctgttttgcagctttcactggtgacacctccaggtacgggaaaaacggaggcaactagggtctcgagcagaccccagcaaactgtggcagccctacagttgctaacagtcagtggcttgactgttaaaaacaggcagaaaacaacaagaacatcaacaaaaagaccccacaaaaaccccattcaagggtcagcaacctcaagattgaaggtaggtaagcccacagatatgataaaaagtcaacacaaaaaaatgctgaaaactcaaaaagccagagcgcctcttctccaaatgactacagcacctctctagcaagggtacagaactgggctgaggctgagatggctgaactgacagaagtaggcctcagaaagtgggtaatgaactttgctgagctaaaggagcatggcataacccaatgcaaagaagctaagaatcatgataaaacaatacaggagctgatgaccagaatagccagtttagagaggaacataactgacttgatggagctgaaaaacacaacacaagaacttaacaatgcaatcacaagtatcaattgtagaatagaccaagaggaggaaagagactcagagcttgaagactatctttctgaaataagacaggcagagaagaatagagaaagaatgaagagtaatgaacaaaacctctgaaaaaaaatatggagttatgtaaaaagactgaacctatgactgattgcggaacctgaaacagatggggagaatggaaacaagttggaaacatactttaggatgttatccaggataactttccaaacctagcatgacaggctaatattcaaattcaggaaatgcagagaaccccggtaagatactccatgagaagatcaaccccaagacacataatcatcagattctccaaggtcaaaattaaaaaatgtaaagggcagtcagagagaatgaaaggtcaggtcccctacaaagggaagcccatcagactaatagcagacatctcagtggaaaccctacaagccagaagatattgggggtcaatattcagcattcttaaagaattctttgccagaatttagtatctggccaaagtaagctttatgtgcaaagaaataagatccttttcagacaagcaaatgctgagagaattcatcaccaccaggccttccttgcaagagttcctgaaggaagcactaaatatggaaagaaaaaaccattaccagccactacaaaaacacactgaagtacatagaccaatgacactataaagcaaccacataaacaagtctgcaaaataaccagctagcatcatgatggcaggatcaaattcacacataacaatactaatatcaaatgtaaataggctaaatgccccaattgaaagacagagaagtgcaagctggataaagagccaagaccgattgatacgccgtgtttaagagacccatcacacgtgcaaagacacacataggctcaaaataaagggatggaggaaaatctaccaagaaaatggaaatcagaaaaaagcaggagtcacaatcctagtttttgacaaaacagactttaaaccaacaaagataaaaaaaaaaaaaaagacaaagcaaggcattacataacagcaaagggttcaacaagaagagctaactattctaaacatatatacgcacccaatagcagaggacccagattcataaagtaagttcttagagacctacaaagagacttagactcccacacagtaatagtgggagactttaacactccattgacaatattagatcattgagataaaaaattaacaaagatgttgaggaccttaactcagctctggattaagcagacctgatagatatctgcagaactctccactccaaaacaacagaatatacatttttctcatcatcacatggctcttaaaaattgatcacataatcggaagtaaacactcctcagcaaatgcaaaagaactgaaatcataacagtctctcagaccatagcacaatcaaattgaactcaagattaagaaattcacccaaaaaattaaaacaaaaatgaaattaactcagaaccacacaactatgtggaaattgaataacctgcttgtgaatgactcctgggtaaatactgaaattaaggcatagatcaagaaattatttgaaactaataagaataaagacacaatgtaccagaatctctgggatgcagctaaagaagtgttaagacagaaattaatagcactaaatgcccacatcaaaaagctagaaagatctcaagttaacaacatcacaactaaaatagagaaccaaaaacaaaccccaaagctagcagaatacaggaaataagatcagagcagaactcaaggagacagagacacaaaaaatctttcaaaaattaacaaatccaggagctggttttttgaaaaaaattaatagactgctaactagactaataaagaagaaaagagagaagaatccaacacaatcagaaatgataaaggggatatcaccactgaccccacagaaatacaagcaaccatcagagaatattataaacacctctctgcacataaactagaaaatctagaaaaagagaataaatttctggaaacatacaccctcctaaggctgaacctggaagaaattgaatccttgaatagaccaataacgacttctgaaattgaggcagtaatagtctaccaaaaaaaaaaaaaaaaagcccaggaccagacaaatttacagctgaattctaccagaggtacaaaaaagagctggtaccatttctactgaaactattccaaacaattgaaaagaagggattcctccttaactctttttatgaggccagcatcatcctgataccaaaatctggcagagataaaacgaaaaaagaaaacttcaggccagtatccctgatgactatcaatgcaaaaatcctcaacaaaatactggcaaactgaatccagcagcacatcaaaaagcttatctaccacaatcaagttggcttcatccccaggatgcaacgttggttcaacatatgcaaatcaataaatgtgatcacataatgagaaccaaagacaaaaatcacatgattctctcaatagatgcagaaaaggcctttgataaaattcaacatcccttcatgctaaaagctctctgtaaactaggtactgaaggaacatacctcaaaataataagagccatagatttcaaacccacagccaatatcatactgagtgggcaaaagttgtaatcattccccttgaaaactggcacaagacaaggaccagccccccgccctttccccactcctgttcaacacagtattggaagttctggccagtcaagtcagacaagtgaaagaaataaagcatattcaaatagagaggaagtcacagtatctttgtttgcagatgacatgatcctatatctagaaaaccccatcatctcagcccaaaagctttttaagctgataagcaacttcagcaatgtctcaggatacaaaatcaatgtgcaaaaccgctagcattcctataaaccaacgacaggcaagcagagagccgaatcatgaatgaactcccattcacaattgctacagaaagaataagttatctaggaatacagctaacaagggaagcgaaggaccccttcaaggagaactacaaaccactgctcaaagaaatcagagaggacacaaatggaaaaacatttcatgctcatggataggaagaatcaatattgtgaaatggccatactgcccaaagtaatttatagattcaatgctattcccattaaactaccgttgacattcttcacagaattagaaaaaaaaacctattttaaaattcatttggaaccaaagaatagcccaaatagccaagacaattctaagcaaaaaagaacaaagctggaggcattatgcaacccaacttcaaactatactccaaggctacagtaacgaaaacagcatagtactggaacaaaaacagacacatagacaaatggaacagaatagagaactcagaaataagaccacacacctacaaccatctgatattcaacaaacctgacaaaaacaagcagtggggaaatgattccctatataataaacggtgctgggagaactggctagccatgcacagaaaattgaaactggaccccttccttacaaacattatacaaaaattaagatggattaaaaacttatgaaacccaaaactataaaaaccccagaagaaaatctaggtgataccatccaggacatagggacaggcaaagatttcacgatgaaaacaccaaaagcaattgcaacaaaagcaaaatttgacaaatgggatctaattaaactaaagagcttctgcacaccaaaagaaactattatcagggtgaacagacaacctacagaatgggagaaaatctttgcaatctgtccatctgacaaaggtctaatatccagagcctacaaggaacttaaacaaatttacgagaaaaaaaaccattaaaaagtgggcaaaagacatcaacaggcacttctcaaaagaagacgtacatgcagctgacaaacatgaaaaaaaagctcaacatcactatcattagataaatgcaaatcaaaaccacaatgagatactgtctcacatcagtcacaatggcaattataaaaaagtaaaaaagaagccatttgcagcagctcaaagtg

SEQ ID NO: 562 - DNA, 1705 bp, Homo sapiens
  source 1..1705: mol_type = other DNA
tctccctctccctctccctctccctcctctccctcctctccctcctctccctctctttccacggtctccctctgatgcagagctgaagctggactgtactgctgccatctcggctcactgcaacctccctgcctgattctcctgcctcagcctgccgagtgcctgcgattgcaggcgcacgccgccacgcctgactggttttcgtatttttttggtggagacggggttttgctgtgttggccgggctggtctccagctcctagccacgagtgatccaccagcctcggcttcccgaggtgccgggattgcagacggagtctcgttcactcagtgctcaatggtgcccaggctggaatgcagtggcgtgatctcggctcgctacaacttccacctcccagccgcctgccttggcctcccaaagtgccgagattgcagcctctgcccagccgccaccccatctgggaagtgaggagcgcctcttcccggccgccatcccatctaggaagtgaggagcgtctctgcccggccgcccatcgtctgagatgtggggagcgcctctgccctgccgccccgtctgggatgtgaggagcgtctctgcccggccgccccgtctgagaagtgaggagcccctccgcccagcagccgcaccgtctgagaagtgaggagtccctccgcccggcagccaccccgtctgggaagtgaggagcgtctccgccaggccagccgccccgtctgggagggaggtgggagtcagccccccgcccggccagccgccccgtccgggagggaggtgggggggtcagccccccgcccggccagccgccccgtccgggagggaggtgggggggtcagccccccgcccggccagccgccccgtccaggaggtgaggggcgcctctgcccggctgcccctactgggaagtgaggagcccctctgcctggccagccgcaccgtctgggagggaggtgggggtcagccccccgcccggccagccgccccgtccgggagggaggtgggggggtcagccccccgcccggccagccgccccgtccgggagggaggtgggggggtcagccccccgcccggccagccgccccgtccaggaggtgaggggcgcctctgcccggctgcccctactgggaagtgaggagcccctctgcccggccaccaccccgtctgggaggtgtaccaaacagctcattgagaacgggccatgatgacaatggcggttttgtggaatagaaaggggggaaaggtggggaaaagattgagaaatcggatggttgccgtgtctgtgtagaaagaggtagacatgggagacttttcattttgttctgtactaagaaaaattcttcttccttgggatcctgttgatctgtgaccttgcccccaaccctgtgctctctgaaacatgtgctgtgtccactcagggttgaatggattaagggtggtgcaagatgtgctttgttaaacagatgcttgaaggcagcatgctccttaagagtcatcaccactccctaatctcaagtacccagggacacaaacactgcggaaggccgcagggtcctctgcctaggaaaaccagagacctctgttcacttgtttatctgctgaccttccctccactattgtcctgtgaccctgccaaatccccctctgcgagaaacacccaagaatgatcaattaaaaaaaaaaaagaaaaaa

SEQ ID NO: 563 - DNA, 131 bp, Homo sapiens
  source 1..131: mol_type = other DNA
ggccgggcgcggtggctcactcctggaatcccagcactttgggagcccgaggtgggcggatcacgaggtcaggagatcgagactgttctggctaaaccagtgaaaccccctctctactaaaaaaataacaa

SEQ ID NO: 564 - DNA, 308 bp, Homo sapiens
  source 1..308: mol_type = other DNA
ggcctggcgcagtggctcatgcctgtaatcccagcactttgggaagctgaggcaggtagatcacctgaggtcaggagttcaagactagcctggccaacatggtgaaaccctgtctctactaacaatacaaaaattagccaggtgtgttggcgggcgcctgcaatccccgctatttgggaggctgatgcaggagaatcgcttaaactcaggaagcggaggttgcagtgagctgagatcgtgccattgtactccagcctggatgacagagcgagactctgcctcaaaaaaaaaaaaaaaaaaaaaaaaaa

SEQ ID NO: 565 - DNA, 783 bp, Homo sapiens
  source 1..783: mol_type = other DNA
cagccgccccgtccgggagatgaggggcgcctctgcccagccgcccctactgggaagtgaggagcccctctgcccggccagccgccccatccgggagggaggtgggggggtcagccccccgcccggccagccgccccgtccgggagggaggtgggggggtcagccccccgcccggccagccgccccgtccgggaggtgaggggcgcctctgcctggccgcccctactgggaagtgaggagcccctctgcccggccaccaccccgtctgggaggtgtacctaacagctcattgagaacgggccatgatgacaatggcggttttgtggaatagaaaggggggaaaggtggggaaaagattgagaaatcggatggttgcggtgtctgtgtagaaagaggtagacatgggagacttttcattttgctctgtactaagaaaaattcttatcctgttgatctgtgaccttacccccaaccctgtgctctctgaaacatgtgctgtgtccactcagggttaaatggattaagggcggtgcaagatgtgctttgttgaacagatgcttgaaggcagcatgctcgttaagagtcatcaccactccctaatctcaagtacccagggacacaaacactgcagaaggccgcagggtcctctgcctaggaaaaccagagacctttgttcacttgtttatctgctgaccttccctccactattgtcctatgaccctgccaaatccccctctgcgagaaacacccaagaatgaacaataaaaaaaaataaaaataaaa

SEQ ID NO: 566 - DNA, 646 bp, Homo sapiens
  source 1..646: mol_type = other DNA
tgtaaaattgtggtataatgagaaatacatttggtctttgttcctggttcctggcatagagctcctaaaacgcttagaatttcatgagtgataagagttttttggttttgttttgtttttgctgttgttgttattcatagcactgcccttttaattacacctgattatactactgaagtgacttatggttgctcccctagacagcctcagaatggggctgttctctaggaagatcaagtaactagaggatggagactttgtgccccatttctcccacctcctggaaggggaggggtgctggagattagattagacaatgagattaagagaactccaaatagcccaagagggtggtgcacccccaacttcataggggtagaggctcctgagattaggagaaccctttttaggctttactctatgtacctcttcatttgagtgttcatttgcgtcctttataaccagtaaaacaaagtacgctgttttcttgagttttgtgagccctgtagcaaattatcaaacctgagtagggcagtgggaactcggaatttatcaccattcagaactgcaggttgtccttgtgagtggcatctgatgtgggggaagtcttggactgagccccttaacttgtggagtctgcactaat

SEQ ID NO: 567 - DNA, 1866 bp, Homo sapiens
  source 1..1866: mol_type = other DNA
ccacagtctccctctgatgccgagccaaagctggacggtactgctgccatctcggctcactgcaacctccctgcctgattctcctgcctcagcctgccgagtgcctgcgattgcaggcacgcgccgccacgcctgactggttttcgtttttttttttggtggagacggggtttcgctgtgttggctgggctggtctccagctcctaaccacgagtgatccgccagcctcggcctcccgaggtgccgggattgcagatggagtctcgttcactcagtgctcaatggtgcccaggctggagtgcagcggcgtgatctcggctcactacaacctccacctcccagccgcctgccttggcctcccaaagagccgagattgcagcctctgcccggccgccaccccgtctgggaagtgaggagcgactctgcctggccgcccattgtctgggatgtgaggagcccctctgcctggctgcccagtctggaaagtgaggagcgtctctgcccggccgccatcccatctaggaagcgaggagcgcctcttccccgccgccatcccatctaggaagtgaggagcgtctctgcccggccgcccatcgtctgagatgtggggagcacctctgccccaccgccctgtctgggatgtgaggagcgcctctgctgggccgcaaccctgtctgggaggtgaggagcgtctctgcccggccgccccgtctgagaagtgaggaaaccctctgcctggcaaccgccccgtctgagaagtgaggagcccctccgtccggcaaccaccccgtctgggaagtgaggagcgtctccgcccggcagccgccccgtccgggagggaggtcgggggggtcagccccccgcccggccagccgccccgtccgggaggtgaggggctcctctgcccggccgcccctactgggaagtgaggacccctctgcccggccagccgccccgtccgggagggaggtgggggggacagccccccgcccggccagccgccctatccaggaggtgaggggcgcctctgcccggccgcccctactgggaagtgaggagcccctctgcctggccagccgccccgtccgggagggaggtgggggggacagccccccgcccggccagccgccctatccaggaggtgaggggcgcctctgcccggccgcccctactgggaagtgaggagcccctctgcctggccagccgccccgtccgggagggtggtgggggggtcagccccccgcccggccagccgccccatctgggaggtgaggggcgcttctgcccggccgcccctactgggaagtgaggagcccctctgcccggccacgaccccgtctgggaggtgtgcccagcggctcattgagaacgggccatgatgacaatggcggttttgtggaatagaaaggcgggaagggtggggaagaaattgagaaatcggatgattgccgggtctgtgtggatagaagtagacatgggagacttttcattttgttctgtactaagaaaaatacttctgccttgggatcctgttgatctgtgaccttatccccaaccctgtgctctctgaaacatgtgctgtgtccactcagggttaaatggattaagggcggtgcaagatgtgctttgttaaacagatgcttgaaggcagcatgctccttaagagtcatcaccactccctaatctcaagtacccagggacacaaacactgcggaaggccgcagggacctctgcctaggaaaaccagagacctttgttcacttgtttatctgctgaccttccctccactattgtcctatgaccctgccaaatccccctctgcgagaaacacccaagaatgatcaataaaaaaaaaaaaaaaaaaaa

SEQ ID NO: 568 - DNA, 967 bp, Homo sapiens
  source 1..967: mol_type = other DNA
cggccagccgccctgtccgggagggaggtggggggggtcagccccccgcctggccagccgccccgtccgggagggaggtggggggatcagccccccgcctggccagtcgccccgtccgggaggtgaggggcgcctctgcccggccgcccctactgggaagtgaggacccctctgcccggccagccgccccgtccgggagggaggtgggggggacagcccccccgcccagccagccgccctatccaggaggtgaggggcgcctctgcccggccgtccctactgggaagtgaggagcccctctgcctggccagccgccccgtccgggagggtggtgggggggtcagccccccgcccggccagccgccccatccgggaggtgaggggcgcttctgcccggccgcccctactgggaagtgaggagcccctctgcccggccacgaccccgtctgggaggtgtgcccagcggctcattggggatgggccatgatgacaatggcggttttgtggaatagaaaggcgggaagggtggggaaaaaattgagaaatcggatggttgccgggtctctgtggatagaagtagacatgggagacttttcattttgttctgtactaagaaaaattcttctgccttgggatcctgttgatctgtgaccttatccccaaccctgtgctctctgaaacatgtgctgtgtccactcagggttaaatggattaagggcggtgcaagatgtgctttgttaaacagatgcttgaaggcagcatgctccttaagagtcatcaccactccctaatctcaagtacccagggacacaaacactgcggaaggccgcagggacctctgcctaggaaaaccagagacctttgttcacttgtttatctgctgaccttccctccactattgtcctatgaccctgccaaatccccctctgcgagaaacacccaagaatgatcaataaaaaaaaaataa

SEQ ID NO: 569 - DNA, 455 bp, Homo sapiens
  source 1..455: mol_type = other DNA
cagttgaccttgaacaacaccagtttgagctaagcaggtacaactatacaggggattttcttctacccctgccactcctgacacagcaaaatgaacctcttctcttccttttccactgcagcccacacaatatgacctcggggaggatgcgaggaagatgaactgtgatgatccacttcttcttaatgaatggtaaatatattttcccttctttatgattttcttaatcacattatcttttctctagcttacttttttataagaatacagtatataatacatgtaacatacaaaatatgtgttaatcaactgtttatgttttcagtagacttctggtcaacaatgggttatcagtagttaagtttttgggaaatcaaaagttatacctggatttttgactggaggtggggtgcgattagcaccccatcactactggtgttgctcaaggctcagct

SEQ ID NO: 570 - DNA, 5699 bp, Homo sapiens
  source 1..5699: mol_type = other DNA
ttccaagatggtcgaataggaatggctccggtctgcagctggatttctgcatttccaactgaggtacctggtttatctcattgggactggttggactgtggctgcagcccacaaagggcgagctgaagcaggatggggtgtcgcctcacctgggaagcacaaggggtcggaggatttccctttcctagccaagggaagccgtgacagactgtatccggagaaacagtaccctcctgaccaactactgcactattcccacagtcttagcaactggcagaccaggagataccctcccgtgcctggctcggcaggtctcacacccacggagccttgctcactgctagcgcagcagtctgagatcgacctgcgatgctgcagctggatggagggaagggcatccaccattgctgaggttggagtagctcacagtgtaaacaaagatgcctggaagcacgaactgggtggagcccaccacagctcagcaaggcctactgcctctacagattccacttctgggggcagggcatagtagaacaaagggcagcaggtagcttctgcagacttaaacgtccctgtctgatagccctgaagacagcagtggttctctcagcaccgcattagagctccaacaacggacagactgcatcctcaagtgggtccctgacccccgtgtagcctgactgggaaacacctcccagtaggggccaacagacacctcaaacaggtgggtgcccctctgggatgaagcttcgaaaggaagggtcaggcagcaatatttgctgttctgcagcctctgctggtgatacccaggcaaataaggtctggctggactggacctccagcaaacaccaacagacctgctgctgaggggtctgactcttagaaggaaaactaacaaacagaaaggaatagcatcaatgtcaacaaaaaggacatccacaccaaaaccccatccctaggtcaccaacatcaaagaccaaaggtagataaaaccacaaagatggggagaaaccagagcagaaaagctgaaaattccaaaaacagagtgcctcttctcttccaaaggatcgcagctcctcaccggcaacagaacaagactggatgaagaatgagtttgacaagttgatggaagtaggtttcagaaggtcggtaataacaaacttcttcaagctaaagaagcatgttctaacccattgcaaggaagctaaaaaccttgaaaaatggttagatgaatggctaactacaataaaccgtgtagagaagaccttaaatgacctgatgcagctgaaaaccacggcacaagaacttcgtgatgcatgcacaagcttcaatagctgattcgatcaagtggaagaaaggatatcagtgactgaagatcaaattaatgaaataaagcaagaagacaagattagagaaaagagaatgaaaagaaatgaacaaagcctccaagaaatatgggactatgtgaaaagaccaaatttatgtttgactagtgtaccggaaagtgacgaggagaatggaaccaagttagaaaacactcttcagaatattatccaggagaacttccctaacctacaaaggcaagccaacattcaaattcaggaaatacagagaacaccacaaagacactccttgagaagagcaacccaaagacacataattatcagattcaccaaggttgaaatgaaggaaaaaatattaagggcagccagagagaaaggtctggttacccaaaaagaaaagcccatcagactaacagcggatctcttggcagaaactctacaagccagaagagagtggaggccaatattcaacattcttaaagaaaataattttcaacccagactgtcatatcaagccaaactaagcttcatcagtgaaggagaaataaaatcctttacagccaagcaaatgctgagagattttgtcaccaccaggcctgccttaaaagagctcctgaaggaagcactaaacatggaaaggaacaatcagtgccagccactgcaaaaacatgccaaatggtaaagaccactgacactatgaagaaactgcatcaattaatggacaaaataaccagctaacatcataatgacatgatcaaactcaaacataacagtattaaccttaaatgtaaatgggttaaatgctccaattaaaagacacagaccagcaaattggataaagaatcaagacccatcagtgtgctgtattcaggagacccatctcatgtgcagagacacacataggctcaaaataaaggtatggaggaagatctaccaagcaaatggaaagaaaaaaaaaaagcaggagttgcaatcctagtctctgataatacagactttaaaccaacaaagatcaaaagagacaaggccactacattatggtaaagggatcaattcaacaagaagagttaactatcctaaatatatatgcacccaatacaggagcacccagattcaaaaaccaagtccttagagacctacaaaaagacttagactcccacacaataataataggagactttaacacccctctgtcaatattagatcaatgacacataaggttaacaaggatatccaggacttgaactcaggtctgaaccaagcagacctaatagacatctactgaactctacaccccaaatcaacagaatacacattcttctcagcatcactttgcacttattccaaaattgaccacataattggtagtaaaccactcctcagcaaatgtaaaagaacagaaatcacaacaaactgtctctcacaccacagtgcaatcaaattacaactcaggattaataaactcactcaaaaccacacaactacatggaaactgaccaacctgttcctgaatgactactgggtaaataatgaaatgaaggcagaaataaagatgttctttggaaccaatgagaacaaagacaaaacataacagaatctctgggacacatttaaagcagtgtgtagagggaaatttatagcactaaatgcccaaaagagaaagcaggaaagatctaaaatcgacaccctaacatcacaattaaaagaactagagaagcaagagcaaacaaattcaaaagctagcagaaggcaagacataactaagatcagagcagaactgaaggagatagagacacaaaaaacccttcaaaaaaatcaatgaatcctggagctggttttttgaaaagatcaacaaaattgatagaccgctaggaagactaataaacaagaaaagagagaagaatcaaatagatgcaatgaaaaatgataaaggggatatcaccaccgattccacagaaatacaaactaccatcagagaatactgtaaacacctctacacaaataaactagaaaatctagaagaaatggataaattcctggacacatacaccctcccaagactaaaccagaaagaagttgaatctatgaataaaccaataacaggttctgaaatgaaggcaataattaatagcctaccaaccaaaaaaaatccaggaccagaaggattcgcagccgaattctaccagaggtacaaagaggagctggtaccactctctctgaaactactccagtcaatggaaaaagagggaatcctccctaactcattttatgaggctagcatcatcctgataccaaagcctcgtagacacacaacaaaaaaggataattttaggtcaatatccctgatgaacattgatgcaaaactcctcaataaaatactggcaaaccaaatccagcagcacatcaaaaagcttacccaccatgaccaagtcagcttcatccctgggatgcaaggctggttcaacataggcaaatcactaaatgtaatccatcacataaacagaaccaatgacaaaaaccacatgattatcttaatagatgcagaaagggcctttgacaaaattcaacagcccttcatgctaaaaactctcaataaactcggtactgatggaacatatctcaaaataataacagctatttatagcaaacccacagccaatatcatactgaatgggcaaagaagtattccctttgaaaaccggcacaatgcgggctcttttttggttccatatgaactttaaagtagttttttccaattctgtgaagaaagtcattggtagcttgatggggatggcattgaatctgtaaattaccttgggcagtatggccattttcacgatattgattcttcttacccatgagcatggaatgttcttccatttgtttgtgtcctcttttatttccttgagcagtggtttgtagcactacctgacttcaaactatactacaaggctacagtaaccaaaacagcatggtactggtaccaaaacagagatatagatcaatggaacagaacagagccctcagaaataatgccgcatatctacaactatctgatctttgacaaacctgagaaaaacaagcaatggggaaaggattccctatttaataaatggtgctgggaaaactggctagccatatgtagaaagctgaaactggatcccttccttacaccttatacaaaaatcaattcaagatggattaaagatttaaacgttaaacctaaaaccataaaaaccctagaagaaaacctaggcattaccattcaggacataggcgtgggcaaggacttcatgtccaaaacaccaaaagcaatggcaacaaaagacaaaattgacaaatgggatctaattaaactaaagagcttctgcacagcaaaagaaactaccatcagagtgaacaggcaacctacaacatgggagaaaattttcgcaacctactcatctgacaaagggctaatatccagaatctacaatgaactcaaacaaatttacaagaaaaaaacaaacaaccccatcaaaaagtgggcgaaggacatgaacagacacttctcaaaagaagacatttatgcagccaaaaaacacatgaagaaatgctcatcatcactggccatcagagaaatgcaaatcaaaaccactatgagatatcatctcacaccagttagaatggcaatcattaaaaagtcaggaaacaacaggtgctggagaggatgcggagaaataggaacacttttacactgttggtgggactgtaaactagttcaaccattgtggaagtcagtgtggcgattcctcagggatctagaactagaaataccatttgacccagccatcccattactgggtatatacccaaatgagtataaatcatgctgctataaagacacatgcacacgtatgtttattgcggcactattcacaatagcaaagacttggaaccaacccaaatgtccaacaatgatagactggattaagaaaatgtggcacatatacaccatggaatactatgcagccataaaaaatgatgagttcatatcctttgtagggacatggatgaaattggaaaccatcattctcagtaaactatcacaagaacaaaaaaccaaacaccgcatattctcactcataggtgggaattgaacaatgagatcacatggacacaggaaggggaatatcacactctggggactgtggtggggtcgggggaggggggagggatagcattgggagatatacctaatgctagatgacacattagtgggtgcagcacaccagcatggcacatgtatacatatgtaactaacctgcacaatgtgcacatgtaccctaaaacttagagtataataaaaaaaaaaaa

SEQ ID NO: 571 - DNA, 1287 bp, Homo sapiens
  source 1..1287: mol_type = other DNA
gacaaaaacaagcaatggggaaaggagtccctatttaataaatggtgttgggagaactggctagccatatgcagaaagttgaaactggagcccctccttataccatatacaaaaatcaactcaagatgaattaaagacttaaatgtaaaaacccaaactataaaaaccctagaagaaaatctaggcaataccattcaggacatgggcacaggcaaatatttcatgacaaagatgccaaaagcagtagcaacaaaagcaaaaattgacaaatggaatctaattaaactaaagagcttctgtacagcaaagaaattatcatcagagtgaacagacagcttacagcatgggagaaaatttttgcagtatatccatctgacaaaggtctaatattcagcatctacaaggaacttaaacaaatttacaagaaaaaaaaacaacgccattaaaaaatgggcaaaggacgtggacagacacttctcaaaagaagaaatttatgtgggcaatgaacattttttttaaaaaagctcaacaccactgatcattagagaaatgcacatgaaaaccacaatgagataccatctcacaccagtcagaatggctattacttaaaggtcaaaaaacaacagatgatagcaaggttgtgaagaaaaatgaacacttttatacgttggttggagtataaattagttctacccttgtcgaagacagtgtggtgattcctcaaagacctaggggaagaaatatcatttgacccagcaatctcattactgggtatatacccagaggaatataaatcattctattataaagatacatgtgcatgttcattgcaaaatagcaaaaacatggaatcaacctaaatgctcatcaatgacagacttgataaaggaaatatggtacgtatacaccaaggaataccatgcagccataaaaaggaacaagataatgtcttttgcagggacctggatggaaccagaagccattatcctcagcaaattaatgcaggaacagaaaagcaaataccacatgttctcacttgtaagtggtagctgaatgatgagaacacatggacacatggtggggaacaatacacactggggcctgttgcagggtgcggagtgggagggagagcatcgggaagaatagctaatgcatgctgggcttaatacctaggggatggaatgatctgtgctgcaaaccactatggcacacatttacctatgtaacaaacctacacatcctgcacatgtacccctgaccttaaaataaaagttggaaataaaaaaa

SEQ ID NO: 572 - DNA, 4856 bp, Homo sapiens
  source 1..4856: mol_type = other DNA
tggcaacatcctctccccgacccatgctgccatcagcctttccacctttgtctgaggagataaaccctgtgctgcctgaggcaacagtgatggcctcccctgaggcagttgccaggcaagataatatcgattctcctctagcaccctcaacacctttgtttgcttctagacctataactaaagtcccgatgggcccacagaagtgaggttcagagtgtgacccatggggaggtgagctacacttgaattgagttttctaatttatataagcagaaatttggagaacaggcacgggaatggatattaagggtgtgggataatgctggaaggaacatacagatgcatcaggctgaatttattgatttgggctcactaattagggatcctgcatttaatgttgcagcctgaggagttaaaaaaggttccaatagcttatttgcttggctagctgaaatatggattaaaagatggcccatcatgggtgagctgggaatgcttgatctcccttggtctaatgtagaggaagggatccaaaggcttagggagattgggatgatggagtagattagtcactttagacctactcatcccagctgggagggtccataagacataaccttaaccaatggcttgcaaaatagatttgcgagggcagcacctgcatctttgaagagccctgtaattgccagatccagcagttggaatttcagtcactcacctacaaaaatttaatacattgggaataattggatcccgaggtggcaggggccaagtggtggcactcaaccatcaaaggcaaggtaggcatagctatcataatggacaacagagacaaagcagcaatcagaatagtctgactcatgtagatctctggcgttggctaattaatcacagtgttcccagaaatgaaactgataggaagcctactgcaatcctatttaatttatataagcagaaaacttccaggtcgaatggacaaaagactaatttgaattacaaaaacagaatcatggcccttcaatttccagacttgggctagtttacagacccagaaccccttgaatgaaggggaggccaggtcccttgaggaaggaccccactacactactgacaatttatgctgttaatctttctctcatccttccctaaggagacctctggctttttaccagggtaactgtgcactggggaaagggaaatgatcagacatttcggggactacaggacactggctccgagctgacgctgattccaggggacccaaaacatcattgtggtcctccagttaaagtaggggcttatggaggtcaggagttttagctcaggcctgacttacagtgggtccagtgggtccccagactcaacctgtggtcattttcccagtgccagaatgcgtaataggcacagacatacttagcagctggcagaacccccacactggctccctgttagggtgaaggctattaaggtgggaaaggccaaatggaagccattagagccacctctacctagaaaaatagtaaatcaaaaacagtatcacatccctggagggactgtggagattagtgccaccatcaaggacttgaatgatgcaggggtggtgattcccaccacatccccattcaactctcccatctggcctgagcagaagacagacggatcttagagaatgactgtgaattatagaaagcttaaccaggtggttgctccaattgcagctgctataccagatgtggtttcattgcttgagcaaattaacacatctcctggtacctggtatgcagccgctgacttggcaaatgcctttttctccattcctgtccataaggcccaccagaagcaatttgccttcagctggcaaggccagcaatataccttcacggtcctaccctaggggcctatcaactctccgactttgtgtcgtaatcttattcagagagaccttgatcgctttttgcttccacaagatatcacattggtccattacatttatgacattatgccgactggatccagtagcaagaagtagcaaacacactggacttactggtaagacatctgtgtgccagaggatgggaaataaatctgactaaaatttagggaccttctacctcagtaaaatttctaggggtccagtggtgtgtggcctgtcaagatatgccttctaaggtgaagagtaagttgctgcatttggtccctcctacaatcaagaaagaggcacaatgcctagtgggcctatttggtttttggaggcaacacattcctcatttgggtatgccactccagcccatttatcgagtgacccaaatggctgccagttttgagtgggatccagaacaggagaaggctctgcaacaggcaggtctaggctgctgtgcaagctgctctgccacttggcccctaagacccagcagatccaatggtgcttgaggtgtcagtggcagatagggatgctgtttggagcctttggcaggcccccataggtgaatcacagcgaaggcctctaggattttggagcaaggccctgccatcttctgcagataactactctccttttgagagacagctcttggcctgttacactatgggtcatcaaatcaccatgcaacctgaactgcctaccatgaactgggtgctttctgacccagctagccatcaagtgggtcacgcacagcagcattccatcatcagatgaaagtggtatatatgtgattgggctcaagcggatcctgaaggcacaagttacatgaggaagtggctcaaatgcccacagactccactcctgccaccccaccttctctcccccagcctgcaccgatggcctcatgggaagttccctatgatcggttgacggaggaagagaagactagggcctggttcacagatggttctgtatgatatgcaggaaccacctgaaagtggatagctgcagcactacagcccctttctaggacatccctgaaggagagtggcgaagggaaatttcccagtgggcagaacttggagcagtgcacctcgctgtgcactttccatggaaggagaaatgagaagatgtgtaattatatactgattcatgggctgtagccaatggtttggctggatggtcagggacttcgaagaaggatgactggaaagttggtgacaaagaaatctggggaagagggatgtggatggacctgagtggtcaaaaactgtgaagatatctgtatcccatgtgagtgctcaccaatggaagacctcagcagagaaaggttttaataatcaagtgtataggatgacctgttctgtggacaccactcagcctctttccccagccacccctgtcatcgtgcaatgggcccatgaacaaaatggtcatagtggcagggatggaggttgcgcatgggctcagcaacatggacttccacttaccaaggctgacctggctacagccactgctgagtgcccaatctgccagcagcagagaccaacactgagccctcaatatggaaccatccctcggggtgatcagccagctacctggcggcaggttgattatattggacctcttccatcatggaaagggcagaggtctgtcctcactagaatagacacttactctggatatgggtttgcttatcctgcacgcagtgcttctgccaagactaccattcacggactcatggaatgctttatccatcgtaatggtattccacacagcattgcctctgaccaaggcactcactttatggctaaagaagtgtagcagtgggctcatgctcacagaattcactgatcttaccatgttccccatagtcctgaagcaactggattgacagaatggtggaatgaccttttgtagtcataattactccaactagtgacaatactttgcagggctggggcaaagttctccagtaggccatgtatgctctgaattagcatccaatatatggtactgtttctcccatagccaggattcatgggtccaggaatcaaggggtggaagtgcaaatggcaccactcaacatcatccctagtgatcaactagcaaaattttgcttcctattcccgcgacattacattccgttggcctagaagtcttagtttcagagggaggaatgctgccaccaggagacacaacgattccattaaactggaagttaagattgccacctggacactttgggctcctcctacctttaagtcaatagcctaagaagggagttacagtgttggctgggatgaatgacccagactatcaagatgaaatcagtctactactccacaatggaggtaaggaagagtatgcatggaatacagaagatccattagggcatctcttagtattaccatgccctgtgattaaggtcaatgggaagctacaacagcccaatccaggcaggactacaaatggcccagacccttcaggaatgaaggtttgggtcactccaccaggaaaaaaaaccatgacctgctgaggtgcttgctgaaggcaaagtgaatacagaatgtgcaggagaagaaggtagtcattaataccaactacgaccaagtgaccagttgcagaaatgaggactgtaattgttgtatttcctccttcttttattaaaaacatgtttgtgatgtatacacttgtactaagaaaacatctgcattttatttcctttatcatgtgacgtaagatttactgacttcatatcagcatttaagtattgctacctttatgtaatagcacttgggttggggattagtgtgtttcggttgcatgaacgatacttgtattatgttaagcataattatgaccttattgtctttatttgaagattatgtatgatctcaggagatgtgtatgggttcaagttgacaagggatgg

SEQ ID NO: 573 - DNA, 710 bp, Homo sapiens
  source 1..710: mol_type = other DNA
cagtggaatgacatggtcaaattgctgaagaaataactaccaacccagatttctatccacaacaatagtatttttcaggaagagcacaatataagattatatctggtcaaaaattggaaatttagtagaaaagtaaccctaaaagttatccttaaggccaaaggaaagtgattacaggtgaaagttctgcagtggtagaaggaatgagaatccaagagatggatgcatctgcagatcaatacaattacttattatctctatacaacatgaacaatatcttctaattgagcagaataatagatatgctatactccaataccaacactcaatgacatcctttgatgtgttcaagagaagggtaaaggtattaacaattctataataggttagagaagtgttacaattcttatcttagactaatgaataaaatgagtatatacatttcaaactaaaagaaaattaagattattaaaacctatatatttttaaaagaaagcacaaaaaacagcctagaagaaaaccacaaaataagatgcatttaaaaccaaatatattagctatcacatgaattgaatacagaatgcgtgaatagtaatttctaatggattaaaataatccagtagtagttcataaattacacatctaagatataatgtcatagaaatatatgaaatagaagaatgaaatatgtatacttataattactaaac

SEQ ID NO: 574 - DNA, 4314 bp, Homo sapiens
  source 1..4314: mol_type = other DNA
aacagtcttaaagaaaagaattttcaacccggaatttcatatccagccaaactaagcttcataagtgaaggagaaataaaatactttacagacaagcaaatgctgagagattttgtcaccaccaggcctgccctaaaagagctcctgaaggaagcactaaacatggaaaggaacaactggtaccagccactgcaaaaacatgccaaattgtaaagaccatcaaggctaggaagaaactgcatcaactaatgagcaaaataaccagctaacatcataatgacaggatcaaattcacacataacaatactaaccttaaatgtaaatgggctcaatgctccaattaaaaggcacagactggcaaattggataaacagtcaagacccatctgtgtgctgtattcaggaaacccatctcacatgcagagacacacataggctcaaaataaagggatggaggaagatctaccaagcaaatggaaaacaaaaaaaggcaggggttgcaatactactctcggataaaacagactttaaaccaacaaagatcaaaagagacaaagaaggccattacataatggtaaagggatcaattcaacaagaagaactaactatcctaaatatatatgcacccaatacgggagcacccagattcataaagcgagtccttagtgacctacaaagagacttaaactcccacacaataataatgggagactttaacaccccactgtcaacattagacggatcaacaagacagaaagttaacaaggatatcgaggaattgaactcagctctgcaccaagcggacctaatagacatctacagaactctccaccccaaatcaacagaatatacattttttttcagcaccacactacacctattccaaaattgaccacatagttggaagtaaagcactcctccgcaaatgtaaaagaacagaaattataacaaactgtctctcagaccacagtgcaatcaaactagaactcaggattaagaaactcattcaaaaccacttaactacatggaaactgaacaacctgctcctgaatgactactaggtacataacgaaatgaaggcagaaataaagatgttctttgaaaccaacgataacaaagacacaacataccacaatcctgggacacgtccaaagcagtgtgtagagggaaatttatagcactaaatgcccaccagagaaagcaggaaagatctaaaattgacaccctaacatccaattaaaagaactagagaagcaagagcaaacacattcaaaagctagcagaaggcaagaaataactaagatcagagcagaactgaaggaaatagagacacaaaaaacccttcaaaaaatcaatgaatccaggagctggttttttgaaaagatcaacaaaattgatagaccactagcacgactaataaagaagaaaagagagaagaatcaaatagatgcaataaaaaaagacaaaggggataacagcacccatcccacagaaatacaaactaccatcagagaatactataaacacctctacgcaaataaactagaaaatctagaagaaatggacaaattcctcgacacatacactctcccaagactaaaccaggaagaagttgaatctctgaatagaccaggctctgaaattgaggcaataattaatagcttaccaaccaaaaaaagtccaggaccagatggattcacagccgaattctaccagaggtacaaggaggagctggtgccattccttctgaaactattccaatcaatagaaaaagagggaatcctccctaactcattttatgaggccagcatcatcctgataccaaagcctggcagagatgcaacaaaaaaagagaattttagaccaatatccttgattaacattgatgcaaaaatcctcaataaaatactggcaaaccgaatccagcaacacatcaaaaagcttatccaccatgatcaagtgggcttcatcccaggggtgcaagggtggttcaacatacgaaaatcaataaacgtaatccagcatataaacagaaccaaagacaaaaaccacaggattatctcaatggatgcagaaaaggcctttgacagaattcaacaacccttcatgctaaaaactctcaataaattagatattgatggtaacgtatctcaaaataataagagctatctatgacaaacccacagccaatatcatactgaatggacaaaaactggaagcactccctttgaaaactggcacaagacagggatgccctctctcaccactcctattcaacatagtgttggaagttctggccagggcaatcaggcaggagaaggaaataaagggcattcaatcaggaaaagaggaagtcaaattgtccctgtttgcagatgacatgattgcatatctagaaaaccccatcgtctcagcccaaaatctccttaagctgataagcaacttcaacaaagtctcaggatacaaaatcaatgtgcaaaaatcacaagcattcttatgcaccaataacagacaaacagaaagccaaatcatgagtgaactcccattcacaattgcttcaaagagaataaaatacctaggaatccaacttacaagggatgtgaaggacctcttcaaggagagctacaaaccactgctcaatgaaataaaagaggatacaaacaaatggaagaacattccatgctcatgggtaggaagaatcaatatcgtgaaaatggccatactgcccaaggtaatttatagattcaatgccatccccatcaagctaccaatgactttcttcacagaattggaaaaaactaccttaaagttcatatggaaccaaaaaagagcccgcattgccaagtcaatcctaagccaaaagaacaaagctggaggcatcatgctacctgacttcaaactatactacaaggctgcagtaaccaaaacagcatggtagtggtaccaaaacagagatatagaccaatggaacagaacagagccctcagaaataatgccgcatatctacaactatctgatctttgacaaacctgaaaaaacaaacaatggggaaaggattccctatttaataaatggtgctgggaaaactggctagccatatgtagaaagctgaaactggatcccttccttacatcttatacaaaaattaattcaagatggattaaagacttaaatgttagacctaaaaccataaaaaccctagaagaaaacctaggtaataccattcaggacataggcatgggcaaggacttcatgtctaaaacaccaaaagcaatggcaacaaaagccaaaattgacaaatgggatctaattaagctaaagcacttctgcacagcaaaagaaaccaccatcagagtgaacaggcaacctacagaatgggagaaaatttttacaacctacttatctgacaaagggctaatatccagaatctacaatgaactcaaacaaatttataagaaaaaaaacaaccccatcaaaaagtgggcaaaggatatgagcagacacttctcaaaagaagatatttatgcagtcgaaaaacacatgaaaaaatgctcatcatcactggccatcagagaaatgcaaaacaaaaccacaatgagataccatctgacaccagttagaatggcgatcattaaaaaatcaggaaacaacaggtgctggagaggatgtggagaaataggaacacttttacattgttggtgggactgtaaactagttcaaccattgtggaagttggtgtggcgattcctcagggatctagaactagaaataccatttgacccagccatcccattactgggtatatacccaaaggattataaatcatgctgctataaagacacatgcacgtgtatgtttattgtggcactattcacaatagcaaaaacttggaaccaacccaaatgtccaacaatgatagactggattaagaaaatgtggcacatatacaccatggaatactatgcagccataaaaaatgatgagttcatgtcctttgtagggacatggatgaagctggaaaccatcattctcagcaaactatcacaaggacaaaaaaccaaacactgcatgttctcactcataggtgggaattgaacaatgagaacacatggacacaggaaggggaacatcacacactggggcttgttgtggggtggggggatgggggagggatagcattaggtgatataactaatgctaaatgatgagttactgggtgcagcacaccaacatggcacatgtatacatatgtaacaaacctgcacgttgtgcccatgtaccctaaaacttaaagtataataataattttaaaaaa

SEQ ID NO: 575 - DNA, 2029 bp, Homo sapiens
  source 1..2029: mol_type = other DNA
aagagcaccttaaaaccagaactgcttaacctatttctgagactccaaaaagctgttcgctctcatgctgccccttttcatatttctcatatccgatctcacacacaacttcctggggccactatctctaggtaatgatagagcagataaattcatcagttctatatttcaacaagcccaagcttcccatgctttactgcatcagaacaacttgcccttactcgtatgtttcatctgcctcgcagccaggcttgagttattgtgcaagcctgccccacttgccagcatgtccctggtgttgcacctgtggaaggatgcaacccacgaggcttggctccaaatgaaatctggcagatggatgttacatatatatagcagcctttggctaactccgctatgttcatgtaatatagacacttactcccatatgttacatgccacatgccaaactggggaaacagctggtcatgtctgacgatactgtctgtcgtcatttgcccatatgggggtccctaaacaatttaaaactgacagtggactcgcttatgttagtcatgctttcccaattttttacaattgtgggcaatcaatcataaaacaggaattccatacaatccctgagggccaggcattattgagcgggtacatcaaacactacaacgcatgctgaaaaaacaaaaagggagaataggggaccaattaccacttcaaacaaaattacatttagccttgtttactttaaattgtttgactcctggtacggatggcaagaccccagcagaacgacactggcaactgctagaggaaaagaggcaagtttatccaaaagtgttatggaaatccccagaagaaggacaatggaaaggtccggtggatttgctgacgtggggacgagggtatgcttgtgtttttacaggagatggacaaaccgtgtgggtgccctccaggtgtgtgtgaccatggaacgggagaccggagggatccatggtattcaaccgtgggcctgttacctccagtacgagccatgagccagcggaatctgaatgcaaagacagaacaagggccgaccggagtcacaatgacatccaaccccataacatggggacagatcaagaaaacgacacaagaagctgagaaactactggagcgccagggtcaggcaaaaacccctgactccatgttcttggccatgctagctgtagtgtcctgtgcggtatgtttcccctgtgtagaggcaaaaacatattgggcatatgttcctaacccactggtagtacgactggtactctggagcgacactcctcctgagatatattatgatcagggagcgtgggcaccaggacccctaactccgtctgacacagagcaatagcatcaattacaccggcccattggaaggactccctttatgtatcaccatggatacgtcactcaactgcagctgtcttgcagtccaatctcaggcatggttaagtcaccatggaaaaattatgtatttattaggcctcagctttattaatgttactggcgtgttcaccaatcactcctagccccatcactcaaattgtatggattatatggaatgggctccctttgatatttctcacccccctccttggacccagtgtcttggccccttggccagacaacagtctatgttaatgggaaacattgactggggtccccgtggccatttagaggggagagatgaaaatcagacctcttggcacaaacttcactggcactggtggtggaccttcaacacctcttcatcacatcacactgggattcagtcccccagttggctgcacaacttgcttggtataggacaggctttaacccgcccttacctcagtgacgtcatctaggaaacagaggcccaattcaggaatcgatatggaaggcaacactcccatttatgaataacagcatctgggtcagaacattatccaacaatagtaatattactcaacacagttttaatatcacctttgtaaaaaatattaccactcaatttacggtttgtggg

SEQ ID NO: 576 - DNA, 5569 bp, Homo sapiens
  source 1..5569: mol_type = other DNA
catccctgtctgacagctctgaagagagcagtggctctcccagcatagctgctgagctctgagaatgaacaaactgcctcctcaagtgagtccctgacctctgtgtagcctaacagggagacacttcccagtaggggccaacagacaccacatataggtgagtgccctctgggacgaagcttccagaggaaggataaggcagcaatatttgctgttctgaaataattgctgttctgcagcctccactggtgatacccaggcaaacagggtctggagtggacctccagcaaactccaacagacctgcagctgagggacctgactgttagaaggaaaactaacaaacagaaagaaatagcaccaacatcaacaaaaaggacatctacaccaaaaccccatccgtaggtcaccaacatcaaagaccaaaggtagataaaaccacaaagatggggagaaaccagagcagaaaagctgaaaattctagaaaccagagtgcatcttctcctctgaaggatcacagctcctcgccagcagtggaacaaagctgggtggagaatgatttgacaagttgacagaagtaggcttcagaaggtcgctaataacaaacttctctgagctaaaggatcatgttcaaatccactgcaaagaaggtaaaaatcttgaaaaaaggatagacaaatggctaactagaataaacaatgtagagaagaccttaaataacctgatggagctgaaaaccatggcacgagaacttcatgacacatgcacaagcttcaatacccaattcgatcaagtggaggaaagggtatcactgattgaagatcaaattcatgaaatgaagtgagaagagaaggttaaagaaaaaacaataaaaagaaatgaacaaaatctccaagaaatatgggactatgtgaaaagaccaaatctacatctgatgagtgtacctgaaagtgatgcggagaatggaaccaagctggaaaacactcttcaggatattatccaggagaacttccccaagctagtaaggcaggccaacattcaaattcaggaaatacggagaacaccacaaagatactgctcgagatgagcaaccccaagacacataattggcagattcaccaaggttgaaatgaaggaaaaaatgttaagggaagccagagagaaaggtcggtttacccacaaagggaaacccatcagactaacagtggatgtcttggcagaaactctacaagccagaagagagggggggccaacattcttaaagaaaagaattttcaacccagaatttcatatccagccaaactaagcttcataagtgaaggagaaataaaatcctttacagacatgcaaatggtgagagattttgtcaccaccaggcctgccttacaagagctcctgaaggaaacactaaacatagaaaggaacaaccagtaccagccactgcaaaaacatgcctaattgtaaagaccttcgatgctatgaagaaactgcatcaattaatgggcaaaataaccagcaaacatcatactgacaggatgaaattcacacataacaatattaaccttaaatgtaaatgggctaaatgccccaattaaaagacacagacgggcaaattggataaacagtcaagacccatcagtatgctgtattcaggagacccatctcatgtgcagagacacatatagactcaatataaagggatggaggaagatctaccaagcaaaaggaaagcaaaaaaaaaaagcagggattgcaagccgagtctctgataaacagactttaaaccaattgagatcaaaagagacaaagaaggccattacataatggtaaaggaatcaattcatcaagaaaagctaactacctaaatttatatgcacccaatacaggagcacccagattcataaagcaagtccttagagacttacaaagagacttagactcccacacaataataatgggaggctttaacaccccactgtaaaaatcagacagattaacgagacagaaagttaacaaggatatacaagacttgaactcagctctgcaccaagcagacctaatagacatctaaagaactctcctccccaaatcaacagaatatacattcttctcagcaccacattgcacttattctaaaatttaccacataattggaagtaaaacactcttcagcaaatgtaaaagaaaagaaatcacaacaaacagcctctcagaccacggggcaatcaaattagaactcaggattaagaaactcactcaaaatggcacaactacctggaaactggacaacctgctcctgaatgactgctggttaaataacgaaatgaaggcagaaataaagatgttctttgaaaccaatgagatcaaagacacaatgtacaagaatccctgggacacatttaaagcagtgtgtacaggggaatttatatcactaaatgcccacaagagaaagcaagaaagatctaaaattgacatccgaacatcacaattaaaagaactagagaagcaagagcaaacaaattcaaaactagtagaaggcaagaaataactaagatcagaggagaactgaaagagatagagacacaaaaagacccttcaaaaaatcaatgaatccaggagctggttttttgaaaagatcaacaaaattgatagaatgctagcaagactaataaagaagaaaaaaaagaatcaaatagatgcaataaaaaatgacaaaggggatatcaccaccaatcccacagaaatacaaactaccatcagcgaatactataaacacctctatgcaaataaactagaaaatctagaagaaatggataaattcctcaacacaccctcccacgactaaaccaggaagaagttgaatctctgaatagaccaataacaggctctgaaattgaggcaacaattaatagcctatcaactaaagtaattccaggacatgatggattcatagccgaattctaccagaggtacaaagaggaactgataccattccttctaaaactattccaatcaatagaaaaagggggaatcctccctaactcattttatgaggccagcatcatcctgataccaaagcctggcagagacagaaaaaaaagagaattttagaccaataaccctgatgaacattgatgcgaaaatcctctataaaatactggcaaattgaatccagctagcacatcaaaaagcttatccaccaggatcaactcggcttcatccctgggatgcaaggctggttcaacatatgcatatcaataaacataatccatcacagaaacagaagacatgacaaaattcacatgattatctcaatcgatgcagaaaaggcctttgacaaaattcaacagtgcttcatggtaaaagctgtcaataaactaggtactgatggaacatatctcaaaatactaagagctatttgtgacaaacccacagccaatatcatactgaatgggcaaaaactggaagcattccctttgaaaaccagcacaagacaaggatgccctctctcaccgtttctattcaacatagtgttgaaagttctggccagggcagtcaggcaagagaaagaaataaaggttattcgattaggaaaagaggaagtcaaattgtccctgtctgcagatgacatgactgtatatttagaaaaccccatcatctcagcccaaaatcttcttaagctgaaaagcaacttcagcaaagtctcaggatacaaaatcaatgtgcaaaaatcacaagcattcctatatgccaataacagaaaaacggagagccaaatcatgagtgaactcccattcacaattgctacaaagagaataaaatacctaggaatccaatttgcaaggtatgtgaaggacctcttcaaggagaactacaaaccactgctcaacaaaataaaagaggacacaagcaaatggaagaacgttccatgctcatggataggaaaaatcaacatagtgaaaatggctatactgcccaaggtaatttatagattcaatgccatccccatcaagctaccaattactttcttcacagaattggaaaaaactactttaaagttcatatggagccaaaaaagagcccgcattgccaagacaatcctaagcaaaaagaacaaagctggaggcatcacactacctgacttcaaactataccacaaggctacagtaaccaagacagcatggtactggtaccaaaacagagatatagaccaatggaacagaacagagccctcagaaataacaccatacatctacaaccacctgatctttgacaaacctgacaaaaacaagcaatggggaaaggattccctctttaataaatggttctgggaaaactggctagccatatatagaaagctgaaactggatcccttccttacaccttatacaaaaattaactcaagatgtattaaagactgaaatgtcagacctaaaacgaaaaaaaccctagaagaagacctagccaataccattcaggacataggcatgggcaaggacttcatgactaaaacaccaaaagcaatggcaccaaaagccaaaataaacaaatgggatctcattaaactgaagagcttctgcactgcaaaataaactaccatcagagcgaacaggtaacctacagaatgggagaaaagttttgcaatctacccatctgtcaaaatctgacaaagagctaatatccagaatctatagagaactcaaacaaatttacaagaaaaaatcaaacaaccccatcaacaagtgggcaaagaatatgaacagacacttctcaaaagaagacatttatgcagccaaaagacacatgaaaaaatgctcatcatcactggccatcagagaaatgcaaatcaaaaccacagtgagataccatctcaccccagttagaatggtgatcattaaaaactcaggaaacaacagatgctggagaggatgtggagaaataggagtgcttttacactgttggtgggagtgtaaattagttcaaccattgtggaagtcagtgtggcaatttcttaaggatctagaactagaaataccatttgacccagctatcccattactgggtatatacccaaatgaatataaatcatgctcctataaagacacatgcacacatatgtttattgtggcactattcacaatagcaagacttggaaccaacccaagtgtccatcaatgataaactggattaagaaaatgtggcacatatacaccatggaatactatgcagctgtaagaaaggatgagtttatgtcctttgcagggacatggatgaaactggaaacatcattctcagcaaactatcacaaagacagaaaaccaaacactacatgttctcactcataggtgggatttgaacaatgagaacccttggacacagggtggggaacatcacacaccagggcctgtcagggggtgggggtttggaggagggatagcattaggagaaatacctaatgtaaatgacgaattgatgggtgcagcaaaccaacatggcacatgtatacctatgtatcaaacctgcaagttgtgcacttgtaccctagaacttaaagtataatttaaaaataa

SEQ ID NO: 577 - DNA, 3755 bp, Homo sapiens
  source 1..3755: mol_type = other DNA
ggagcaagatggcagaatagaaggctccactgatcatctccctggcaattacaccaacttagcaactatctacaaaataaagctcctttataagaatcaaaaatcaggtgaacactcacagtatctggttttaactttccattactgaaagaggcactgaagaggtagaaaagagtcttgattcaccagtgctaccctttccccatctcttgacagtagcagcatgttgcagagtgtttctgtgtgctgggaagagggagagcacagcaattgtgaggccttaaactcagtgctgccttattataacagaagacaaaactcggccaaactcagctgatgcccgcccatggaggaagcattgaaaccagccctacacagaggggaatcaccaattccagtggtctgaacttgagttcccacaagccttgctactgtgggctaaagggctctgtggctgtaaataaactcgaaagacagtctaggccacaaggactgcaacatctaggagtgttctcatgctgaactgggtccagagacagtggactagggggcacatgacctactgagacaccagctggggcagctaagggatgctggcatcaccgttcccctaaccccaggctgcacagctcatagctccaaaagataccacttccctttgcttgaggagaggagagggaagattgaggaggacttcatcttgcatcttgggtaccagctcagccacagcaagatagggcactggttagagtcatgaggcctccttccaggccctagctcctggatgacattctagacacgtagacacatcctaggccagaaaagatcctactgccttgaagggaaggacctagtcttggcagcattcatcacctgttaactgaagagcccttgggccctgaataaccagcagtgacactcaggtactacgtcaagggccttgggtgaacctcagagacttgctggcttctggtgagactcagcacattcccagctgtggtggctacggggcgagactccttcaacttaagaaaagcagaagaaaaagtaaaggtgaccttgtcttgcaccttaggtaccaactcagtcacaggggtgtggagcaccaagcaggctcttgtgttctctgattccaggtcttaactctcggacagcatttctggacctgccctgggccagaggggagcccactgccctgaagggtgagttccaggccaggcagcattcaccacaagctgattgaagggcttctgggtcgtaagggaacatctgtggtagtctggcagtatccctgtgggcctgtgatgacagtggctatggggtgagactcctttgcttttggaagaaggagaaaagaatgagaaagactgcatcttctggtttcagtgccagctccactgcagtacaatagaacaccagatagatttctaaaggttttgattctagtccctgactccctggtggcacctctggacccacctgggcctacgagatctcaccagcctgaagggaaagacacaagcctggatggttttaccacctgttgattatagagccccagggccttgagcttgggaatggttatagcaggccctggacaagactcagtgctgtgtcggcttcaagtgtgacccagcatagttctagtggtggtggccacaggtgctggtctcactccacccccagcttcaggtggctcagcacagagagtgagagactccatttgttgggagaaagtaagggaagaagagtcagcctggtaatacagagaattctttcagatcttgtccaagacaatcaaggtggtacttctacgagtctgcaagaaccacagcattactgggcttagggtgcccctaaatcagatatagcttagatcacaacacccatgtctttttgaatatctggaaagtctttccaagaaggacagattcaaacaagcctagactgtgaagactacaattaatgccaaactcatcaaattcccagatgaatatctacatgtatcaagaccatccaggaaaacatgacctcaccaaatgaactaaacaagacaccagagaccaatcttggacaagatctgaaggaattctctggattaccaggaagaaactcttgttttcttcccttactttctctgaaacaaatggagtctctctctcactctctgtgctgagtcacctgaagctgcgggtggagggacacaaacaccctgtggccaccccattagaactatgctgggtcacacttgaagccagcacagccctgagtctcgcccagagcctgctgtaaccactcccaggctatggcctatgttcgcgcaaggccctggggctctgaaataagtaacctttcagacagataattcaaaatagctgttttgagaaaactcaattaaattcaaggtatcacagggaaggaattcagatttctatcagataaatttaacaaagagattgaaataattaaaaagaatcaagcagaaattttcaagctgaaaaatgcaatgtgcatactgaagaatgcatcagagttttttagtagcagacttgatcaagcagaagaaaaaataaatgagcttgaagatgggttatttgaaaatacacagtcagaaaagacaaagaaaaagaatgttaaaaaaataaagcatgtctacaggacctagaaagcttgaaaagggcaaatctaagacttttggctttaaaggggaggtagagaaaaagataggtgttcttcaaaggaataataacagaaaatcttcccaaacttagagaaagatatcagtgtcccagtgcaagacggttatagaacaccaagcagatttaacccaaaggcatttaaaaatcaaactcccaaaggtcaagtatgcagaaaggatcctaaaagcaataagaaaaaataaataaataacctatagaggcactccaatacatccggcagcagacatttcagtggaactgttttaggccaggagaaagtggcattacatatctaaagtgctgaagagaaacattttttatcctagaattgtacatctggtgaaaatatccttcaaacatgaagaagaaatgaagactttcccagacaaacaaaagctgaagaatttcatcaacaccagacctgtcctacaagaaatgctaaagggagtatttcagtcagaaagaaaaagacattaatgagcaataagaaatcatctgaaggggcaaaactcactggtaatagtaagcacacagaaaaacactgaatattataacactgtaactatagtgtgtaaagtactcttaagtagaaagacaaaaaaagaaccaatcaaaaattataactacaacaacttttcaagacatagtacagtaagatataaatagaaacaacaaaaagttaaaaagcaggggtacgaacctaaggcatagaatcttcattaatacttttctttttgcttgtatgtttgtttatgcaaacagtgtttggttgttatcagcttaaaataatgggttacaagatagtattggcaaacctcatggtaattaacaccaaaaaacatataacaggtacacaaaaaataaaaagcaagaaactaaatcatataacctgagaaaatccccttcactaaaagaaaaaaaggaaagaaagaaagaaggaagaaatgacacgaaacaaccagaaaacacataacaaaatggcaggagtaagtcattacttatcagtaataacactgaatgtgaaaggactaaaactctccaatcaaaagacagagt

SEQ ID NO: 578 - DNA, 205 bp, Homo sapiens
  source 1..205: mol_type = other DNA
agaaaaaaatgtacttggattttatgcttgctacttcctcgctcttgagtaaattatcctttctatgcatcagtttcctcatctgaaaaataggcattctagtaatatatacctcattaggctgttctgaggaatgtgataatacacgtaaaatgcagtccctggcacactgtaaatgtctaacaaacgtttggcggctattact

SEQ ID NO: 579 - DNA, 6032 bp, Homo sapiens
  source 1..6032: mol_type = other DNA
gaggaggagccaagatggccgaataggaacagctccggtctacagctcccagcgtgagcgacgcagaagacgggtgatttctgcatttccatctgaggtaccttaccgggttcatctcactagggagtgccagacagtgggcgcaggccagtgtgtgtgcgcaccgtgcgcgagccgaagcagggcgaggcattgcctcacctgggaagcgcaaggggtcagggagttccctttccgagtcaaagaaaggggtgacagacgcacctggaaaatcgggtcactcccacccgaatattgcgcttttcagaccggcttaagaaacggcgcaccatgagattatatcccacacctggctcagagggtcctacgcccacggagtctcgctgattgctagcacagcagtctgagatcaaactacaaggcagcaacgaggctgggggaggggcgccggccattgcccaggcttgattaggtaaacaaagcagccaggaagctcgaactgggtggagcccaccacagctcaaggaggcctgcctgcctctgtaggctccacctctgggggcagggcacagacaaacaaaaagacagcagtaacctctgcagacttaagtgtccctgtctgacagctttgaagagagcagtggttctcccagcacgcagctggagatctgagaacgggcagactgcctcctcaagtgagtccctgacccctgacccccgagcagcctaactgggaggcacccccaagcaggggcacactgacacctcacacagcagggtattccaacagacctgcagctgagggtcctgtctgttagaaggaaaactaacaaccagaaaggacatctacaccgaaaacccatctgtacatcaccatcatcaaagaccaaaagtagataaaaccacaaagatggggaaaaaacagaacagaaaaactggaaactctaaaacgcagagcgcctctcctcctccaaaggaacgcagttcctcaccagcaacagaacaaagctggatggagaatgattttgacgagctgagagaagaaggcttcagacgatcaaattactctgagctacgggaggacattcaaaccaaaggcaaagaagttcaaaactttgaaaaaaatttagaagaatgtataactagaataaccaatacagagaagtgcttaaaggagctgatggagctgaaaaccaaggctcgagaactacgtgaagaatgcagaagcctcaggagccgatgcgatcaactggaagaaagggtatcagcaatggaagatgaaatgaatgaaatgaagcgagaagggaagtttagagaaaaaagaataaaaagaaatgagcaaagcctccaagaaatatgggactatgtgaaaagaccaaatctacgtctgattggtgtacctgaaagtgatgtggagaatggaaccaagttggaaaacactctgcaggatattatccaggagaacttccccaatctagcaaggcaggccaacgttcagattcaggaaatacagagaacgccacaaagatactcctcgagaagagcaactccaagacacataattgtcagattcaccaaagttgaaatgaaggaaaaaatgttaagggcagccagagagaaaggtcaggttaccctcaaaggaaagcccatcagactaacagcggatctctcggcagaaaccctacaagccagaagagagtgggggccaatattcaacattcttaaagaaaagaattttcaacccagaatttcatatccagccaaactaagcttcataagtgaaggagaaataaaatactttatagacaagcaaatgctgagagattttgtcaccaccaggcctgccctaaaagagctcctgaaggaagcgctaaacatggaaaggaacaaccggtaccagccactgcaaaatcatgccaaaatgtaaagaccatcgagactaggaagaaactgcatcaactaatgagcaaaatcaccagctaacatcataatgacaggatcaaattcacacataacaatattaactttaaatataaatggactaaattctgcaattaaaagacacagactggcaagttggatagagtcaagacccatcagtgtgctgtattcaggaaacccatctcacgtgcagagacacacataggctcaaaataaaaggatggaggaagatctaccaagccaatggaaaacaaaaaaaggcaggggctgcaatcctagtctctgataaaacagactttaaatcaacaaagatcaaaagagacaaagaaggccattacataatggtaaagggatcaattcaacaagaggagctaactatcctaaatatttatgcacccaatacaggagcacccagattcataaagcaagtcctcagtgacctacaaagagacttagactcccacacattaataatgggagactttaacaccccactgtcaacattagacagatcaacgagacagaaagtcaacaaggatacccaggaattgaactcagctctgcaccaagcagacctaatagacatctacagaactctccaccccaaatcaacagaatatacatttttttcagcaccacaccacacctattccaaaattgaccacatagttggaagtaaagctctcctcagcaaatgtaaaagaacagaaattataacaaactatctctcagaccacagtgcaatcaaactagaactcaggattaagaatctcactcaaagccactcaactacatggaaactgaacaacctgctcctgaatgactactgggtacataacgaaatgaaggcagaaataaagatgttctttgaaaccaatgagaacaaagacaccacataccagaatctctgggacgcattcaaagcagtgtgtagagggaaatttatagcactaaatgcctacaagagaaagcaggaaagatccaaaattgacacctaacatcacaattaaaagaactagaaaagcaagagcaaacacattcaaaagctagcagaaggcaagaaataactaaaatcagagcagaactgaaggaaatagagacacaaaaaacccttcaaaaaatcaatgaatccaggagctggttttttcaaaggatcaacaaaattgatagaccgctagcaagactaataaagaaaaaaagagagaagaatcaaatagacacaataaaaaatgataaaggggatatcaccaccgatcccacagaaatacaaactaccatcagagaatactacaaacacctctacgcaaataaactagaaaatctagaagaaatggatacattcctcgacacatacactctcccaagactaaaccaggaagaagttgaatctctgaatagaccaataacaggctctgaaattgtggcaataatcaatagtttaccaaccaaaaagagtccaggaccagatggattcacagccgaattctaccagaggtacaaggaggaactggtaccattccttctgaaactattccaatcaatagaaaaagagggaatcctccctaactcattttatgaggccagcatcattctgataccaaagccgggcagagacacaaccaaaaaagagaattttagaccaatatccttgatgaacattgatgcaaaaatcctcaataaaatactggcaaaccgaatccagcagcacatcaaaaagcttatccaccatgatcaagtgggcttcatccctgggatgcaaggctggttcaatatacgcaaatcaataaatgtaatccagcatataaacagagccaaagacaaaaaccacatgattatctcaatagatgcagaaaaagcctttgacaaaattcaacaacccttcatgctaaaaactctcaataaattaggtattgatgggacgtatttcaaaataataagagctatctatgacaaacccacagccaatatcatactgaatgggcaaaaactggaagcattccctttgaaaactggcacaagacagggatgccctctctcaccgctcctattcaacatagtattggaagttctggccagggcaatcaggcaggagaaggaaataaagggtattcaattaggaaaagaggaagtcaaattgtccctgtttgcagacgacatgattgtttatctagaaaaccccatcgtctcagcccaaaatctccttaagctgataagcaacttcagcaaagtctcaggatacaaaatcaatgtacaaaaatcacaagcattcttatacaccaacaacagacaaacagagagccaaatcatgggtgaactcccattcacaattgcttcaaagagaataaaatacctaggaatccaacttataagggatgtgaaggacctcttcaaggagaactacaaaccactgctcaaggaaataaaagaggacacaaacaaatggaagaacattccatgctcatgggtaggaagaatcaatatcgtgaaaatggccatactgcccaaggtaatttacagattcaatgccatccccatcaagctaccaatgactttcttcacagaattggaaaaaactactttaaagttcatatggaaccaaaaaagagcccgcatcgccaagtcaatcctaagccaaaagaacaaagctggaggcatcacactacctgacttcaaactatactacaaggctacagtaaccaaaacagcatggtactggtaccaaaacagagatatagatcaatggaacagaacagagccctcagaaataatgccgcatatctacaactatctgatctttgacaaacctgagaaaaacaagcaatggggaaaggattccctatttaataaatggtgctgggaaaactggctagccatatgtagaaagctgaaactggatcccttccttacaccttatacaaaaatcaattcaagatggattaaagatttaaacgttaaacctaaaaccataaaaaccctagaagaaaacctaggcattaccattcaggacataggcgtgggcaaggacttcatgtccaaaacaccaaaagcaatggcaacaaaagccaaaattgacaaatgggatctcattaaactaaagagcttctgcacagcaaaagaaactaccatcagagtgaacaggcaacctacaacatgggagaaaattttcgcaacctactcatctgacaaagggctaatatccagaatctacaatgaactcaaacaaatttacaagaaaaaaacaaacaaccccatcaaaaagtgggcgaaggacatgaacagagacttctcaaaagaagacatttatgcagccaaaaaacacatgaagaaatgctcatcatcactggccatcagagaaatgcaaatcaaaaccactatgagatatcatctcacaccagttagaatggcaatcattaaaaagtcaggaaacaacaggtgctggagaggatgcggagaaataggaacacttttacactgttggtgggactgtaaactagttcaaccattgtggaagtcagtgtggcgattcctcagggatctagaactagaaataccatttgacccagccatcccattactgggtatatacccaaatgagtataaatcatgctgctataaagacacatgcacacgtatgtttattgcggcactattcacaatagcaaagacttggaaccaacccaaatgtccaacaatgatagactggattaagaaaatgtggcatatatacaccatggaatactatgcagccataaaaaatgatgagttcatatcctttgtagggacatggatgaaattggaaaccatcattctcagtaaactatcgcaagaacaaaaaaccaaacaccgcatattctcactcataggtgggaactgaacaatgagatcacatggacacaggaaggggaatatcacactctggggactgtggtggggtcgggggaggggggagggatagcattgggagatatacctaatgctagatgacacattagtgggtgcagcgcaccagcatggcacatgtatacatatgtaactaacctgcacaatgtgcacatgtaccctaaaacttagagtataataaaaaaaaaaaa

SEQ ID NO: 580 - DNA, 162 bp, Homo sapiens
  source 1..162: mol_type = other DNA
acctaagagcattatgctagacacccctcctcctccaccctccatgtccaagctatcaccaaggtcctagcaatcttacctcctaaatgtctcccaaatccacttctctcccttcaatgtccaggccaccagcatgacttctgcatgtgtgtagcagcctcc

SEQ ID NO: 581 - DNA, 288 bp, Homo sapiens
  source 1..288: mol_type = other DNA
gccagttgtggtggctcatgcctgtaatctcaccagtttgggaggccaaggcagggggatcacttgagcccaggagtttaagaccagtctggacagcatagtaaaaccccacctctataaaaaattttaaaaattagctgagagttgtggtgcacacctgtggccccagttatttgggaggctgaggcagcggggtcaagacttcagtgagccatgactgtacgactgcactcctccagcctggacaagagttaagaccctatctccatttaaaaaaaaaaaaaaaaa

SEQ ID NO: 582 - DNA, 2465 bp, Homo sapiens
  source 1..2465: mol_type = other DNA
gggtagagacacaaccaaaaaagagaattttaggccaatatccttgatgaacattgatgcaaaaatcctcaatgaaatactggcaaaacgaatccagcagcacatcaaaaagcttatccaacacgatcaagtgggcttcatccctgggatgcaaggctggttcaatatacgcaaatcaataactgtaatctagcatataaacagaaccaaagacaaaaaccacgtgaaaaggtctttgacaaaattcaacaacccttcatgctaaaaactctcaataaattaggtattgatgggacgtatttcaaaataataagagctatctatgacaaacccacagccaatatcatactgaatgggcaaaaactggaagcattccctttgaaaactggcacaagacagggatgccctctctcaccactcctattcaacatagtgatggaagttctggccagggcaatcaggcaggagaaggaaataaagggtattcaattaggaaaagaggaagtcaaattgtccctgtttgcagatgacatgattgtatgtctagaaaatcccattgtctcagcccaaaatctccttaagctgataagcaacttcagcaaagtctcaggatacaaaatcaatgtacaaaaatcacaagcattcttatacaccaacaacaaacaaacagagagccaaatcatgagtgaattcccattcacaattgcttcaaagagaataaaatacctaggaatcggacttacaagggatgtgaagtacctcttcaaggagaactacaaaccactgctcaaggaaataaaaggggatacaaacaaatggaagaacattccatgctcatgggtaggaagaatcaatatcgtgaaaatggccatactgcccaaggtaatttacacattcaatgccatccccatcaagctaccaatgactttcttcacagaattggaaaaaactactttaaagttcatatggaaccaaaaaagagcccgcatcgccaagtcaatcctaagccaaaagaacaaagctggaggcatcacactacctgacttcaaactatgctagaaggctgcagtaaccaaaacagcatggtactggtaccaaaacagagatatagatcaatggaacagaacagagtcctcagaaatgatgccacatatctacaactatctgatctttgacaaacctgagaaaaacaagcaatggggaaaggattccctatttaataaatggttctgggaaaactggctagccatatgtagaaagctgaaactggatcccttccttacaccttatacaaaaatcaattcaagatgtattaaagacttaaatgttagacctaaaaccataaaaaccctagaagaaaacctaggctttaccattcaggacataggcatgggcaaggacttcatgtctaaaacaccaaaagcaatggcaaccaaagccaacattgacaaatgggatctaattaaactgaagagcttctgcacagcaaaagaaactaccatcagagtgaacaggcaacctacaaaatgggagaaaattttcgcaacctactcatctgacaaaggactaatatccagaatctacaatgaactcaaacaaatttacaagaaaaaaacaaccccatcaaaaagtgggcaaaggacatgaacagacacttctcaaaagaagacatttatgcaggcaaaaaacacatgaaaaaatgctcatcatcactggccatcagagaaatgcaaatcaaaaccacaatgagataccttctcacaccagttagaatggcaatcattaaaaagtcaggaaacaacaggtgctggagaggatgtggagaaataggaacacttttacactgttggtgggactgtaaactagttcaaccactgtggaagtcagtgtggtgattcctcagagatctagaactagaaataccatttgacccagccatcccattactgggtatatacccaaaggactataaatcatgcagctacaaagacacatgcacacgtatgtttattgtggcattattcacaatagcaaagacttggaaccaacccaaatgtccaataatgatagactggattaagaaaatgtggcacatatacaccacggaatactatgcagccataaaaattgatgagttcatgtcctttgtagggacatggatgaaattggaaaccatcattctcagtaaactatcgcaagaacaaaaaaccaaacaccgcatattctcactcataggtgggaattgaacaatgagaacacatggacacaggaaggggaacatcacacactggggcctgttgtggggtggaggcaggggggagggatagcattgggagtatacctaatgctagatgacgagttagtgggtgcagtgcaccagcatggcacatgtatacatatgtaactaacctgcacattgtgcacatgtaccctaaaacttaaagtataataataaacataaaaaa

SEQ ID NO: 583 - DNA, 929 bp, Homo sapiens
  source 1..929: mol_type = other DNA
tccttccacggtctccctctgatgccgagccaaagctggactgtactgctgcgatctcggctcactgcaacctccctgcctgattctcctgcctcagcctgccgagtgcctgtgattgcaggcgcgcgtcgccacgcctgactggttttcgtttttttttggtggagacggggtttcgctgtgttggccaggccggtctccagctcctaaccgcgagtgatccgccagcctcggcctcccgaggtgccgggattgcagacggagtctcgttcactcagtgctcaatggggccaaggctggagtgcagtggcgtgatctcggctcgctacaacctccacctcccagccgcctgccttgacctcccaaagagccgagattgcagcctctgcccggccgccaccccgtctgggaagtgaggagcgtctctgcctggccgcccatcgtctgggatatgaggagctcctctgcctggctgcccagtctggaaagtcaggagcctctgcccggccgccatcccatctaggaagcgaggagctcctcttcccggccgccatcccatctaggaagtgaggagcgtctctgcccggccgcccatcgtctgagaggtggggagcacctctgccccgccgccctgtctgggatgtgaggagcgcctctgcccggccgccccgtctgagaagtgaggaaaccctctgcctggcaaccgccccgtctgagaagtgaggagcccctccgtccagcagccaccccgtctgggaagtgaggagcatctccgcccggcagccaccccatccgcgagggaggtgggggggggtcagccccccgcccggccagccgccccgtccgggaggtgaggggctcctctgcccggccgcccctactgggaagtgaggagcccctctgcccggccagtcgccccgtccaggagg

SEQ ID NO: 584 - DNA, 5956 bp, Homo sapiens
  source 1..5956: mol_type = other DNA
ggggaggagccaagatggccgaataggaacagctctggtctacagctcccagcgtgagcgacgcagaagacaggtgatttctgcctttccatctgaggtgccaggttcatctcactagggagtgctagacagtgggcgcaggtcagtgggtgcacgcaccgtgcacgagctgaagcagggcgatgcattgcctcacttgggaagcacaaggggtcagggagttccctttccgagtcaaagaaaggggtgacagatgcacctggaaaatcgggtcactcccacccgaatatagcgcttttcggaccggcttaaaaaacggcacaccacgagattatatcccgcacctggctcggagggtcctacacccacggagtctcgctgattgctagcacagcagtctgagatcaaactgcaaggtggcagcgaggctgggggaggggcacccgccattacccaggcttgcttaggtaaacaaagcagccaggaagctcgaactgggtggagcccaccacagctcaaggaggcctgcctgcctctgtaggctccacctctgggggaagggcacagacaaacaaaaagcagtaacctctgcagacttaaatgtccctgtctgacagctttgaagagagcagtggttctcccagcatgcagctggagatctgagaactggcagactgcctcatcaagtgggtccctgacccctgacccccgagcagcctaactgggaggcactccccagcaggggcacactgacacctcacacggcagggtattccaacagacctgcagctaagggtcctgtctgttagaaggaaaactaacaaacagaaaggacatccacaacaaaaacccatctgtacatcaccatcatcaaagaccaacagtagacaaaatcacaaagatggggaaaaaacagaacagaaaaactggaaactctaaaatgcagaacacgtctcctcctccaaaggaacgcagttcctcaccagcaacggaacaaagctggatggagaatgactttgacgagctgagagaagaaggcttcagacgatcaaattactctgagctatgggaggacattcaagccaaaggcaaagaagttgaaaactttgaaaaaaatttagaagcacgtataactagaataaccaatagagagaagtgcttaaaggagctgatggagctgaaaaccaaggctcgagaactacgtgaagaatgcagaagcctcaggagctgatgcaatcaactggaaaaaagggtatcagcaatggaagatgaaatgaatgaaatgaagcgagaagggaagtttagagaaaaaagaataaaaagaaatgagcaaagcctccaagaaatatgggactatgtgaaaagaccaaatctacttctgattggtgtacctgaaagtgatggggagaagggacccaagttggaaaacactctgcaggatattacccaggagaacttccccaatctagcaaggcaggccaacattcagattcaggaaatacagagaatgccacaaagatactcctcgagaagagcaactccaagacacataattgtcagattcatcaaagttgaaatgaaggaaaaaatgttaagggcagccagagagaaaggtcgggttaccctcaaaaggaagcccaccagactaacagcggatctcttggcagaaaccctacaagccagaagagagtgggggccgatattcaacattcttaaagaaaagaattttcaacccagaatttcatatccagccaaacaaagcttcataagtgaaggagaaataaaatactttacagacaagcaaatgctgagagattttgtcaccaccaggcctgccctaaaagagctcctgaaggaagcactaaacatggaaaggaacaaccagtaccagccactgcaaaatcatgccaaaatgtaaagaccatcgagactaggaagaaactgcatcaactaatgagcaaaataaccagctaacatcataatgacaggatcaaattcacacataacaatattaactttaaatgtaaatggactaaatgctccaattaaaagacacagactggcaaattggataaagagtcaagacccatcagtgtgctgtattcaggaaacccatctcatgtgcagagacacacataggctcaaaataaaaggatggaggaagatctaccaagcaaatggaaaacaaaaaaaggcaggggttgcaatcctagtctctgataaaacagactttaaaccaacaaagatccaaagagacaaagaaggccattacataatggtaaagggatcaattcaacaagaagagctaactatcctaaatctatatgcacccaatacaggagcacccagattcataaagcaagtcctgagtgacctacaaagagacttagactcccacacattaataatgggagactttaacaccccactgtcaacattagacagatcaacgagacagaaagtcaacaaggatacccaggaattgaactcagctctgcaccaagtggacctaatagacatctacagaactctccaccccaaatcaacagaatatacatttttttcaacaccacaccacacctattccaaaattgaccacacagttggaagtaaagctctcctcagcaaatgtaaaagaacagaaattataaccaactatctctcagaccacagtgcaatcaaactagaactcaggattaagaatctcactcaaaaccactcaactacatggaaactgaacaacctgctcctgaatgactactggatatttaacgctatgaaggcagaaataaagatgttctttgaaaccaacatgaacaaagacacaacataccagaatctctgggacacattcaaagcagggtgtagagggaaatttatagcactaaatgcccacaagagaaagaagaaaagataaaaaattgacaccctaacatcacaattaaaataactagaaaagcaagagcaaacacattcaaaagctagcagaaggcaagaaataactaaaatcagagcagaactgaaggaaatagagacacaaaaaacccttcaaaaaattaatgaatccaggagctggttttttgaaaggatcaacaaaattgatagacagctagcaagactaataaagaaaaaaagagagaagaatcaaatagacacaataaaaaatgataaaggggatatcaccaccgatctcacagaaatacaaactaccatcagagaatactacaaacacctctatgcaaataaactagaaaatccagaagaaatggataaatcccttgacacatacactctcccaagactaaaacaggaaggagttgaatctcggaatagaccaataacaggctctgaaattgtggcaataatcaatagcttaccaacaaaaagagtccaggaccagatggattcacagccgaattctaccagaggtacaaggaggaactggtaccattccttctgaaactattccaatcaattgaaaaagagggaatcctccctaactcattttatgaggccagcatcattctgataccaaagccaggcagagacacaaccaaaaaagagaattttagaccaatatccttaatgaacattgatgcaaaaatcctcaataaaatactggcaaaacgaatccagcagaacatcaaaaagcttatccaccatgatcaagtgggcttcatccctgggatgcaaggctggttcaatatacgcaaatcaataaatgtaatccagcatataaacagagccaaagacaaaaaaccacatgattatctcaatagatgcagaaaaagcctttgacaaaattcaacaacacttcatgctaaaatctctcaataaattaggtattgatgggacatatttcaaaataataagagctatctatgacaaacccacagccaatatcatactgaatgggcaaaaactggaagcatttcctttgaaaactggcacaagacagggatgccctctctcaccactcctattcaacatagggttggaagttctgaccagggcaactaggcaggagaaggaaataaagagtattcaattatgaaaagaggaagtcaaattgtccctgtttgcagatgacatgattgtatatctagaaaaccccattgtctcagcccaaaatctccttcagctgataagcaatttcagcaaagtctcaggatacaaaatcaatgtacaaaaatcacaagcattcttatacaccaacaacagacaaacagagagccaaatcatgagtgaattcccattcacaattgcttcaaagagaataaaatacctaggaatccaacttacaagggatgtgaaggaactcttcaaggagaactacaaaccactgcccaaggaaataaaagaggatacaaacgaatggaagaacattccatgctcatgggtaggaagaatcaatatcatgaaaatggccatactgcccaaggtaatttacagattcaatgccttccccatcaagctaccaatgcctttcttcacacaattggaaaaatctactttaaagttcatatggaaccaaaaaagagcccgcatcaccaagtcaatcctaagccaaaagaacaaagctggaggcatcacactacctgacttcaaactatactgcaaagctacagtaaccaaaacagcatggtactggtaccaaaacagagatatagatcaatggaacagaacagagccctcagaaataatgccacatatccacaactatctgatctttgacaaacctgagaaaaacaagcaatggggaaaggattccctatttaataaatggtgctgggaaaactggctagccatatgtagaaagctgaaactggatcccttccttacaccttacacaaaaatcaattcaagatggattaaagacttaaacgttcaacctaaaaccataaaaaccctagaagaaaacataggcattaccattcaggacataggcatgggcaaggacttcatgtctaaaacaccaaaaacaatggcaacaaaagacaaaattgacaaatgggatctaatgggagaacatttttgcaacctactcatctgacaaagggctaatatccagaatctacaatgaactcaaacaaatttacaagaaaaaaacaaacaaccccatcaaaaagtgggcaaaggacatgaacacatacttctcaaaagaagacatttatgcagccaaaaaacacatgaaaaaatgctcatcatcactggccatcagagaaatgcaaatcaaaaccacaatgagataccatctcacaccagttagaatggcaatcattaaaaagagaggaaacaacacatgctggagacgatgtggagaaataggaacccttttacactgttggtgggactgtaaactagttcaaccattagggaagtcagtgtggtgatccctcagggatctaggactagaaataccatttgacccagccatcccattactgggtatatacccaaaggactataaatcatgctgctataaagacacatgcacacgtatgtttattgtggcactattcacaatagcaaagacttggaaccaacccaaatgtccaacaatgatagactggattaagaaaatgtggcacatatacaccatggaatactatgcagccataaaaaatgatgagttcatgtcctttgtagggacatggatgaaattggaaatcatcattctcagtaaactatcgcaagaacaaaaaaccaaacactgcatattctcactcataggtgggaattgagcaatgagatcacatggacacaggaaggggaacatcatactctggggaatgttgtgaggtggggggaggggtgagggataccattgggagatatacctaatgctagaagacgagttagtgggtgcagccaaccagcatggcgcaagtatacatatgtaactaacctgcacaatgtgcacatgaaccctaaaacttaaagaataataataata

SEQ ID NO: 585 - DNA, 6122 bp, Homo sapiens
  source 1..6122: mol_type = other DNA
ggggtggagccaagatgactgaataggaacagctccagtctacagctcccagcatgagcgatgcagaagacaggtgatttctgcatttccaactgaggtaccaggttcatctcactggggagtgccagacagtgggtgcaggacagtgggtgcagcgcactgtgcgtgagctgaagcaggcctcacccaggaagcacaaggggtcagggaattccctttcctagtcaaagaaaggggtgatagacagcacctggaaaatcgagtcactcccaccctaatactgcgcttttccaacaggcttaacaaacagcacaccagattatatcccacacctggctcggagggtcctatgcacatgtagcctcgctcattgctagcacagcagtctgagatcaaactgcaaggcggcagcgaggctgggggaggggcgcccgccattgccgaggcttgagtaggtaaacaaagtggccaggaagctcgaactgggtggagcccaccacagctcaaggaggcctgcctgcctctgtaggttccacctctgggggcagggcacagacaaacaaaaggcagcagtaacctctgcagacttaaatgtcgctgtctgacagctttgaaaagagtagtggttctcccagcacgcagcttgagatctgagaatgggcggactgcctcctcaagtgggtccctgaccactgagtagcctaagtgggaggcatcccccagtaggggcggactgacacctcacacggccgggtactcctctgagacaaaacttccagaggaacaatcaggcagcagcatttgcggttcaccaatatcggctgttctgcagccaccgctgctgatacccaggcaaatagggtctggagtggacctccagcaacctccaacagacctgcagctgagggtcctgactgttagaaggaaagctagcaaacagaaaggacatccacaccaaaaccccatctgtatgtcaccatcatcaaagaccaaaggtagataaaaccacaaagatggggaaaaaacagagcagaaaaaccggaaactctaaaaatcagagcgcctctcctcctccaaaggaacacagctcctcaccagcaatggaacaaagctggacggagaatgactttgacgagttgagagaagaagccttcagaagatcaacctactctgagctaaaggaggaagttcgaaccaatggcaaagaagttaaaaaccttaaaaaaaaaaattagacgaatggctaactagaataaccaatgcagagaagtccttaaaggacctgatggagctgaaaaccatggcacaagaacgatgtgacaaatgcacaagcctcagtagctgatgagatcaactggaagaaagggtatcagtgatggaagatgaaatgaatgaaatgaagagagaagagaagtttagagaaaaaagaataaaaagaaatgaacaaagcctccaagaaatatgggactacgtgaaaagactaaatctacatcagattggtgtacctgaaagtgatggggagaatggaaccaagttggaaaacactctgcaggttattatccaggagaacttccccaatctagcaaggcaggccaacattcaaattcaggaaatacagagaatgccacaaagatactccttgagaagaccaactccaagacacataattttcagtcaccaaagttgaaatgaaggaaaaaatgttaagggcagccagagagaaaggtcgggttacccacaaagggaagcccatcagactaacatctgatctcttggcagaaactctacaagccagaagagagtgggggctcatattcaacattcttaaagaaaagaatttccaacccagaatttcatatccagccaaactaagcttcataagtgaaggagaaataaaatcctttacagacaagcaaatgctgagagattttgtcaccaccaggcctgccctaaaagagctcctgaaggaagcactaaacatggaaaggaacaacttgtaccagccactgcaaaaacatgccaaattgtaaagaccatcaaggctaggaagaaactgcatcaactaacgagcaaaataaccagctaacatcataatgacaggatcagattcacacataacaatattaaccttaaatgtaaatgggttaaatgctccaattaaaagacacagactggcaaattggataaagagtcaagacccatcagtgtgctgtgttcaggaaacccatctcacctgcagagacacatataggctcaaaataaagggatggaggaatatctaccaagcaaatggaaaacaaaaaaaggcaggggttgcaatcctagtctcagataaaacagactttaaaccaacaaagatcaaaagagacaaagaaggccattacataatggtaaagggatcaattcaacaagaagagctaactatcctaaatatatatgcacccgatacaggagcatccagattcatagagcaagtccttagtgacctgcaaagagacttagactcccacacaataataatgggagactttaacatcccactgtcaacattagacagatcaacgagacagaaagttaacaaggatatccaggaattgaactcagctctgcaccaagtggacctaatagacaactacagaactctccaccccaaatcaacagaatctacattctttttagcaccacacctattccaaaattgaccacgtagttggaagtaaagctctcctcagcaaatgtaaaagaacagaaattataacaaactatctctcagaccacagtgcaatcaaactagaactcaggattaagaaactcactcaaaactgctcaactacatggaaactgaacaacctgctcctgaatgactactggggacataacaaaatgaaggcagaaataaagatgttctttgaaaccaatgagaacaaagacacaatataccagaatctctgggacacattcaaagcagtgtgtagagggaaatttatagcactaaatgcccacaagagaaagcaggaaagatataaaattgacaccataacatcacaattaaaagaactagagaagcaagagcaaacacattcaaaaactagcagaaggcaagaagtaactaagatcagagcagaactgaaggagatagagacacaaaaaacccttcaaaaaatcaatgaatccaggagctggttttttgaaagatcaacaaaattgatagaccactagcaagactaagaagaaaagagagaagaatcaaatagacacaataaaaaatgacaaaggggatatcaccaccaatcccacagaaatacaaactaccatcagagaatactataaacagctctatgcaaataaactagaaaatctagaagaaatggataatttctcgacacatacaccctcccaagactaaaccaggaagaagttgaatctctggatagaccaacaacaggctctgaaattgtggcaataattaatagcttaccaacccaaaaaaagtccaggaccagatggattcacagccgaattctaccagaggtacaaggaggaagtggtaccattccttctgaaactattccaatcaatagaaaaagagggaatcctccctaactcattttatgaggccagcatcatcctgataccaaagcctggcagagacacaaccaaaaaagagaattttagaccaatatccttgatgaacattgatgcaaacatcctcaataaaatactggcaaaccaaatccagcagcacgtcaaaaagcttatccaccatgatcaagtgggcttcatccctgggatgcaaggctgtttcaacatacgaaaatcaataaacataatccggcatataaacagaaccaaagacaaaaaacacttgattatctcaatagatgcagaaaaggcctttgacaaaattcaacaacccttcatgctaaaaaccctcaataaattaggtattgatgggacacatctcaaaataataagagctatctatgacaaacccacagccaatgtcatattgaatggacaagaactggaagcattccctttgaaaactggcacaagacagggatgccctctctcaccactcctattcaacgtagtgttggaagttctggccagggcaatcaggcaggagaaggaaataaagggcattcaattaggaaaagaggaagtcaaattgtccctgtttgcagatgacatgattgtatatctagaaaaccccatcgtctcagcccaaaatctccttaagctgataaacaactcagcgaagtcccaggacgcaaaatcaatgtgcaaaaatcagaagcattcttatacaccaacaacagacaaacagagagccaaatcatgagtgaactcccattcacaattgcttcaaagagaataaaattcctaggaatccaacttacaagggatgtgaaggatcccttcaaggagagctacaaaccactgctcaatgaaataaaagaggatacaaacaaatggaagaacattccatgctcatgggtaggaagaatcaatatcgtgaaaatggccatactgccccaggtaatttatagattcaatgtcatccccatcaagctaccaatgactttcttcacagaattggaaaaaactactttaaagttcatatggaaccaaaaaagagcccgcattgccaagtcaatcctaagcgaaaagaacaaagctggaggcatcccactacctgacttcaaactatattacaaggctacagtaaccaaaacagcatggtactggtaccacaacagagatatagaccaatggaacagaacagagctgttagaaataatgctgcatatctacaactatctgatctttgacaaacctgagaaaagcaatgggaaaaggattccctatttaataaatggtgctgggaaaactggctagccatatgtagaaagctgaaactggatcccttccttacaccttatacaaaaattaattcaagatggattaaagacttacatgttagacctaaaaccataaaaaccctagaagaaaacctacgaaataccattcaggacataggcatgggcaaggacttcatgtctaaaacaccaaaagcaatggcaacaaaagtcaaaattgacagatgggatctaattaaactaaagagcttctgcacagcaaaagaaactatcatcagtgtgaacagacaacctacagaatgggagaaaatttttgcaacctactcatctgacaaagggctaatatgcagaatctataatgaactcaaacaaatttacaagaaaaaaacaaccccatcaaaaagtgggcgaaggatatgaacagacacttctcaaaagaagacatttatgcagccaaaaaacacatgaaaaaatgttcatcatcactggccatcagagaaatgcaaatcaaaaccactatgagatatcatctcacaccagttagaatggcaatcattaaaaagtcaggaaacaacaggtgctggagaggatgtggagaaataggaacacttttacactgttgatgggactgtaaactagttcagccattgtggaagtcagtgtggcaattcctcagggatctagaactagaaataccatttgacccagccatcccattactgggtatataaccaaatgactataaatcatgctgctatgaagacacatgcacacacatgtttattgtggcactattcacaatagcaaagacttggaaccaacccaaatgtccaacaatgatagactggattaagaaaatgtggcacatatacactatggaatactatgcagccataaaaaatgatgagttcatgtcctttgtagggacatggatgaagctggaaaccatcattctcagcaaactatcgcaaggacaaaaaactaaacaccacattttctcactcataggtgggaattgaacaatgagaacacatggacacaggaaggggaacatcacacactggggactgttgtggggttgggggaggagggagggttagcattaggagatatacctaatgctaaatgacgagttaaggggagcagcacaccaacatggcacatgtgtacatatgttacaaacctggacgttgtgcacatgtaccctaaaacctaaagtataataataattaaaaaaaa

SEQ ID NO: 586 - DNA, 6421 bp, Homo sapiens
  source 1..6421: mol_type = other DNA
caagatggccaaataggaagagctctagtctgcagctcccagcaagatgaacgcagaaggtgggtgatttctgcatttccaactgagatacctggctgatctcactgggagtggttagacagtgggtttagcccgtggagggcgagccgaagcagggtggggtgtcgcttcacctgggaagttcacgaggttggggaactccctcccctagccaggggaagccgtgaagggactgtgtcccaaggaatggtgcaatccggcccagatactacgcttttgccatggtcttcgcaacccacagacctacaccaccaaggccctgggtttcaagcacaaacctgggcagccttttaggcagacaccaagctagctacacgagtttgtttttcatatcccagtgctgtctggaatgccagcaagacagaatcgttcactcccctggtatgggagctgaagccaggaagccaagtggtcttgctcagcagatcccaccccacagagcccagcaagctaagacctagtggtttgaaattctcactaccagcacagcagtctgaagtcaacctgggatgcttgagcttggttgggggaggggcatccaacattactgaggcttgagtagatggttttcccctcacagtgtaaacaaagtccctgggaagtgcagactgggtggagcccaccacagctcagcaaagctgctgtagccagtctggcactctagattcctcctctctgggcatggcatctctgaaagaaaggcagcagccccagtcaggatcttatagataaaactcccatctccctgggacagagcaccttgggcaaggggcagctgtggatgcagcttcagccaacttaaatgttcctgcctaccagctctgaagacagcagcggatctcccagcacagtgctcaagctctgctaagggacagactgcctcctcaagtgggtccctgactcccatgactcctgatggggagacacctcccagcaggggtcaacagacacctcatacaggagagccctggctggcaccctggcagttggccttctgggacaaagcttccagaggaaggaacaggcagcaatctttgctgtcctgtagcctctgctggtgataaccaggcaaacagggtctggagtggacctccagcaaactccagcagacctgcagcagaggggcctggctgttagaaggaaaactaacaaacagaaaggaatagcatcaacatcaacaaaaaggacatccactcaaaaaacccattcgaaggtcaccaacatcaaagaccaaaggtagataaatccatgaacatgaggaaacaccagtgcaaaaaggctgaaaattccaaaaactggaacgcctcttctccaaaggatcacaactcctcaccagcaagggcacaaaactagatggagaatgagtttgacaaattgacagaagtaggcttcagaaggtgggtagtaacaaactcctccaagctaaaggagcatgttctaacccaatgcaaggaagctaagaactttgaaaaaaggccagaggagttgctaactagaataaccagtttagagaagaacataaatgaactgatggagctgaaaaactcagcacgagtacttcgtgaagcatacacaagtatcaatagccaaatcgatcaagcagaagaaaggatatcagagattgaagatcaacttaatgaaataaagtgtgaagacaagattagagaaaaaagaatgaaaaggaacaaacaaagcccccaagaaatatgggactatgtgaaaagaccaaacctacatttgattggcatacctgaaagtgatggaagaacggaaccaagttggaaaacactcttcaggatattattcaggagaacttccccaacctagcatgtcatgccaacattcaaattcaggaaatatagagaacaccacaaagagactccttgagaagagcaaccccaagacacataactgtcagattcaccaagattgaaatgaaggaaaaaacattaaaggcagccagtgagaaaggttgcgttacccacaaaggaaatcccatcagactaagagtgggtctctctccgcagaaaccctgcaaaccagcagagagtgggggccaatattcaacattcttaaagaaaagaattttcaacccagaatatcatatccagccaagctaagcttcataagcaaatgagaaataaaatccttcacagacaagcaaatgctgagagattttgtcaccaccaggcctgccttacaagagctcctgaaggaagcactaaatatggaaaagaaaaacaggtaccagacatggcaaaaacataccaaattgtaaagtccattgactctatgaagaaactgcatcaactaatgggccaaataaccagctagcatcataatgacaggatcaaattcacacgtaacaatattaaccttaaatgttaacaggctaaatgccccaattaaaagacacagactggcaaattggataaagagtcaagacccatcgatggactgtattcagagacccatctcacatataaagacacacatagactcaaaataaaggaatggaggaatatttaccaaacaaatcaaaagcaaaaaaaagagcaggggttgcaatcctagtctctgataaaacagactttaaaccaacaaagatcaaaaaaggcattacataatggtaaagggatcaattcaacaagaagagctaactatcctaaatatatatgcacacaatacaggagcacccagattcataaagcaagtccttagagacctacaaagagacttacactcccacacaataataatgggagattttgatatcccactgtcaaaattagatagatcaacaagacagaaaattaacaagtatattcaggacttgaactcagctccagacgaagtggacctaatagacatctacagaattctccacaccaaatcaacagaatatatattcttctcagcaccacgttgcacttattctaaaattcaccacataattgcaagtaaaatactcctcagcaaatgagaaagaacagaaattataacagtctctcagaccacagtgcaatcaaattagaattcaggatttagaagctcaatcaaaacgcataactacatggaaactgaacaacctgctcctgcatgactgctgagtaaataacaaaattaaggcagaaataaataagttatttgaaaccaatgagaacaaagacacaacataccagaattgctgggacacagctaacacagtgtttagagggaaatttatagcactaaatgtccacaggagaaagcaggaaagatctaaaattgacacccttacatcacaattaaaagaactagagaagcaagagcaaacaaattcaaaagttatcagaagacaagaaataactaagatcagagcagaactgaaggagatagagacacaaaaaacccttcaaaaattcaatgaatgcaggagctggtttttgaaaagatgaacaaaatagaccactagccaaactaataaagaagaaaagagagaagaatcaaatagacacaataaaaaatgataaaggggataacaccactgatcccacagaaatagaaactaccatcagagaatattgtaaacaactctatgcaaataaactagaatatctaaaagaaatggataaattcttggacacatacaccctcccaatactaaaccaggaagaagtcaaatccctgaatagaccaataccaaattctgaaattgaggcagtaattaatagcctaccaaccaaaacaagtccaggaccagacagattcacagccaaattctaccagaggtacagagaggagctgataccattccttctgaaactattgcaaacaatagaaaaagagggactcctccctaactcattttatgaggccagcatcaccctgataccagaacctgacagagacacaacagaaaaagaaaagttcaggccaatatccctgatgaacatccatgagaaaatcctcaataaaatactggcaaaccgaatccagcagcacatcaaaaagcatatccaccatgatcaagtcagcttcatttctgggatgcaaggttggtttaacatgtggaaatcaataaacataatttaccacataaacagaaccaatgacaaaaactacatgattatctcaatagatgcagaaaaggcctttgataaaattcaacacaccttcatactaaaaactctcaataaactaagcactgatggaacatatctcaaaataataagaactatttatgacaaacccccagacaatatgatactgaatgggcaaaagctggaagcattccctttaaaaaccagcacaagacaaggatgccctctttcaccactcctattctacatagtattggaagttctggccaagacaatcaggcaagtgaaagaaagcgtattcaaataggaagagaggaagtcaaattatctctatttgagatgacatgattgtatatttagaaaaccccattgtctcagccccaaatctccttaagctgataagcaacttcagcaaactctcaggatacaaaatcaatgtgcaaaaatcacaagcatttcaatacaccaataatagacaaacagagagccaaatcatgagtgaactcccatccagagttgctacaaaaagaataaaataccccaggaatacaagttacaagggatgtgaaggacttcttcaaggaaaaaacaaaccactgctcaaggaaataagagaggaccaaacaaatggaaaaacattccatgctcatggataggaagaatcaatatcatgaaaatggccatactgcccaaagtaatttatagattcagtgctatacccatcaagctaccattgcctttcttcacagaattagaaaaaaaaactactttaaattttatagggaaccaaaaaagagcctgtatatccaagacaatcctaagcaaaaagaacaaagctggaggcatcacgttacctgacttcaaactatactgcaaggctacattaatcaaaacagcatggtagtagtaccaaaacatatatacagaccaatggaacacagcagtggcctcagaaataatgccacacatctacaaccatctgatctctgacaaacctgacaaaaacaagcaatggggaaaggattccctgtttaataaatggtgttgagaaaactggctagacatatgcagagaactgaaattgtaccccttccttacaccttatacaaaaattaactcaagatggatcaaagacttaaacataagacctaaaaccataaaaaccctagaagacaacctaggcaataccattcaggacaggaatgggcaaagacttcatgactaaaacaccaaaagcaatggcaacaaaagccaaaattgacaaatcagatctaattcaactaaagagctcctgcacagcaaaagaagctatcatcacagtgaacaggcaacctgcagaatgggagacaaattttgcaacctatccatctgacaaagtgctaatatacagaatctataagaaacttaaacaaatttacaagaaaaaaacaaacagcctcatcaaaaagtgggtgaaggatatgaacagacacttctcaaaagaagacatttatgcagccaacaaacatatgaaaaaaagctcatcatcactggtcattagagaaatgcaaatcaaaaccacaatgagataccatctcatgccagttagaatggtgatcattaaaatgtggggaagcaacagatgctggagaggatgtggagagataggaacacttttacacggttggtggggtgtaaattagttcaaacattgtggaagagacagcgtgtcaattcctcaaggatctaaaaccagaaataccatttgacccagcaatcccattactggatatatacctaaagattataaatcattctactatgaagacacatgcatatatatgtttattgcagcagtattcacaatagcaaagacttggaacaaacccaaatgcccgtcaattttatactgaataaagaaaaggtggcacatatacaccatggaatacgatgtagccataaagaaggatgtgttcatgtactttgcagggacatggacgaagctggaaaccatcattctcagtaaactaacatagtaacagaaaatcaaacaccgcgtgttctcactcataagtaggagttgaacaatgagaacacaaggacacagggaggggaacatcacacactggggcatgtttgcaggttgggggctgagggagggatagcattaggagaaatacctaatgtagatgatgggttgatgggtgcagcaaaccaccatggcacttgtataactatgtaacaaacctacatgttctgcacatgtatcccagaacttaaagtataattaaaaaaaaaaa

SEQ ID NO: 587 - DNA, 2009 bp, Homo sapiens
  source 1..2009: mol_type = other DNA
cccctttgcatcctcctttcctcctcattcagccctagattcctttcttgatcagtatccatactcacttccaatcatgcttaagtttatctccaatttctccgtttgttagaaccatcacttgacaatttaagacaattgtcttaaattttgcctgcaccaaagcagctgactagttataacttgaaaaaaaaagtacaaaacctcgttgattggactcacttcaaaatttatcatcacagatctcaactgagccctcaatactgccaagtattcccatgattgtactttttaataaattcacctttgcactctttatgttaactctgttctctagcttacttcgttatctccattcaactcctcagccttcccaccattacagctaaagaagatgcctttggagccagccctgccctttgtcctagacattatattttctcttctctcaagtatttgaatccagcaattaccctctaagcaccaattcctaactctgcggagtttttcatttcaatgcacaaaactaccttaatatcatccatcttaaagaaaaacaatgcaccctttacctctggactcccattattctgatctccgaattagccgtatttttaaaaatattgtctatactatatgaatgttcttggtcactgcccattgtctccttaattcagtctaattaggctctagctcccatcatttttctagttaatgaaaacagtccagagtttacccaagtaggtggtcaggtctctgtccctgtcttattagacttgtcagccgcaattaaaacagcgtacatttccttgtttcttgaaatgttttcttgtttaaacttccatgacatgacattagtctgtcctgttgtctgtgtccctctagtttctctaacctttgctaggttgccttgaccaaaatatttcataattttcaattacctgagcttgtttcctcctagctatcctctctcttgcttcattctttccataggcgataccatttagttcatgtcactgcatgtcacattgaattcctcaaatttagatgtggagtctggaccccatctcttaaaatcagactgaatatccactgcctcaccaaggtcttcacttgtataaagaatagacttccaaacctaacagttccagaaagcacttagacatccaagctccaaatcgtatgccctccagaagccctcctcattttagcaaatgggacaaccacacaccacctttacaggataaggcctaagatatatccttgattcttccctaccctcttgcctcacacccttgctatcagtaagtgctggtggctgaatctctacaaatccaccctgagctgaccacgtttcagcatttccaaagctaaaattgaaagctacaccatcattgtacccagcctggactacataaacagcctcccaactgttctccctgtcttctctcctcacttcctacagctcatggtccatattgctaccactggtctttctgaattatctatcacataattttgtttctctgcttaaaatcttgtaattgtgttttatttcacttggcataaaatccaaacttgacatatgattctatgcgtttttgcctgtggctccactatcatatctttccattacccttcgtgctctctggtgtttatttctcccaaggcccctgacattgatcttgcttcttctcatgatgttcattccccagatgttttcgtggcttctccattcatcttccatgatgaaacttgaacattatcctctgattaccctaaacaagtaactggtccatcagttacatctaccacgtaactaccacattacttgtttctttataatactgtttagtaaagttatttgttatcacatttttggtgtgtttatggctcctaactcccaaccccaaatctgtaaactctttgtaggcaagaaaactatttattctttaaacgtttcaccaatgcctagtgtactgcctagcatgtagaaaatgctcaataaa

SEQ ID NO: 588 - DNA, 500 bp, Homo sapiens
  source 1..500: mol_type = other DNA
aacaccacacatctacaagcagctgacctttgacaaacctgacaaaaataatcaatggagaaaggattccctatttaataaatggggttgggaaattggctagcgatatgcagaaaactgaaactggacccctttcttacatcttacacaaaaattaactccagatggattaaagacttaaacataagacctaaaaccataaaaaccctagaagaaaacctaggcaataccattcaggacataggcatgggcaaagacttcatgtctaaaacaccaaaagcaatggcaacaaaagccaaagttgacaaatgggatctaattaaacgaaagagcttctgcacaacaaaagaaaccatcatcagagtgaacaggcaacccctacagaatgagagaaaatttttgcaatctactcatctgacaaagggctaatatccagaatctacaaggaacttaaacaaatttacaagaaaaaatcaaccccatcaaaaagtgggtgaagg

SEQ ID NO: 589 - DNA, 6030 bp, Homo sapiens
  source 1..6030: mol_type = other DNA
ggggaggagccaagatggccgaataggaacagctccggtctacagctcccagcgtgagcgacgcagaagacgggtgattactgcatttccatctgaggtaccgggttcatctcactagggagtgccagacagtgggcgcaggccagtgtgtgtgcgcaccgtgcgcgagccaaagcagggcgaggcattgcctcacctgggaagcgcaaggggtcagggagttccctttccgagtcaaagaaaggggtgacggacgcacctggaaaatcgggtcactcccacccgaatattgcgcttttcagaccggcttaagaaacggcgcaccacgagactatatcccacacctggctcagagggtcctacgcccacggaatctcgctgattgctagcacagcagtctgagatcaaactgcaaggcggcaacgaggctgggggaggggcgcccgccattgcccaggcttgcttaggtaaacaaagcagccgggaagctcgaactgggtggagcccaccacagctcaaggaggcctgcctgcctctgtaggctccacctctgggggcagggcacagacaaacaaaaagacagcagtaacctctacagacttaagtgtccctgtctgacagctttgaagagagcagtggttctcccagcacgcagctggagatctgagaaccggcagactgcctcctcaagtgggtccctgacccctgacccccgagcagcctaactgggaggcaccccccagcaggggcacactgacacctcacacggcagggtattccaacagacctgcagctgagggtcctgtctgttagaaggaaaactaacaaccagaaaggacatctacaccgaaaacccatctgtacatcaccatcatcaaagaccaaaagtagataaaaccacaaagatggggaaaaaacagaacagaaaaactggaaactctaaaacgcagagcgtctctcctcctccaaaggaacgcagttcctcaccagcaacagaacaaagctggatggagaatgactttgacgagctaagagaagaaggcttcagacgatcaaattactctgagctacgggaggacattcaaaccaaaggcaaagaagttgaaaactttgaaaaaaatttagaagaatgtataactagaataaccaatacagagaagtgcttaaaggagctgatggagctgaaaaccaaggctcgagaactacgtgaagaatgcagaagcctcaggagccgatgcgatcaactggaagaaagggtatcagcaatggaagatgaaatgaatgaaatgaagtgagaagggaagtttagagaaaaaagaataaaaagaaatgagcaaagcctccaagaaatatgggactatgtgaaaagaccaaatctacgtctgattggtgtacctgaaagtgatgtggagaatggaaccaagttggaaaacactctgcaggatattatccaggagaacttccccaatctagcaaggcaggccaacgttcagattcaggaaatacagagaacgccacaaagatactcctcgagaagagcaactccaagacacataatggtcagattcaccaaagttgaaatgaaggaaaaaatgttaagggcagccagagagaaaggtcgggttaccctcaaaggaaagcccatcagactaacagcggatctctcggcagaaaccctacaagccagaagagagtgggggccaatattcaacattcttaaagaaaagaattttcaacccagaatttcatatccagccaaactaagcttcataagtgaaggagaaataaaatactttatagacaagcaaatgctgagagattttgtcaccaccaggcctgccctaaaagagctcctgaaggaagcgctaaacatggaaaggaacaaccggtaccagccgctgcaaaatcatgccaaaatgtaaagaccatcgagactaggaagaaactgcatcaactaatgagcaaaatcaccagctaacatcataatgacaggatcaaattcacacataacaatattaactttaaatataaatggactaaattctgcaattaaaagacacagactggcaagttggataaagagtcaagacccatcagtgtgctgtattcaggaaacccatctcacgtgcagagacacacataggctcaaaataaaaggatggaggaagatctaccaagccaatggaaaacaaaaaaaggcaggggttgcaatcctagtctctgataaaacagactttaaaccaacaaagatcaaaagagacaaagaaggccattacatcatggtaaagggatcaattcaacaagaggagctaactatcctaaatatttatgcacccaatacaggagcacccagattcataaagcaagtcctcagtgacctacaaagagacttagactcccacacattaataatgggagactttaacaccccactgtcaacattagacagatcaatgagacagaaagtcaacaaggatacccaggaattgaactcagctctgcaccaagcagccctaatagacatctacagaactttccaccccaaatcaacagaatatacatttttttcagcaccacaccacacctattccaaaattgaccacatagttggaagtaaagctctcctcaacaaatgtaaaagaacagaaattataacaaactatctctcagaccacagtgcaatcaaactagaactcaggattaagaatctcactcaaagccgctcaactacatggaaactgaacaacctgctcctgaatgactactgggtacataacgaaatgaaggcagaaataaagatgttctttgaaaccaacgagaacaaagacaccacataccagaatctctgggacgcattcaaagcagtgtgtagagggaaatttattgcactaaatgcctacaagagaaagcaggaaagatccaaaattgacaccctaacatcacaattaaaagaactagaaaagcaagagcaaacacattcaaaagctagcagaaggcaagaaataactaaaatcagagcagaactgaaggaaatagagacacaaaaaacccttcaaaaaatcaatgaatccaggagctggttttttgaaaggatcaacaaaattgatagaccgctagcaagactaataaagaaaaaaagagagaagaatcaaatagaccaataaaaaatgataaaggggatatcaccaccgatcccacagaaatacaaactaccatcagagaatactacaaacacctctacgcaaataaactagaaaatctagaagaaatggatacattcctcgacacatacactctcccaagactaaaccaggaagaagttgaatctctgaatagaccaataacaggctctgaaattgtggcaataatcaatagtttaccaaccaaaaagagtccaggaccagatggattcacagccgaattctaccagaggtacaaggaggaactggtaccattccttctgaaactattccaatcaatagaaaaagagggaatcctccctaactcattttatgaggccagcatcattctgataccaaagccgggcagagacacaaccaaaaaagagaattttagaccaatatccttgatgaacattgatgcaaaaatcctcaataaaatactggcaaaccgaatccagcagcacatcaaaaagcttatccaccatgatcaagtgggcttcatccctgggatgcaaggctggttcaatatacgcaaatcaataaatgtaatccagcatataaacagagccaaagacaaaaaccacatgattatctcaatagatgcagaaaaagcctttgacaaaattcaacaacccttcatgctaaaaactctcaataaattaggtattgatgggatgtatttcaaaataataagagctatctatgacaaacccacagccaatatcatactgaatgggcaaaaactggaagcattccctttgaaaactggcacaagacagggatgccctctctcaccgctcctattcaacatagtgttggaagttctggccagggcaatcaggcaggagaaggaaataaagggtattcaattaggaaaagaggaagtcaaattgtccctgtttgcagacgacatgtttgtttatctagaaaaccccactgtctcagcccaaaatctccttaagctgataagcaacttcagcaaagtctcaggatacaaaatcaatgtacaaaaatcacaggcattcttatacaccaataacagacaaacagagagccaaatcatgggtgaactcccattcacaattgcttcaaagagaataaaatacctaggaatccaacttacaagggatgtgaaggacctcttcaaggagaactacaaaccactgctcaaggaaataaaagaggacacaaacaaatggaagaacattccatgctcatgggtaggaagaatcaatatcgtgaaaatggccatactgcccaaggtaatttacagattcaatgccatccccatcaagctaccaatgactttcttcacagaattggaaaaaactactttaaagttcatatggaaccaaaaaagagcccgcattgccaagtcaatcctaagccaaaagaacaaagctggaggcatcacactacctgacttcaaactatactacaaggctacagtaaccaaaacagcatggtactggtaccaaaacagagatatagatcaatggaacagaacacagccctcagaaataatgccgcatatctacaactatctgatctttgacaaacctgagaaaaacaagcaatggggaaaggattccctatttaataaatggtgctgggaaaactggctatccatatgtagaaagctgaaactggatcccttccttacaccttatacaaaaatcaattcaagatggattaaagatttaaacattaaacctaaaaccataaaaaccctagaagaaaacctaggcattaccattcaggacataggcgtgggcaaggacttcatgtccaaaacaccaaaagcaatggcaacaaaagccaaaattgacaaatgggatctaattaaactcaagagcttctgcacagcaaaagaaactaccatcagagtgaacaggcaacctacaacatgggagaaaattttcgcaacctactcatctgacaaagggctaatatccagaatctacaatgaactcaaacaaatttacaagaaaaaaacaaacaaccccatcaaaaagtgggcgaaggacatgaacagacacttctcaaaagaagacatttatgcagccaaaaaacacatgaagaaatgctcatcatcactggccatcagagaaatgcaaatcaaaaccactatgagatatcatctcacaccagttagaatggcaatcattaaaaagtcaggaaacaacaggtgctagagaggatgcggagaaataggaacacttttacactgttggtgggactgtaaactagttcaaccattgtggaagtcagtgtggcgattcctcagggatctagaactagaaataccatttgacccagccatcccattactgggtatatacccaaatgagtataaatcatgctgctataaagacacatgcacacgtatgtttattgtggcactattcacaatagcaaagacttggaaccaacccaaatgtccaacaatgatagactggattaagaaaatgtggcacatatacaccatggaatactatgcagccataaaaaatgatgagttcatatcctttgtagggacatggatgaaattggaaaccatcattctcagtaaactatcgcaagaacaaaaaaccaaacaccgcatattctcactcataggtgggaattgaacaatgagatcacatggacacaggaaggggaatatcacactctggggactgtggtggggtcgggggaggggggagggatagcattgggagatatacctaatgctagatgacacattagtgggtgcagcgcaccagcatggcacatgtatacatatgtaactaacctgcacaatgtgcacatgtaccctaaaacttagagtataatataaaaaaaaaaa

SEQ ID NO: 590 - DNA, 6029 bp, Homo sapiens
  source 1..6029: mol_type = other DNA
gggaggagccaagatggccgaataggaacagctccggtctacagctcccagcgtgagcgacgcagaagatgggtgatttctgcatttccatctgaggtaccgggttcatctcactagggagtgccagacagcgggcgcaggccagtgtgtgtgcgcaccgtgcgcgagccgaagcagggcgaggcattgcctcacctgggaagcgcaaggggtcagggagttccctttccgagccaaagaaaggggtgacggacgcacctggaaaatcgggtcactcccacccgaatattgcgcttttcagaccggcttaagaaacggcgcaccacgagactatatcccacacctggctcagagggtcctacgcccacggaatcttgctgattgctagcacagcagtctgagatcaaactgcaaggcagcaacgaggctcggggaggggcacccgccattgcccaggcttgcttaggtaaacaaagcagctgggaagctcgaactgggtggagcccaccacagctcaaggaggcctgcctgcctctgtaggctccacctctgggggcagggcacagacaaacaaaaagacagcagtaacctctgcagacttaagtgtccctgtctgacagctttgaagagagcagtggttctcccagcacgcagctggagatctgagaacgggcagactgcctcctcaagtgggtccctgacccctgacccccgagcagcctaaccgggaggcaccccccagcaggggcacactgacacctcacacggcagggtattccaacagacctgcagctgagggtcctgtctgttagaaggaaaactaacaaccagaaaggacatctacaccgaaaacccatctgtacatcaccatcatcaaagaccaaaagtagataaaaccacaaagatggggaaaaaacagaacagaaaaactggaaactctaaaacgcagagcgcctctcctcctccaaaggaacgcagttcctcaccagcaacagaacaaagctggatggagaatgattttgacgagctgacagaagaaggcttcagacgatcaaattactctgagctacgggaggacattcaaaccaaaggcaaagaagttgaaaactttgaaaaaaatttagacgaatgtataactagaataaccaatacagagaagtgcttaaaggagctgatggagctgaaaaccaaggctcgagaactacgtgaagaatgcagaagcctcaggagccaatgcgatcaactggaagaaagggtatcagcaatggaagatgaaatgaatgaaatgaagcgagaagggaagtttagagaaaaaagaataaaaagaaatgagcaaagcctccaagaaatatgggactatgtgaaaagaccaaatctacgtctgattggtgtacctgaaagtgatgtggagaatggaaccaagttggaaaacactctgcaggatattatccaggagaacttccccaatctagcaaggcaggccaacgttcagattcaggaaatacagagaacaccacaaagatactcctcgagaagagcaactccaagacacataattgtcagattcaccaaagttgaaatgaaggaaaaaatgttaagggcagccagagagaaaggtcgggttaccctcaaaggaaagcccatcagactaacagcggatctctcggcagaaaccctacaagccagaagagagtgggagccaatattcaacattcttaaagaaaagaattttcaacccagaatttcatatccagccaaactaagcttcataagtgaaggagaaataaaatacttcacagacaagcaaatgctgagagattttgtcaccaccaggcctgccctaaaagagctcctgaaggaagcgctaaacatggaaaggaacaaccggtaccagccgctgcaaaatcatgccaaaatgtaaagaccatcgagactaggaagaaactgcatcaactaatgagcaaaatcaccagctaacatcataatgacaggatcaaattcacacataacaatattaactttaaatataaatggactaaattctgcaattaaaagacacagactggcaagttggataaagagtcaagacccatcagtgtgctgtattcaggaaacccatctcacgtgcagagacacacataggctcaaaataaaaggatggaggaagatctaccaagccaatggaaaacaaaaaaaggcaggggttgcaatcctagtctctgataaaacagacttcaaaccaacaaagatcaaaagagacaaagaaggccattacataatggtaaagggatcaattcaacaagaggagctaactatcctaaatatttatgcacccaatacaggagcacccagattcataaagcaagtcctcagtgacctacaaagagacttagactcccacacattaataatgggagactttaacaccccactgtcaacattagacagatcaacgagacagaaagtcaacaaggatacccaggaattgaactcagctctgcaccaagcagacctaatagacatctacagaactctccaccccaaatcaacagaatatacatttttttcagcaccacaccacacctattccaaaattgaccacatagttggaagtaaagctctcctcagcaaatgtaaaagaacagaaattataacaaactatctctcagaccacagtgcaatcaaactagaactcaggattaagaatcttactcaaagccgctcaactacatggaaactgaacaacctgctcctgaatgacgactgggtacataacgaaatgaaggcagaaataaagatgttttttgaaaccaacgagaacaaagacaccacataccagaatctctgggacgcattcaaagcagtgtgtagagggaaatttatagcactaaatgcctacaagagaaagcaggaaagatccaaaattgacaccctaacatcacaattaaaagaactagaaaagcaagagcaaacacattcaaaagctagcagaaggcaagaaataactaaaatcagagcagaactgaaggaaatagagacacaaaaaacccttcaaaaaatcaatgaatccaggagctagttttttgaaaggatcaacaaaattgatagaccgctagcaagactaataaagaaaaaaagagagaagaatcaaatagacacaataaaaaatgataaaggggatatcaccaccgatcccacagaaatacaaactaccatcagagaatactacaaacacctctacgcaaataaactagaaaatctagaagaaatggataaattcctcgacacatacactctcccaagactaaaccaggaagaagttgaatctctgaatagaccaataacaggctctgaaattgtggcaataatcaatagtttaccaaccaaaaagagtccaggaccagaaggattcacagccgaattctaccagaggtacaaggaggaactggtaccattccttctgaaactattccaatcaatagaaaaagagggaatcctccctaactcattttatgaggccagcatcattctgataccaaagccgggcagagacacaaccaaaaaagagaattttagaccaatatccttgatgaacattgatgcaaaaatcctcaataaaatactggcaaaccgaatccagcagcacatcaaaaagcttatccaccatgatcaagtgggcttcatccctgggatgcagggctggttcaatatacgcaaatcaataaatgtaatccagcatataaacagagccaaagacaaaaaccacatgattatctcaatagatgcagaaaaagcctttgacaaaattcaacaacccttcatgctaaaaactctcaataaattaggtattgctgggacgtatttcaaaataataagagctatctatgacaaacccacagccaatatcatactgaatgggcaaaaactggaagcattccctttgaaaactggcacaagacagggatgccctctctcaccgctcctattcaacatagtgttggaagttctggccagggcaatcaggcaggagaaggaaataaagggtattcaattaggaaaagaggaagtcaaactgtccctgtttgcagacgacatgattgtttatctagaaaaccccatcgtctcagcccaaaatctccttaagctgataagcaacttcagcaaagtctcaggatacaaaatcagtgtacaaaaatcacaagcattcttatacaccaacaacagacaaacagagagccaaatcatgggtgaactcccattcacaattgcttcaaagagaataaaatacctaggaatccaacttacaagggatgtgaaggacctcttcaaggagaactacaaaccactgctcaaggaaataaaagaggacacaaacaaatggaagaacattccatgctcatgggtaggaagaatcaatagcgtgaaaatggccatactgcccaaggtaatttacagattcaatgccatccccatcaagctaccaatgactttcttcacagaattggaaaaaagtactttaaagttcatatggaaccaaaaaagagcccgcattgccaagtcaatcctaagccaaaagaacaaagctggaggcatcacactacctgacttcaaactatactacaaggctacagtaaccaaaacagcatggtactggtaccaaaacagagatatagatcaatgggacagaacagagccctcagaaataatgccgcatatctacaactatctgatctttgacaaacctgagaaaaacaagcaatggggaaaggattccctatttaataaatggtgctgggaaaactggctagccatatgtagaaagctgaaactggatcccttccttacacattatacaaaaatcaattcaagatggattaaagatttaaacgttaaacctaaaaccataaaaaccctagaagaaaacctaggcattaccattcaggacataggcgtgggcaaggacttcatgtccaaaacaccaaaagcaatggcaacaaaagacaaaattgacaaatgggatctaattaaactaaagagcttctgcacagcaaaagaaactaccatcagagtgaacaggcaacctacaacatgggagaaaattttcgcaacctactcatctgacaaagggctaatatccagaatctacaatgaactcaaacaaatttacaagaaaaaaacaaacaaccccatcaaaaagtgggcgaaggacatgaacagacacttctcaaaagaagacatttatgcagccaaaaaacacatgaagaaatgctcatcatcactggccatcagagaaatgcaaatcaaaaccactatgagatatcatctcacaccagttagaatggcaatcattaaaaagtcaggaaacaacaggtgctggagaggatgtggagaaataggaacacttttacactgttggtgggactgtaaactagttcatccattgtggaagtcagtgtggcgattcctcagggatctagaactagaaataccatttgacccagccatcccattactgggtatatacccaaatgagtataaatcatgctgctataaagacacatgcacacgtatgtttattgcggcactattcacaatagcaaagacttggaaccaacccaaatgtccaacaatgatagactggattaagaaactgtggcacatatacaccatggaatactatgcagccataaaaaatgatgagttcatatcctttgtagggacatggatgaaaatggaaaccatcattctcagtaaactatcgcaagaacaaaaaaccaaacaccgcatattctcactcataggtgggaactgaacaatgagatcacatggacacaggaaggggaatatcacactctggggactgtggtggggtcgggggaggggggagggacagcattgggagatatacctaatgctagatgacacattagtgggtgcagcgcaccagcatggcacatgtatacatatgtaactaacctgcacaatgtgcacatgtaccctaaaacttagagtataataaaaaaaaaaaa

SEQ ID NO: 591 - DNA, 2877 bp, Homo sapiens
  source 1..2877: mol_type = other DNA
aatagactgctagctgaaagaataagaaaaagagagaagaatcaaatagacacaataaaaaatgataaaggggatatcaccactaaccccacagaaatacaaactactatcagagaatactataaacacctctcacaaataaacaagaaaatctagaagaaatggataatttcctggacacatacatacataatcccaaaactaaaccaagaaaaaggtgaatcccggaaatagaccaataatgagttctgaaattgaggcagtaattaataggctaccaaccaaaaaaagcccaggaccagatggattcacagccaaattctaccacaggcacaaagaggagctgggaccattacgtctgaaactattccaaacaactgaaaaggagggactcctccctaactcattttatgaagccagcagcatcctgatactaaaactgtgcagagacacaacaaacaaagaaaacttcaggccaatatcgctgatgaacatcaacgcgaaaatcctcaataaaacactggcaaaccgaatccagtaccacatcaaaaaacttacccaccacgatcaagttggcttcatccctgggatgcaaggctggttcaaaatacaaaatcaataaatgtaatccatcacataaacagaaccaatgacaaaaaccacatgattatctcaacagatgcagaaaaggcctttgataaaattcaacatcccttcatgttaaaaattttcaataaattattaatggaacatatctcaaaatcataagagctattaatgacaaacccaaagccaatatcacattaaatgggcaaaaactggaagcattctctttgaaaactggtacaagacaaggatgccctctctcaccgctcctattcaacatagtactggcagttctgaccagggcaaccaggcaagagaaagaaataaagggtattcaaataggaagacaggaagtcaaattgtctctgtttgcagacgacctgattttgtatttagaaaaccccattatctcagccccaaaactccttaagctgataagcaacttcagcgaagactcaggatacaaaatcaatatgtaaaaaccacaagcattcctttatgcctacaacagatagagagccaaatcatgaataaacttccattcataattgctacaaagagaataaaatacctaggatacagttaacaagggatgtgaaggacctctcaaggagaactacaaaccactgctcaaggaaataagagaggacacaaacaaatggaaaactatttccatgctcatggataggaagaatcaatgtatcgtgaaagtggccatagtgcccaaagtaatttatagatttaatgctattcccatcaaactaccactgacattcttcacagaattagaaaaaactactttaaatttcatatggaatcaaaggagaccccatctagccaacacaatcctaagcaaaaagaatcaagctagaggcatcatgctacctgacttcaaactatactacaaggctacagtgaccaaaacagcatggtcctggtaccaaaacagacatatagaccaaaggaacagaacagagacctcacaaataccaccatgcatctacaaccatctgatctttgacaaacctgacagaaagaagaaatggggaaaggatttcctattcaataaatggtggcgggagaactggctagccatatgaggaaaactgaaactgaaccccttccttacactttatacaaaaaattaagtcaagatggattaaagacttaaatgtaaaacccaaaaccataaaaaccctagaagaaaacctaggcaataccattcaggacatcggcaagggcaaagacttcatgacaaaaacgccaaagcaattgcaacaaaagccaaaattgacaaattggatctaattaaactaaagagcttctgcacagcaaaagaaactagcattagagtgaacaggcaacctacagaatgggagaaaatttttgtaatctacccatctgacaaagatccaatatccagaatttacaagaaacttaaacaaatttacaacaaaaaaaacaaccccatcaaaaagtgggcaaagggtatgaacaaacacttctcaaaagacatttacacctccaagaaacacatgaaaaaaagcttaacatcactggtcattagagaaatgcaaatcaaaaccataatgagataccatctcacgccagttagaatagcgattattttaaaagtcaagaaacaatagatgctggcaaggctgtgaagaaataggaatgcttttacactgttggtgggaatgtaaattagttcgatgattgtggaagacagtatggcaatttctcaaggatctagaaccagaaatgccatttgacctagtaatctcattactcagtatatactcaaaggaatgtaaatcattcttctataaggacacatacacacatatgcttattgcagcactatttacaaaagcaaagccatggaaccaacccaatgtccatcaaggacagactggataaagaaaatgtggtacatatataccatggaatactatgcagccataaaaaggtatgcaatcatgacctttgcagggacatagatgaagctagaagccattatcctcagcaaactaacacatgaacagaaaacaaaacaccacatgttctcactcataagtgagagatgaactatgagaacacatggacccagggaggggaacaacacataccagggcctgttgaggggttgcgggagaggagaggaaacttagatgacaggtcaataggtgcagcaagccaccatggcacacatatacctatgtaacaaacctgcacattctgcacatgtatcccaggacttaaagtaaa

SEQ ID NO: 592 - DNA, 4096 bp, Homo sapiens
  source 1..4096: mol_type = other DNA
actgcaaaaacatgccaaaatgtaaaggccatcaaggctaggaagaaactgcatcaactaacgagcaaaataaccagctaacatcataatgacaggaccaaattcacacatgacaatattaactttaaatgtaaatgggctaaatgctccaattaaaaggcacagactggcaaattggataaagagtcaagacccatcagtgtgctgtattcaggaaacccatctcacatgcagaaacacacataggctcaaaataaagggatggaggaagatctaccaagcaaatggaaaacaaaaaaaggcaaggattgcaatcctagtctcgaataaaacagactttaaaacaacaaagatcaaaagagacaaagaaggccattacataatggtaaagggatcaattcaacaagaagaactaactatcctaaatatatatgcacccaatacaggagcacccagattcataaagcaagtccacaataataatgggagactttaacaccccactgtcaacattagacagatcaacgagacagaaagttaacaaggatatccaggaattgaactcagctctgcaccaagcagacctaatagacatctacagaactctccaccccaaatcaacagaatatacatttttttcagcaccacaccacacctattccaaaattgaccacatacttggaagtaaagcactcctcagcaaatgtaaaagaacagaaattataacaaactgtctctcagaccacagtgcaaccaaactagaacgcaggattaagaaactcactcaaaaccactcaactacatggaaactgaacaacctgctcctgaatgactactgggtacataacgaaatgaaggcagaaataaagatgttctttgtaaccaatgagaacaaagacacaacataccagaatctctgggacacattcaaagcagtgtgtagagggaaatttatagcactaaatgcccacaagagaaagcaggaaagatccaaaattgacaccctaacatcacaattcaaagaactagaaaagcaagagcaaacacattcaaaagctagcaaaaggcaagaaataactaagatcagagcagaactgaaggaaatagagacacaaaaaacccttcaaaaaaatcaatgaatccaggagctggctttttgaaaagatcaacaaaattgatagacagctagcaagactaattaagaagaaaagagagaagaatcaaatagacgcaataaaaaatgataaaggggatatcaccaccgatcccacagaaatacaaactaccatcagagaatactacaaacacctctatgcaaataaactagaaaatctagaagaaatggataaattcctcgacacatacactctcccaagactaaacaaggaagaagttgaatctctgaataggccaataacaggctctgaaattgaggcaataattaatagcttaccaaccaaaaaaagtccaggaccagatggattcacagctgaattctaccagaggtacaaggaggagctggtaccattccttctgaaactattccagtcaatagaaaaagagggaatcctccctaactcattctatgaggccagcatcatcctgataccaaagcctggcagagacacaacaaaaaaagagaattttagaccaatatccttgatgaacattgatgcaaaaatcctcaataaaatactggcaaactgaatccagcagcacatcaaaaagcttatccaccatgatcaagtgggtttcatccctgggatgcaaggctggttcaacatacgaaaatcaataaacgtaatccagcatataaacagaaccaaagacaaaaaccacataattatctcaatagatgcggaaaaggcctttgacaaaattcaacaacccttcatgctaaaaactctcaataaattaggtattgatgggatgtatctcaaaataataagagctatctatgacaaacccacagccaatatcatatggaatggacaaaaactggaagcattccctttgaaaaccggcacaagacagggatgccctctcctaccactcctattcaacatagtgttggaagttctggccagggcaatcaggcagaagaaggaaataaagggcattcaattaggaaaagaggaactcaaattgtccctgtttgcagatgacatgattgtatatctagaaaaccccatcgtctcagcccaaaatctccttaagctgataagcaacttcagcaaactctcaggatgcaaaatcaatgtgcaaaaatcacaagcatttttatacaccaataacagacaaacagagagccaaatcatgagtgaactcccattcacaattgcttcaaagagaataaaatacctaggaatccaacttacaagggatgtgaaggacctcttcaaggagaactacaaccactgctcagtgaaataaaagaggacacaaagaaatggaagaacattccatgctcctgggtaggaagaatcaatatcatgaaaatggccatgttgcccaaggtaatttatagattcaatgccatccccatcaagctaccaatgactttcttcacagaattggaaaaaactactttaaagttcatatggaaccaaaaaagagcccgcattgccaagtcaatcctaagccaaaagaacaaagccagaggcatcacgctacctgacttcaaactatcctacaaggctacagtaaccaaaacagcatggtactggtaccaaaacagagatatagaccaatggaacagaacagagccctcagaaataatcccacatatctacaaccatctgatctttgacaaacctgacaaaaacaagcaatggggaaaggattccctatttaataaatggtgctgggaaaactggctagccatatgtagaaagctgaaactggatcccttccttacaccttatacaaaaattaattcaagatggattaaagacttacatgttagacctaaaaccataaaaaccctagaagaaaacctaggcaataccattcaggacataggcatgggcaaggatttcatgtctaaaacaccaaaagcaatgtcaacaaaagccgaaattgacaaatgggatctaattaaactaaagagcttctgcacagcaaaagaaaccaccatcagagtgaacaggcaacctacagaatgggagaaaatttttgcaacctactcatctgacaaagggctaatatccagaatctacaatgaactcaaacaaatttacaagaaaaaaacaaacaaccccatcaaaaagtgggcgaaggatatgaacagacacttgtcaaaagaagacatttatgcagccaaaatcacatgaaaaaatgctcatcatcactggccatcagagaaatgcaaatcaaaaccacaatgagataccatctcacaccagttagaatggcaatcattaaaaagtcagaaaacaacaggtgctggagaggatgtggagaaataggaacacttttacactgttggtgggactgtaaactagttcaaccattgtggaagttggtgtggcgattcctcagggacctagaactagaaataccatttgacccagccctcccattattgggtatatacccaagggattataaatcatgctgctataaagacacatgcacacgtatgtttatttcggcactattcacaatagcaaagacttggaaccaacccaaatgtccaacaatgatagactggattaagaaaatgtggcacatatacaccatggaatactatgcagccataaaaaaggatgagttcatgtcctttgtaggaacatggatgaagctggaaaccatcattctcagcaaactatcgaaaggacaaaaaaccaaacaccacatattctcactcctaggtgggaattgaacaatgagaacacatggacacaggaaggggaacatcacacaacggggactgttgtgggttgggggaggggggagggatagcattaggagatatacctaatgaaatgacgagttaatgggtgcagcacaccaatatggcacatgtatacatatgtaacaaacctgcacattgtgcacatgtaccctaaaacttaaagtataataataataaaaa

SEQ ID NO: 593 - DNA, 6032 bp, Homo sapiens
  source 1..6032: mol_type = other DNA
gggaggagccaagatggccgaataggaacagctccggtctacagctcccagcgtgagcgacgcagaagacggtgatttctgcatttccatctgaggtaccgggttcatctcactagggagtgccagacagtgggcgcaggccagtgtgtgtgcgcaccgtgcgcgagccgaagcagagcgaggcattgcctcacctgggaagcgcaaggggtcagggagttccctttccgagtcaaagaaaggggtgacggtcgcacctggaaaatcgggtcactcccacccgaatattgcgcttttcagaccggcttaagaaacggcgcaccacgagactatatcccacacctggctcggagggtcctacgcccacggaatctcgctgattgctagcacagcagtctgagatcaaactgcaaggcggcaacgaggctgggggaggggcgcccgccattgcccaggcttgcttaggtaaacaaagcagccgggaagctcgaactgggtggagcccaccacagctcaaggaggcctgcctgcctctgtaggctccacctctgggggcagggcacagacaaacaaaaagacagcagtaacctctgcagacttaagtgtccctgtctgacagctttgaagagagcagtggttctcccagcacgcagctggagatctgagaacgggcagacagactgcctcctcaagtgggtccctgactcctgacccccgagcagcctaactgggaggcaccccccagcaggggcacactgacacctcacacggcagggtattccaacagacctgcagctgagggtcctgtctgttagaaggaaaactaacaaccagaaaggacatctacaccgaaaacccatctgtacatcaccatcatcaaagaccaaaagtagataaaaccacaaagatggggaaaaaacagaacagaaaaactggaaactctaaaacgcagagcgcctctcctcctccaaaggaacgcagttcctcaccaggaacagaacaaagctggatggagaatgattttgacgagctgagagaagaaggcttcagacgatcaaattactctgagctacgggaggacattcaaaccaaaggcaaagaagttgaaaactttgaaaaaaatttagaagaatgtataactagaataaccaatacagagaagtgcttaaaggagctgatggagctgaaaaccaaggctcgagaactacgtgaagaatgcagaagcctcaggagccgatgtgatcaactggaagtaagggtatcagcaatggaagatgaaatgaatgaaatgaagcgagaagggaagtttagagaaaaaagaataaaaagaaatgagcaaagcctccaagaaatatgggactatgtgaaaagaccaaatctacgtctgattggtgtacctgaaagtgatgtggagaatggaaccaagttggaaaacactctgcaggatattatccaggagaacttccccaatctagcaaggcaggccaacgttcagattcaggaaatacagagaacgccacaaagatactcctcgagaagagcaactccaagacacataattgtcagattcaccaaagttgaaatgaaggaaaaaatgttaagggcagccagagagaaaggtcgggttaccctcaaaggaaagcccatcagactaacagcggatctcttggcagaaaccctacaagccagaagagagtgggggccaatattcaacattcttaaagaaaagaattttcaacccagaatttcatatccagccaaactaagcttcataagtgaaggagaaataaaatactttatagacaagcaaatgttgagagattttgtcaccaccaggcctgccctaaaagagctcctgaaggaagcactaaacatggaaaggaacaaccggtaccagccgctgcaaaatcatgccaaaatgtaaagaccatcgagactaggaagaaactgcatcaactaatgagcaaaatcaccagctaacatcataatgacaggatcaaattcacacataacaatattaactttaaatataaatggactaaattctgcaattaaaagacacagactggcaagttggataaagagtcaagacccatcagtgtgctgtattcaggaaacccatctcacgtgcagagacacacataggctcaaaataaaaggatggaggaagatctaccaagccaatggaaaacaaaaaaaggcaggggttgcaatcctagtctctgataaaacagactttaaaccaacaaagatcaaaagagacaaagaaggccattacataatggtaaagggatcaattcaacaagaggagctaactatcctaaatatttatgcacccaatacaggagcacccagattcataaagcaagtcctcagtgacctacaaagagtcttagactcccacacattaataatgggagactttaacaccccactgtcaacattagacagatcaacgagacagaaagtcaacaaggatacccaggaattgaactcagctctgcaccaagcagacctaatagacatctacagaactctccaccccaaatcaacagaatatacatttttttcagcaccacaccacacctgttccaaaattgaccacatagttggaagtaaagctctcctcagcaaatgtaaaagaacagaaattataacaaactatctctcagaccacagtgcaatcaaactagaactcaggattaagaatctcactcaaagccgctcaactacatggaaactgaacaacctgctcctgaatgactactgggtacataacgaaatgaaggcagaaataaagatgttctttgaaaccaacgagaacaaagacaccacataccagaatctctgggacgcattcaaagcagtgtgtagagggaaatttatagcactaaatgcctacaagagaaagcaggaaagatccaaaattgacaccctaacatcacaattaaaagaactagaaaagcaagagcaaacacattcaaaagctagcagaaggcaagaaataactaaaatcagagcagaactgaaggaaatagaggcacaaaaaacccttcaaaaaatcaatgaatccaggagctggttttttgaaaggatcaacaaaattgatagaccgctagcaagactaataaagaaagaagagagaagaatcaaatagacacaataaaaaatgataaaggggatatcaccaccgatcccacagaaatacaaactaccatcagagaatactacaaacacctcttcgcaaataaactagaaaatctagaagaaatggatacattcctcgacacatacactctcccaagactaaaccaggaagaagttgaatctctgaatagaccaataacaggctctgaaattgtggcaataatcaatagtttaccaaccaaaaagagtccaggaccagatggattcacagccgaattctaccagaggtacatggaggaactggtaccattccttctgaaactattccaatcaatagaaaaagagggaatcctccctaactcattttatgaggccagcatcattctgataccaaagccgggcagagacacaaccaaaaaagagaattttagaccaatatccttgatgaacattgatgcaaaaatcctcaataaaatactggcaaaccgaatccagcagcaaatcaaaaagcttatccaccatgatcaagtgggcttcatccctgggatgcaaggctggttcaatatacgcaaatcaataaatgtaatccagcatataaacagagccaaagacaaaaaccacatgattatctcaatagatgcagaaaaagcctttgacaaaattcaacaacccttcatgctaaaaactctcaataaattaggtattgatgggacgtatttcaaaataataagagctatctatgacaaacccacagccaatatcatactgaatgggcaaaaactggaagcattccctttgaaaaccggcacaagacagggatgccctctctcaccgctcctattcaacatagtgttggaagttctggccagggcaatcaggcaggagaaggaaataaagggtattcaattaggaaaagaggaagtcaaattgtccctgtttgcagacgacatgattgtttatctagaaaaccccatcgtctcagcccaaaatctccttaagctgataagcaacttcagcaaagtctcaggatacaaaatcaatgtacaaaaatcacaagcattcttatacaccaacaacagacaaacagagagccaaatcatgggtgaactcccattcacaattgcttcaaagagaataaaatacctaggaatccaacttacaagggatgtgaaggacctcttcaaggagaactacaaaccactgctcaaggaaataaaagaggagacaaacaaatggaagaacattccatgctcatgggtaggaagaatcaatatcgtgaaaatggccatactgcccaaggtaatttacagattcaatgccatccccatcaagctaccaatgactttcttcacagaattggaaaaaactactttaaagttcatatggaaccaaaaaagagcccgcattgccaagtcaatcctaagccaaaagaacaaagctggaggcatcacactacctgacttcaaactatactacaaggctacagtaaccaaaacagcatggtactggtaccaaaacagagatatagatcaatggaacagaacagagccctcagaaataatgccgcatatctacaactatctgatctttgacaaacctgagaaaaacaagcaatggggaaaggattccctatttaataaatggtgctgggaaaactggctagccatatgtagaaagctgaaactggatcccttccttacaccttatacaaaaatcaattcaagatggattaaagatttaaacgttaaacctaaaaccataaaaaccctagaagaaaacctaggcattaccattcaggacataggcgtgggcaaggacttcatgtccaaaacaccaaaagcaatggcaacaaaagacaaaattgacaaatgggatctaattaaactaaagagcttctgcacagcaaaagaaactaccatcagagtgaacaggcaacctacaacatgggagaaaattttcgcaacctactcatctgacaaagggctaatatccagaatctacaatgaactcaaacaaatttacaagaaaaaaacaaacaaccccatcaaaaagtgggtgaaggacatgaacagacacttctcaaaagaagacatttatgcagccaaaaaacacatgaagaaatgctcatcatcactggccatcagagaaatgcaaatcaaaaccactatgagatatcatctcacaccagttagaatggcaatcattaaaaagtcaggaaacaacaggtgctggagaggatgtggagaaataggaacacttttacactgttggtgggactgtaaactagttcaaccattgtggaagtcagtgtggcgattcctcagggatctagaactagaaataccatttgacccagccatcccattactgggtatatacccaaatgagtataaatcatgctgctataaagacacatgcacacgtatgtttattgtggcactattcacaatagcaaagacttggaaccaacccaaatgtccaacaatgatagactggattaagaaaacgtggcacatatacaccatggaatactatgcagccataaaaaatgatgagttcatatcctttgtagagacatggatgaaattggaaaccatcattctcagtaaactatcgcaagaacaaaaaaccaaacactgcatattctcactcataggtgggaattgaacaatgagatcacatggacacaggaaggggaatatcacactctggggactgtggtggggtcgggggaggggggagggatagcattgggagatatacctaatgctagatgacacattagtgggtgcagcgcaccagcatggcacatgtatacatatgtaactaacctgcacaatgtgcacatgtaccctaaaacttagagtataataaaaaaaaaaaaa

SEQ ID NO: 594 - DNA, 6028 bp, Homo sapiens
  source 1..6028: mol_type = other DNA
gggaggagccaagatggccgaataggaacagctccggtctacagctcccagcgtgagcgacgcagaagacggtgatttctgcatttccatctgaggtaccgggttcatctcactagggagtgccagacagtgggcgcaggccagtgtgtgtgcgcaccgtgcgcgagccgaagcagggcgaggcattgcctcacctgggaagcgcaaggggtcaaggagttccctttccgagtcaaagaaaggggtgacggacgcacctggaaaatcgggtcactcccacccgaatattgcgcttttcagaccggcttaagaaacggcgcaccacgagactatatcccacacctggctcggagggtcctacgcccacggaatctcgctgattgctagcacagcagtctgagatcaaactgcaaggcggcaacgaggctgggggaggggcgcccgccattgcccaggcttgcttaggtaaacaaagcagccgggaagctcgaactgggtgcagcccaccacagctcaaggaggcctgcctgcctctgtaggctccacctctgggggcagggcacagacaaacaaaaagacagcagtaacctctgcagacttaagtgtccctgtctgacagctttgaagagagcagtggttctcccagcacgcagctggagatctgagaacgggcagactgcctcctcaagtgggtccctgactcctgacccccgagcagcctaactgggaggcaccccccagcaggggcacactgacacctcacatggcagggtattccaacagacctgcagctgagggtcctgtctgttagaaggaaaactaacaaccagaaaggacatctacaccgaaaacccatctgtacatcaccatcatcaaagaccaaaagtagataaaaccacaaagatggggaaaaaacagaacagaaaaactggaaactctaaaatgcagagcgcctctcctcctccaaaggaacgcagttcctcaccagcaacagaacaaagctggatggagaatgattttgacgagctgagagaagaaggcttcagacgatcaaattactctgagctacgggaggacattcaaaccaaaggcaaagaagttgaaaactttgaaaaaaatttagaagaatgtataactagaataaccaatacagagaagtgcttaaaggagctgatggagccgaaaaccaaggctcgagaactacgtgaagaatgcagaagcctcaggagccgatgcgatcaactggaagaaagggtatcagcaatggaagatgaaatgaatgaaatgaagcgagaagggaagtttagagaaaaaagaataaaaagaaatgagcaaagcctccaagaaatatgggactatgtgaaaagaccaaatctacgtctgattggtgtacctgaaagtgatgtggagaatggaaccaagttggaaaacactctgcaggatattatccaggagaacttccccaatctagcaaggcaggccaacgttcagattcaggaaatacagagaacgccacaaagatactcctcgagaagagcaactccaagacacataattgtcagattcaccaaagttgaaatgaaggaaaaaatgttaagggcagccagagagaaaggtcgggttaccctcaaaggaaagcccatcagactaacagcggatctctcggcagaaaccctacaagccagaagagagtgggggccaatattcaacattcttaaagaaaagaattttcaacccagaatttcatatccagacaaactaagcttcataagtgaaggagaaataaaatactttatagacaagcaaatgttgagagattttgtcaccaccaggcctgccctaaaagagctcctgaaggaagcgctaaacatggaaaggaacaaccggtaccagccgctgcaaaatcatgccaaaatgtaaagaccatcgagactaggaagaaactgcatcaactaatgagcaaaatcaccaggtaacatcataatgacaggatcaaattcacacataacaatattaactttaaatataaatggactaaattctgcaattaaaagacacagactggcaagttggataaagagtcaagacccatcagtgtgctgtattcaggaaacccatctcacgtgcagagacacacataggctcaaaataaaaggatggaggaagatctaccaagccaatggaaaacaaaaaaaggcaggggttgcaatcctagtctctgataaaacagactttaaaccaacaaagatcaaaagagacaaagaaggccattacataatggtaaagggatcaattcaacaagaggagctaactatcctaaatatttatgcacccaatacaggagcacccagattcataaagcaagtcctcagtgacctacaaagagacttagactcccacacattaataatgggagactttaacaccccactgtcaacattagacagatcaacgagacagaaagtcaacaagaatacccaggaattgaactcagctctgcaccaagcagacctaatagacatctacagaactctccaccccaaatcaacagaatatacatttttttcagcaccacaccacatctattccaaaattgaccacatagttggaagtaaagctctcctcagcaaatgtaaaagaacagaaattataacaaactatctctcagaccacagtgcaatcaaactagaactcaggattaagaatctcactcaaagccgctcaactacatggaaactgaacaacctgctcctgaatgactactgggtacataacgaaatgaaggcagaaataaagatgttctttgaaaccaacgagaacaaagacaccacataccagaatctctgggatgcattcaaagcagtgtgtagagggaaatttatagcactaaatgcctacaagagaaagcaggaaagatccaaaattgacaccctaacatcacaattaaaagaactagaaaagcaagagcaaacacattcaaaagctagcagaaggcaagaaataactaaaatcagagcagaactgaaggaaatagagacacaaaaaacccttcaaaaaatcaatgaatccaggagctggttttttgaaaggatcaacaaaattgatagaccgctagcaagactaataaagaaaaaaagagagaagaatcaaatagacacaataaaaaatgataaaggggatatcaccaccgatcccacagaaatacaaactaccatcagagaatactacaaacacctctacgcaaataaactagaaaatctagaagaaatggatacattcctcgacacatacactctcccaagactaaaccaggaagaagttgaatctctgaatcgaccaataacaggctctgaaattgtggcaataatcaatagtttaccaaccaaaaagagtccaggaccagatggattcacagccgaattctaccagaggtacaaggaggaactggtaccattccttctgaaactattccaatcaatagaaaaagagggaatcctccctaactcattttatgaggccagcatcattctgataccaaagccgggcagagacacaaccaaaaaagagaattttagaccaatatccttgatgaacattgatgcaaaaatcctcaataaaatactggcaaaccgaatccagcagcacatcaaaaagcttatccaccatgatcaagtgggcttcatccctgggatgcaagggtggttcaatatacgcaaatcaataaatgtaatccagcatataaacagagccaaagacaaaaaccacatgattatctcaatagatgcagaaaaagcctttgacaaaattcaacaacccttcatgctaaaaactctcaataaattaggtattgatgggatgtatttcaaaataataagagctatctatgacaaacccacagccaatatcatactgaatgggcaaaaactggaagcattccctttgaaaaccggcacaagacagggatgccctctctcaccgctcctattcaacatagtgttggaagttctggccagggcaatcaggcaggagaaggaaataaagggtattcaaataggaaaagaggaagtcaaattgtccctgtttgcagacgacatgattgtttatctagaaaaccccattgtctcagcccaaaatctccttaagctgataagcaacttcagcaaagtctcaggatacaaaatcaatgtacaaaaatcacaagcattcttatacaccaacaacagacaaacagagagccaaatcatgggtgaactcccattcacaattgcttcaaagagaataaaatacctaggaatccaacttacaagggatgtgaaggacctcttcaaggagaactacaaaccactgctcaaggaaataaaagaggagacaaataaatggaagaacattccatgctcatgggtaggaagaatcaatattgtgaaaatggccatactgcccaaggtaatttacagattcaatgccatccccatcaagctaccaatgactttcttcacagaattggaaaaaactactttaaagttcatatggaaccaaaaaagagcccgcatcgccaagtcaatcctaagccaaaagaacaaagctggaggcatcacactacctgacttcaaactatactacaaggctacagtaaccaaaacagcatggtactggtacaaaaacagagatatagatcaatggaacagaacaaagccctcagaaataatgccgcatatctacaactatctgatctttgacaaacctgagaaaaacaagcaatggggaaaggattccctatttaataaatggtgctgggaaaactggctagccatatgtagaaagctgaaactggatcccttccttacaccttatacaaaaatcaattcaagatggattaaagatttaaacgttaaacctaaaaccataaaaaccctagaagaaaacctaggcattaccattcaggacataggcgtgggcaaggacttcatgtccaaaacaccaaaagcaatggcaacaaaagacaaaattgacaaatgggatctaattaaactaaagagcttctgcacagcaaaagaaactaccatcagagtgaacaggcaacctacaacatgggagaaaatttttgcaacctactcatctgacaaagggctaatatccagaatctacaatgaactcaaacaaatttacaagaaaaaaacaaacaaccccatcaaaaagtgggcgaaggacatgaacagacacttctcaaaagaagacatttatgcagccaaaaaacacatgaagaaatgctcatcatcactggccatcagagaaatgcaaatcaaaaccactatgagatatcatctcacaccagttagaatggcaatcattaaaaagtcaggaaacaacaggtgctggagaggatgcggagaaataggaacacttttacactgttggtgggactgtaaactagttcaaccattgtggaagtcagtgtggcgattcctcagggatctagaactagaaataccatttgacccagccatcccattactgggtatatacccaaatgagtataaatcatgctgctataaagacacatgcacacgtatgtttattgtggcactattcacaatagcaaagacttggaaccaacccaaatgtccaacaatgatagactggattaagaaaatgtggcacatatacaccatggaatactatgcagccataaaaaatgatgagttcatatcctttgtagggacatggatgaaattggaaaccatcattctcagtaaactattgcaagaacaaaaaaccaaacaccgcatattctcactcacaggtgggaattgaacaatgagatcacatggacacaggaaggggaatatcacactctggggactgtggtggggtcgggggaggggggagggatagcattgggagatatacctaatgctagatgacacattagtgggtgcagcgcaccagcatggcacatgtatacatatgtaactaacctgcacaatgtgcacatgtaccctaaaacttagagtataataaaaaaaaaaaa

SEQ ID NO: 595 - DNA, 6133 bp, Homo sapiens
  source 1..6133: mol_type = other DNA
ccattccaagatggcagaataggaacagctccattctgcagctcccagtgtgatcaatgcagaagatgggtgatttctgcatttccaactgaggtacgtggttcatctcattgggactggttagacagtgggtgcagcccacagagggtgggccaaagcagggcagggcgttacctctcccaggaagcatgaggggtcaggggatttccatttcctaaccgagggaagccatgacagactgtacctggaaaaacgggacacttccacccaaatactgcacttttcccaaggtcttagcaaccagcagacaaggagattctctcctgtgcctggcttggtgggtcctatgcccatggagccttgcttactgctaggacggcagtctgagatcgaactgcgaggcggcagactggctgggggaggggcatccaccattgctgaggctcaagtaggtaaacaaagcagtcaggaagctcgaactgggcagagcccactgcagctcagtaaggcctattgcctctatagactccacctctgtggtcagggcatagttgaaaaaaaggcagcagacaacttctgcagacttaaacgtccctgtctgatagctctgaagagagcagtggttctcccagcatggcatctgagctttgagaacggacagaatgcctcctcacatgggtccctgacccccatgtagcctaactgggagacacctcccagtaagggccaacagacacatcatataggtgggtgcctctctgagacgaagcttccagaggaaggatcaggcagcaatatttgctgttctgcagcctccactgttgatacccagtcaaatggtcagaagtggacctccagcaaactccaacagacctgcagctgaagaacttgactgttagaaggaaaactaacaaacagaaaggaatagcatcaatatcaacaaaaaggtcatctacaccaaaaccccatttgtaggtcaccaacatcaaagaccaaaggtagataaaaccacaaagatggggagaaaccagagcagaaaagctgaaaattctaaaaaccagagcacctcttctcctctaaaggatcacagctccttgccagcaatggaacaaagctggatggagaatgactttgatgagttggcataagtaggcttcagaaggtcagtaataacaaacttctccgagttaaaggagcatgttctaacccatcacaaggaagctaaaaaccttgaaaaaaggttagacgaatggctatctagaataaatagtgtggagaggaccttaaatgacctgatggagctgaaaaccatggcacaagaactttgtgatgcatgcccaagcttcagtagctgattcgatcaagtggaagaaagggtatcagtgattgaatatcaaattaatgaaataaaacaagaagacaaggttagagaaaaaagagtgaaaagaaatgaacaaagcctccaagaagtatgggactatgtgaaaagaccaaatctacatttgataggtttacctaaaagtgatggggtaattgaaccaagttggaaaacactcttcaggatattatccagaacttccccaacctagcaagacaggccaacatcgagattcaggaaatacagaaaatgccacaaagatactcctcaacaagagcaaccccaaggcaaataattgtcagattcaccaaagttgaaatgaaggaaaaaatattaagggcagcccaagagaaaggtcgggttacccacaaagggaagcccatcaggctaacagtggatctctcagcagaaagcctataagccagaagacagtgaaggccaatattcaagattcttaaagaattttcaacccagaatttcatatccagccaaactaagcttcataagaaagagaaataaaatcctttacagacaagcaaatgctgggagattttgtcaacaccaggcctgccttacatgagctcctgaaggaagcactaaacatggaaagaaacaactggtaccagccactgcgaaaacatgccaaattgtaaagaccattgatgctatgaagaaactgcgtcagttaacaggcaaaatcaccagctaacatcataatgacaggatcaaattcacacataagaatattaactttaaacgtaaatgggctaaatgccccaattaaaagacacagactggcaaattggataaagagtcaagacccatcagtgtgctgtattcaggagactcatctcaagtgcagaggcacacataggctcaaaataaagggatggaggaagatctaccaagcaaatggaaagcaaaaaaaaagcaggggttgcaatcctagtctctgataaaacagactttaagccaacgaagatcaaaagagacaaagaaggccattacataatggtaaagtgatcaattcaacaaaaagagctaactatcctaaatatatatacacccaatacaggagcacccaggttcacaaggcaagtccttggagacctacaaggagatttagactcccacacaataataatgggagacttaacaccccactgtcaatattagacagatcaaagagacagaaggttaacaaggatatccaggacttgaactcagctctgcaccaagcagacctaatagacatctacagaactctccaccacaaatcaatggaatatatattcttctcagcaccacatcacacttattctaaaattgaccacataattggaagtaaagcactcctcagcaaatgtaaaaaacagaaatcacagcaaactgtctctcagaccacaatgcaatcaaattagaactcaggattaagaaactcactcaaaaccgcacaactacatggaaactgaacaacctgcttctgaatgactactgggtaattaacgaaatgaaggcagaaataaagatgttctttgaaaccaatgagaacaaagacacaacttaccagaatctctgggacacatttaaagcagtatgtagagggaaatttatagcactaaatgcccacaagagaaagcaggaagatccaaaaaccaacaccctaacatcacaattaaaagaactagagaagcaagagcaaacaaattcaaaaactagcagaaggcacgaaataactaagagcagtgcagaactgaaagagatagagacacaaaaaaacccttcaaaaaattaatgaatccaggagctggttttttgaaaagatcaacaaaattgatagactgctagcaagactaataaattagaaaagagagaagagtcaaatagatgcaataaaaaatgataaaggggatatcaccaccaaacccacagaaatacaaactgccatcagagaatactataaacacttctacgcaaataaactagaaaatctacaagaaattgataaattcctggatgcatacatcctcccaagacaaaccaggaagaagttgaatctctgaatagaccaataccaggctctgaaattgaagcaataattaatagcctaccaaccaaaaaaagtacaggaccagatggattcatagccaaattctaccagaggtacaaagaggagctggtaccattccttctgaaaatatcccaatcaaaagaaaaagatggaatcctccctaactcattttatgaggccagcatcatcctgataccaaagcctggcagagacacaacaaaaaaagagaattttagaccaatatccctgatgaacatcagtgcaaaaatcctcaataaaatactggcaaaccgaatccagtagcacatcaaaaagcttatccaccacgatcaagtcagcttcatccctgggatgcaaggctggttcaacatatgcaaatcaataaacgtaatccatcacataaacagaatcaatgacaaaaaccacatgattatctcaatagatgcagaaaaggcctttgacaaaattctacagcccttcatgctaaaaactctcaataaactaggtattgatggaacatatctcaaaataataagatctatttatgacaaattcacagccaatatcatactgaatgggcaaaaactggaagcattccctttgaaaaccagcacaagacacagatgccatctgtcaccactcctattcaacatagtgttggaagttctggccagggcaatcaggcaagagaaagaaataaagggtattcaattaggaaaagaggaagtcaaattgtccctgtttgcagatgacatgattgtatatttagaaaaccccattgccgccaccccaaatctccttaagctgataagcaacttcagcaaaatctcaggatacaaaatcaatgtgcaaaaatcacaagcattcctatacaccaataacagacaaacagagagccaaatcatgagtgaactcccattcacaattgcttcaaagagaataaaatacctaggaatccaacttacaagggatgtgaaggacctcttcaaagagaactacacaccactgcacaatgaaatgaaagaagacacaaacaaatggaagaacattccatgctcatagataggaagaatcaatattgtgaaaatggctatactgcccaaggtaatttatagattcagtgccatccccatcaagctaccaatgactttcttcacagaattggaaaaagctactttaaagttcatgtggaaacaaaaaagagcctacattgccaagacaatcttaagcaaaaagaacaaagctggaggcatcacgctacctgatttcaaactatactacaaggctacagtaaccaaaacagcatggtactagtaccaaaacagatacatagaccaatggaacagaacagaggcctcagaaacaacaccacacatctacaaccatctgatctttgacaaacctgacaaaaacaagcaatggagaaaggattccctatttaataaatggtgctgggaaaactggctagccatatgtagaaagctgaaactggacccttccttacaccttatacaaaaattaattcaagatggattaaagacttaaacgttagacctaaaactgtaaaaactctagaagaaaaccttagcaatactattcaggacataggcatgggcaaggacttcatgactaaaacactaaaagcaatggcaacaaaagccaaaatagacaaatgggatctaatgaaactaaagagcttctgcacagcgaaagaaactaccatcagaatgaacaggcaacctacagaatgggagaagatttttgcaatctacccatctgacaaagggctagtattcagaatctacgaagaactcaaacaaatttagaagcaaaaacaatcccatcaaaaagtgggcaaaggatatgaacagacacttctcaaaagaagacatttatgcagccaacagacacatgaaaaaatgctcatcatcactggtgatcagagaaatgcaaattaaaactacaatgagataccatctcatgccagttaaaatggccatcattataaagtcaggaaacagcaggttctggagaggatgtggagaaataggaacgcttttacactgtttgtggaagtgtaaattagttcaaccattgtgaaaaaccatgtggtgactcctcaaggatctagaactagaaataccatttgacctagcaatcccgttactgggtatatacccaaaggattataaatcatgctactataaagacacatgcacacatatgtttattgcggcactattcacaacagcagagtcttggaaccaacccaaatgtccatcaatgatagactggattaagaaaatgtggcacatatacaccatggaatactatgcagccataaaaaaggataagttaatgtcctttgcagggacatggatgaagctggaaaccatcattctcagcaaactatcacaaagacagaaaaccatacaccacctgttctcactcataggtgggaattgaataacaagaacacttggacacggcagggaacatcacacgctggggcctgtccaggggtgaggggctgggggagggatagcattaggagaaatacctaatgtaaatgatgagttgatgggtgcagcaaagcaacatggcacatgtatacctatgtaccaaacctgcacgttgtgcacatgtaccctagaatttaaactaaaataaaaaaatttaaaaaa

SEQ ID NO: 596 - DNA, 6031 bp, Homo sapiens
  source 1..6031: mol_type = other DNA
agggaggagccaagatggccgaataggaacagctccggtctacagctcccagcgtgagcgacgcagaagacgggtgatttctgcatttccatctgaggtaccaggttcatctcactagggagtgccagacagtgggcgcaggccagtgtgtgcgcgcaccgtgcgcgagccgaagcagggcgaggcattgcctcacctgggaagcgcaaggggtcagggagttccctttccgagtcaaagaaaggggtgacggacgcacctggaaaatcgggtcactcccacccgaatattgcgcttttcagaccggcttaagaaacggcgcaccacgagactatatcccacacctggctcagagggtcctacgcccacggaatctcgctgattgctagcacagcagtctgagatcaaactgcaaggcggcaacgaggctgggggaggggcgcccgccatagcccaggcttgcttaggtaaacaaagcagccaggaagctcgaactgggtggagcccaccacagctcaaggaggcctgcctgcctctgtaggctccacctctgggggcagggcacagacaaacaaaaagacagcagtaacctctgcagacttaagtgtccctgtctgacagctttgaagagagcagtggttctcccagcacgcagctggagatctgagaacgggcagactgcctcctcaagtgggtccctgacccctgacccccgagcagcctaactgggaggcaccccccagcaggggcacactgacacctcacacggcagggtattccaacagacctgcagctgagggtcctgtctgttagaaggaaaactaacaaccagaaaggacatctacaccgaaaacccatctgtacatcaccatcatcaaagaccaaaagtagataaagccacaaagatggggaaaaaacagaacagaaaaactggaaactctaaaacgcagagtgcctctcctcctccaaaggaacgcagttcctcaccagcaacagaacaaagctggatggagaatgattttgacaagctgagagaagaaggcttcagacgatcaaattactctgagctacgggaggacattcaaaccaaaggcaaagaagttgaaaactttgaaaaaaatttagaagaatgtataactagaataaccaatacagagaagtgcttaaaggagctgatggagctgaaaaccaaggctcgagaactacgtgaagaatgcagaagcctcaggagccgatgcgatcaactggaagaaagggtatcagcaatggaagatgaaatgaatgaaatgaagcgagaagggaagtttagagaaaaaagaataaaaagaaatgagcaaaacctccaagaaatatgggtctatgtgaaaagaccaaatctacgtctgattggtgtacctgaaagagatgtggagaatggaaccaagttggaaaacactctgcaggatattatccaggagaacttccccaatctagcaaggcaggccaacgttcagattcaggaaatacagagaacgccacaaagatactcctcgagaagagcaactccaagacacataattgtcagattcaccaaagttgaaatgaaggaaaaaatgttaagggcagccagagagaaaggtcgggttaccctcaaaggaaagcccatcagactaacagcggatctctcggcagaaaccctacaagccagaagagagtgggggccaatattcaacattcttaaagaaaagaattttcaacccagaatttcatatccagccaaactaagcttcataagtgaaggagaaataaaatactttatagacaagcaaatgctgagagattttgtcaccaccaggcctgccctaaaagagctcctgaaggaagcgctaaacatggaaaggaacaaccggtaccagccactgcaaaatcatgccaaaatgtaaagaccatcgagactaggaagaaactgcatcaactaatgagcaaaatcaccagctaacatcataatgacaggatcaaattcacacataacaatattaactttaaatataaatggactaaattctgcaattaaaagacacagactggcaagttggataaagagtcaagacccatcagtgtgctgtattcaggaaacccatctcacgtgcagagacacacataggctcaaaataaaaggatggaggaagatctaccaagccaatggaaaacaaaaaaaggcaggggttgcaatcctagtctctgataaaacagactttaaaccaacaaagatcaaaagagacaaagaaggccattacataatggtaaagggatcaattcaacaagaggagctaactatcctaaatatttatgcacccaatacaggagcacccagattcataaagcaagtcctcagtgacctacaaagagacttagactcccacacattaataatgggagactttaacaccccactgtcaacattagacagatcaacgagacagaaagtcaacaaggatacccaggaattgaactcagctctgcaccaagcagacctaatagacatctacagaactctccaccccaaatcaacagaatatacatttttttcagcaccacaccacacctattccaaaattgaccacatagttggaagaaaagctctcctcagcaaatgtaaaagaacagaaattataacaaactatctctcagaccacagtgcaatcaaactagaactcaggattaagaatctcactcaaagccgctcaactacatggaaactgaacaacctgctcctgaatgactactgggtacataacgaaatgaaggcagaaataaagatgttctttgaaaccaacgagaacaaagacaccacataccagaatctctgggacgcattcaaagcagtgtgtagagggaaatttatagcactaaatgcctacaagagaaagcaggaaagatccaaaattgacaccctaacatcacaattaaaagaactagaaaagcaagagcaaacacattcaaaagctagcagaaggcaagaaataactaaaatcagagcagaactgaaggaaatagagacacaaaaaacccttcaaaaaatcaatgaatccaggagctggtttttcgaaaggatcaacaaaattgatagaccgctagcaagactaataaagaaaaaaagagagaagaatcaaatagacacaataaaaaatgataaaggggatatcaccaccgatcccacagaaatacaaactaccatcagagaatactacaaacacctctacgcaaataaactagaaaatctagaagaaatggatacattcctcgacacatacactctcccaagactaaaccaggaagaagttgaatctctgaatagaccaataacaggctctgaaattgtggcaataatcaatagtttaccaaccaaaaagagtccaggaccagatggattcacagccgaattctaccagaggtacaaggaggaactggtaccattccttctgaaactattccaatcaatagaaaaagagggaatcctccctaactcattttatgaggccagcatcattctgataccaaagccgggcagagacacaaccaaaaaagagaattttagaccaatatccttgatgaacattgatgcaaaaatcctcaataaaatactggcaaaccgaatccagcagcacatcaaaaagcttatccaccatgatcaagtgggcttcatccctgggatgcaaggctggttcaatatacgcaaatcaataaatgtaatccagcatataaacagagccaaagacaaaaaccacatgattatctcaatagatgcagaaatggcctttgacaaaattcaacaacccttcatgctaaaaactctcaataaattaggtattgatgggacgtatttcaaaataataagagctatctatgacaaacccacagccaatatcatactgaatgggcaaaaactggaagcattccctttgaaaactggcacaagacagggatgccctctctcaccgctcctattcaacatagtgttggaagttctggccagggcaatcaggcaggagaaggaaataaagggtattcaattaggaaaagaggaagtcaaattgtccctgtttgcagacgacatgattgtttatctagaaaaccccatcgtctcagcccaaaatctccttaagctgataagcaacttcagcaaagtctcaggatacaaaatcaatgtacaaaaatcacaagcattcttatacaccaacaacagacaaacagagagccaaatcatgggtgaactcccattcacaattgcttcaaagagaataaaatacctaggaatccaaattacaagggatgtgaaggacctcttcaaggagaactacaaaccactgctcaaggaaataaaagaggacacaaacaaatggaagaacattccatgctcatgggtaggaagaatcaatatcgtgaaaatggccatactgcccaaggtaatttacagattcaatgccatccccatcaagctaccaatgactttcttcacagaattggaaaaaactactttaaagttcatatggaaccaaaaaagagcccgcattgccaagtcaatcctaagccaaaagaacaaagctggaggcatcacactacctgacttcaaactatactacaaggctacagtaaccaaaacagcatggtactggtaccaaaacagagatatagatcaatggaacagaacagagccctcagaaataatgccgcatatctacaactatctgatctttgacaaacctgacaaaaacaagcaatggggaaaggattccctatttaataaatggtgctgggaaaactggctagccatatgtagaaagctgaaactggatcccttccttacaccttatacaaaaatcaattcaagatggattaaagatttaaacgttaaacctaaaaccataaaaaccctagaagaaaacctaggcattaccattcaggacataggcgtgggcaaggacttcatgtccaaaacaccaaaagcaatggcaacaaaagacaaaattgacaaatgggatctaattaaactaaagagcttctgcacagcaaaagaaactaccatcagagtgaacaggcaacctacaacatgggagaaaattttcgcaacctactcatctgacaaagggctaatatccagaatctacaatgaactcaaacaaatttacaagaaaaaaacaaacaaccccatcaaaaagtgggcgaaggacatgaacagacacttctcaaaagaagacatttatgcagccaaaaaacacatgaagaaatgctcatcatcactggccatcagagaaatgcaaatcaaaaccactatgagatatcatctcacaccagttagaatggcaatcattaaaaagtcaggaaacaacaggtgctggagaggatgcggagaaataggaacacttttacactgttggtgggactgtaaactagttcaaccattgtggaagtcagtgtggcgattcctcagggatctagaactagaaataccatttgacccagccatcccattactgggtatatacccaaatgagtataaatcatgctgctataaagacacatgcacacgtatgtttattgaggcactattcacaatagcaaagacttggaaccaacccaaatgtccaacaatgatagactggattaagaaaatgtggcacatatacaccatggaatactatgcagccataaaaaatgatgagttcatatcctttgtagggacatggatgaaattggaaaccatcattctcagtaaactatcgcaagaacaaaaaaccaaacaccgcatattctcactcataggtgggaattgaacaatgagatcacatggacacaggaaggggaatatcacactctggggactgtggtggggtcgggggaggggggagggatagcattgggagatatacctaatgctagatgacacattagtgggtgcagcgcaccagcatggcacatgtatacatatgtaactaacctgcacaatgtgcacatgtaccctaaaacttagagtataataaaaaaaaaaaaa

SEQ ID NO: 597 - DNA, 299 bp, Homo sapiens
  source 1..299: mol_type = other DNA
gctgggcacagtggctcacacctgtaatcccagcacttggggaagctgaggtgggcagatcagttgaggtcaggagttctagaccagcctggtcaacatggcgaaaccccatctctactaaaaatacaaaaattagctgggcgtggtggcacacacctgtaatcccagttacttgggaggctgaggcacaagaatcgcttgaacccgggaggcggaggttgcagttagccaagatcgccctgctgcactccagcctgggcaacagagggagactctgtctccaaaaacaaaaacaaaaa

SEQ ID NO: 598 - DNA, 6444 bp, Homo sapiens
  source 1..6444: mol_type = other DNA
gcaagacggccaaacaggaacagctccggtctgcagctctcagagagaccagcgcagaaggtgtgtgatttctgcaactgaggtacttggttcatctcaatgggactagttagacagtgggcgcagcccatggaggtcgagcagaagcagggtggggtgtcgcctcacccaggaagcacgaggggtcagggaactccttcccctagccaagggaagccctgagggactgtgccgtgagagacggagctatctggcccacatactacgcttttcccatggtcttcacaacctgtagaccaggaggttgcctcgggtgcctataccacaaaggccctgggtttcaagcacaaaactggatggtcgtttgggcagacactgaactagctgcaggagttttttttttcataccccagtggcacctggaaggccagtgagacagaaccattcactcccctggaaaggggggctgaagccagggagccaagtggtctagctcagtggatcccacccccacagaatccagcaagctaagatccgctggcttgaaacacttgctgccagcacagcagtctgaaatcaacctgggatgctcgagcttggtggggggaggggtgtctgccattactgaggcttgggtaggtggctttcccctcacagtgtaaacaaagctgccaggcagtttggactgggcagagcccaccacagtgccaaaaagccactgtagcaagactgcctctctagattcctcctctctagccagggcatctctgaaagaaaggcagcagccccagtcaggggcttataaataaaactcccatctccctgcaacggagcacctggggaaagggggggatgtgggtacagcttcagccgacttaaacgttcctgcctgccagctctgaggagggcagcagatctcccagcatagtgctcgagctctgccaagggacagactgcctcctcaagtgggtccctgacccccgtgccacctaacagggagatacctcccagcaggggacgacacacacctcatacaggagagctctggctggcatctggtgggtgtccatctgggacaaagcttccagagaaaggagcagtcagcaatctttactgtcctgcaaccttcgctgatgatacccaggcaaagagggtctggagtagacctccagcaaactccagcagacctgcagaagagggacctgactgtcagaaggaaaactaacaaacagaaaggaatagcctcaacatcaacaaaaaggacaaccaagcaaaaactccatctgaaggtcaccaacagcaaagaccaaaggtagataatccacaaagatgaggaaaacaacagtgaaaaaaggctgaatgtcccaaataccagaacacttcttctccaccaaaggatcataactcctcgccagcaagggaacaaaactggacggagaatgagtttgatgaaatgacagaagtaggcttcagaaggtgggtaatagcaaactcctccgacctaagggagcatgttctaacccaatgaaaggaagctaagaaccttgataaaaggttagaggaattgctaactagaataaccagtttagagaagaacagaaatgacctgatggagctgaaaaacacagcacgagaacttcatgaagcatacacaagtatcagtagccaaattgatcaagtggaagaaaggatatcagagattgaagatcaatttaatgaaataaagcgtgaagacaagattagagaaaaaataataaaaaagaatgaacaaagcctccaagaaatatgggaccatgtgaaaacgccaaacctacaattgattggtgtatctgaaagtgatggggagaatggaaccaagatggaaaacacacttcagtatattatccaggagaacttccccaacctagcaagacaggccaacatcaaattcaggaaatacaaagaacactgcagagatactccttaagaagagcaataatcgttagattcaccaagattgaaatgaaggaaaaaatgttaagggcagccagagataaaggttgggttacccacaaagggaaacccatcagacacagcagatctctctgtagaaaccttgcaagccagaagagagcgggggaaaatattcaacattcttaaaggaaagaattttcaacccagaatttcatagccagccaaactaagcttcataagcaaagaagaaataaaatcctttgcagacaagcaaatgctgagggattttgtcatcaccaggcctgccttaaagagctcctgatggaagcgctaaatgtagcaaggaaaaaccggtaccagacactgcaaaaacaagccaaatgtaaagaccatcgacactatgaagaaactgcatcaactaatggccaaaataaccaggtaacatcataatgatggaaatcaaattcacatgtaacaatacgaaccttaagtgtaaatgggctaaatgccccaattaaaaggcacagactggcaaattggttaaaagagtcaagacccgctggtgtgctgcattcaggagacccatctcgtgtgcaaagacacacatgggctcaaaataaagggatggaggaagatttaccaagcaaatggaaagcaaaaaaaaaaaaaaaaaaaaaaaaaaaaaagcagggatggcaatcctagtctctgataaaacagactttaaaccaacaaagatcaaaaaagacaaagaaggacattacgtaatggtaaagagatcaatgcaacaagaagagctaactatcctaaatatatatgcacccaatacaggagcactcagatttataaagcaggttcttagagacctacaaagagacttagactcccacacaataatagtgggagactttaccaccccattgtcaaataagaccgatcaaggagacagaaaattaacaaggatattcaggacttgaactcagctctggaccaagcagacccaatatacatctatagaactctccaccccaaatcaactgaatatacattcttctcagcaccacatagcacttattctaaaattgaccacataatcggaagtaaaacactcctcagcaaatgcaaaagaacacaaatcataacagtctctcagaccacagtgcaatcagattagaactcaggattaagaaactcactcaaaactgcataactacagggaaaccaaacaacctgctcctaaatgactactgggtaaataacaaaattaaggcagaaatcaataagttctttgaaactaatgagaacaaagacacaatgtaccagaatctctgagacacagctaaagcagtgtttagagggaaatttatagcactaaatgcccacaggacaaagtgggaaagatctaaaattgacatcctaacatcacaattaaaagaactagagaagcaagagcaaacaaattcaaaagctagcagaagacaagaaataactaagatcagagcagaaatgaaggagagagagacatgaaacacccttcaaaaaaatcagtgaatccaggagctagtttgtttgaaaagattaacaaaatacatagaccactagccagaccaataaagaagagagaagaatcaaatagacacaataaaaattgataaaagggagatcaccactgatcccacagaaatacagactgccatcagagaatactataaaacacctctacacaaataaactagacaatctagaagaaatggatacatttctggaaacatacaccctcccaagactaaatcaggaagaagtcgaatccctgaatagatcaataacaagttctgaaattgaggcagtaattaataggctaccaaccaaaaaaaacccaggatcagatggattcatagccaacttataccagaagtacaaagaggagctgttactattccttctgaaactattccaaacaataaaaaaagagggactcctcactaactcattttatgaggccagcatcatcctgataacaaaacctggcagagacacaactaaacaagaacatttcagcccaatatccctgatgaacatcaatgcgaaaatcctcaataaatactggcaaaccaaatccagcagcacatcaaaaacttatcgactatgatcaagttggcttcatcctttggatgcaaggctggttcaacatatgcaaatcaataaatgtaatccatcacataaaaccaatgacaaaaaacacatgattatctcaatggatgcagaaaaggcctttgataaaattcaaaaccccttcatgctaaaagcactcaataaactaggtattgatgaaacatatctcaaaataataagagctatttatggcaaacccacagccagtatcacactgaatgggcaaaagctggaagtattccatttgaaaactggcacaagaaaaggatgccctctctcaccactcctatttaacatagtattagaagttctggccagagcagtcaggcaagataaagaaataaagggtattcacttaagaatagaggaagtcaaattatctctgtttgcagatgacataattctatatttagaaaacaccatcgtcaggcccaaaatctccttaagatgataagcaacttcagcaaagtctcaggatacaaaattaatgtggaaaaatcacaagcattcctatacaccaataatagacagacacagagccaaatcttgagcaaactcccattcacaattgctataaagagaataaaatacctaggaataaagcttacaaggatgtgaaggacctcttcaaggagaactacaaaccactgctcaaggaaataggagaggacacacacaaatggaaaaacattccatgctgatggataggaagaaacaatatcatgaaaatggccatactgcccaatgtaatttatagattcaatgctactctcatcaagctaccactgactttcttcacagaattaggaaaaagctactttaaatttcatacagaaccaaaaaagatcctgtatagcctaagcaaaaagagcaaagctggaggcatcatgctacctgatttcaaactatactacaaggctacattaaccaaaatgttatggtactggtaccaaaacagatacatagaccaatggaacagaacagaggcctcagaaataatgccacacatctacaaccacctgatctttgacaaatgtgacaaaaacaagcaatggggaaaggatttcctatttaataaatggtgttgggaaaactcgctagccatatgcagaaaactgaaactggaccccttcgttacactgtatacaaaaattaatgcaagatggattaaagatttaaacataatacctaaaaccataaaaaccctagaagaaaacctaggcaataccattcaggacataggcatgggcaaagacttcatgactaaaacaccaaaagcaatggcaacaaaagccaaaattgacaaatgacaaatgtgatctaatgaaactaaagagcttctgcacagcaaaagaaactgtcatcagagtgaacaggcaacctacagaatgggagaaaatttttgctatctatccatctgacaaagggctaatatccagagtctacaaggaacttaaacaaattcacaagaaaaaacaatcccaccaaaaagtgggcaaaggatatgaacagacacttctcaaagtaagacatttatgtggccaacaaacatatgaagaaaagctcctcatcactggtcattagagaaaagcaaatcaaaaccacaatgagataccatctcatgccagttagaatggtgatcattaaaaagtcaggaaacaatagatgctggagaggacatagagaaataggaatgcttttacactgttggtgggaatgtaaattagttcaaccattgtgaaagacagtatggcgattcctcaatgatctagaaccaggaataccatttggcccagcaatcccattactgggtatatacccaaaggattataaatcattctaccataaagacacatgcacttgtatgtttattgcagcactcttcacaatagcaaagacttggaaccaaccaaaatgcccatcaatgttagactggataaagaaaatttggcatacatacaccatggaatattatgcagctataaaaaagaacgagttcatgtcctttgcagggtcatggataaagctggaaaccatcattctcagcaaactaacacaggaacagaaaaccaaacaccacacattctcactgataagtgagagttgaacaatgagaacatgggcacagggcagggaacatcacacaccggggcctgttggggaggttgggggcaaggagagggataccattaggagaaatacctaatgtagatgactgtttgatgggtgcagcaaaccaccgtggcccatatatacctatgtaacaaacctgcatgttctgcccaggtatcccaaaacttaaagtataattaaaaaaaa

SEQ ID NO: 599 - DNA, 6030 bp, Homo sapiens
  source 1..6030: mol_type = other DNA
ggggaggagccaagatggccgaataggaacagctccggtctacagctcccagcgtgaccgacgcagaagacggtgatttctgcatttccatctgaggtaccgggttcatctcactagggagtgccagacagtgggcgcaggccagtgggtgcgcgcaccgtgcgtgagccaaagcagggcgaggcattgcctcacctgggaagcgcgaggggtcagggagttccctttccgagtcaaagaaaggggtgatggacgcacctggaaaatcgggtcactcccacccgaatattgcgcttttcagaccggcttaaaaagcggcgaaccatgagattacatcccacacctggctcggagggtcctacgcccacggagtctcactgattgctagcacagcagtctgagatcaaactgcaaggcagcagcgaggctgggggaggggcgcccgccattgcccaggcttgcttaggtaaacaaagcagccaggaagctcgaactgggtagagcccaccacagctcaaggaggcctgcctgcctctgtaggctccacctctgggggcagggcacagacaaacaaaaagacagcagtaacctctgcagacttaagtgtccctgtctgacagctttgaagagagcagtggttctcccagcacgcagctggagatctgagaacccgccgactgcctcctcaagtgggtccctgactcctgacccccaagcagcctaactgggaggcaccccccagcaggggcatactgacacctcacacggcagggtactccaacagacctgcagctgagggtcctgtctgttagaaggaaaactaacaaccagaaaggacatctacaccgaaaacccatctgtacatcaccatcatcaaagaccaaaagtagataaaaccacaaagatggggaaaaaacagaacagaaaaactggaaactctaaaacgcagagcgcctctcctcctccaaaggaacgcagttcctcaccagcaacagaacaaagctggatggagaatgattttgacgagctgagagaagaaggcttcagacgatcaaattactctgagctacgggaggacattcaaaccaaaggcaaagaagttgaaaactttgaaaaaaatttagaagaatgtataactagaataaccaatccagagaagtgcttaaaggagctgatggagctgaaaaccaaggctcgagaactacgtgaagaatgcagaagcctcaggagccgatgtgatcaactggaagaaagggtatcagcaatggaagatgaaatgaatgaaatgaagcgagaagggaagtttagagaaaaaagaataaaaagaaatgagcaaagcctccaagaactatgggactatgtgaaaagaccaaatctatgtctgattggtgtacctgaaagtgatgtggagaatggaaccaagttggaaaacactctgcaggatattatccaggagaacttccccaatctagcaaggcaggccaacgttcagattcaggaaatacagagaacgccacaaagatactcctcgagaagagcaactccaagacacataattgtcagattcaccaaagttgaaatgaaggaaaaaatgttaagggcagccagagagaaaggtcgggttaccctcaaagggaagcccatcagactaacagcggatctctcggcagaaaccctacaagccagaagagagtgggggccaatattcaacattcttaaagaaaagaattttcaacccagaatttcatatccagccaaactaagcttcataagtgaaggagaaataaaatactttatagacaagcaaatgttgagagattttgtcaccaccaggcctgccctaaaagagctcctgaaggaagcgctaaacatggaaaagaacaaccggtaccagccgctgcaaaatcatgccaaaatgtaaagaccatcgagactaggaagaaactgcatcaactaatgagcaaaatcaccagctaacatcataatgacaggatcaaattcacacataacaatattaactttaaatataaatggactaaattctgcaattaaaagacacagactggcaagttggataaagagtcaagacccatcagtgtgctgtattcaggaaacccatctcacgtgcagagacacacataggctcaaaataaaaggatggaggaagatctaccaagccaatggaaaacaaaaaaaggcaggggttgcaatcctagtctctgataaaacagacttgaaaccaacaaagatcaaaagagacaaagaaggccattacataatggtaaagggatcaattcaacaagaggagctaactatcctaaatatttatgcacccaatacaggagcacccagattcataaagcaagtcctcagtgacttacaaagagacttagactcccacacattaataatgggagactttaacaccccactgtcaacattagacagatcaacgagacagaaagtcaacaaggatacccaggaattgaactcagctctgcaccaagcagacctaatagacatctacagaactctccaccccaaatcaacagaatatacatttttttcagcaccacaccacacctattccaaaattgaccacatagttggaagtaaagctctcctcagcaaatgtaaaagaacagaaattataacaaactatctctcagaccacagtgcaatcaaactagaactcaggattaagaatctcactcaaagccgctcaactacatggaaactgaacaacctgctcctgaatgactactgggtacataacgaaatgaaggcagaaataaagatgttctttgaaaccaacgagaacaaagacaccacataccagaatctctgggacgcattcaaagcagtgtgtagagggaaatttatagcactaaatgcctacaagagaaagcaggaaagatccaaaattgacaccctaacattacaattaaaagaactagaaaagcaagagcaaacacattcaaaagctagcagaaggcaagaaataactaaaatcagagcagaactgaaggaaatagagacacaaaaaaacccttcaaaaaatcaatgaatccaggagctggttttttgaaaggatcaacaaaattgatagaccgctagcaagactaataaagaaaaaaagagagaagaatcaaatagagacaataaaaaatgataaaggggatatcaccaccgatcccacagaaatacaaactaccatcagagaatactacaaacacctctacgcaaataaactagaaaatctagaagaaatggatacattcctcgacacatacactctcccaagactaaaccaggaagaagttgaatctctgaatagaccaataacaggctctgaaattgtgacaataatcaatagtttaccaaccaaaaagagtccaggaccagatggattcacagccgaattctaccagaggtacatggaggaactggtaccattccttcggaaactattccaatcaatagaaaaagagggaatcctccctaactcattttatgaggccagcatcattctgataccaaagccgggcagagacacaaccaaaaaagagaattttagaccaatatccttgatgaacattgatgcaaaaatcctcaataaaatactggcaaaccgaatccagcagcacatcaaaaagcttatccaccatgatcaagtgggcttcatccctgggatgcaaggctggttcaatatacgcaaatcaataaatgtaatccagcatataaacagagccaaagacaaaaaccacatgattatctcaatagatgcagaaaaggcctttgacaaaattcaacaacccttcatgctaaaaactctcaataaattaggtattgatgggacgtatttcaaaataataagagctatctatgacaaacccacagccaatatcatactgaatgggcaaaaactggaagcattccctttgaaaaccggcacaagacagggatgccctctctcaccgctcctattcaacatagtgttggaagttctggccagggcaatcaggcaggagaaggaaataaagggtattcaattaggaaaagaggaagtcacattgtccctgtttgcagacgacatgattgtttatctagaaaaccccatcgtctcagcccaaaatctccttaagctgataagcaacttcagcaaagtctcaggatacaaaatcaatgtacaaaaatcacaagcattcttatacaccaacaacagacaaacagagagccaaatcatgggtgaactcccattcacaattgcttcaaagagaataaaatacctaggaatccaacttacaagggatgtgaaggacctcttcaaggagaactacaaaccactgctcaaggaaataaaagaggagacaaacaaatggaagaacattccatgctcatgggtaggaagaatcaatatcgtgaaaatggccatactgcccaaggtaatttacagattcaatgccatccccatcaagctaccaatgactttcttcacagaattggaaaaaactactttaaagttcatatggaaccaaaaaagagcccgcattgccaagtcaatcctaagccaaaagaacaaagctggaggcatcacactacctgacttcaaactatactacaaggctacagtaaccaaaacagcatggtactggtaccaaaacagagatatagatcaatggaacagaacagagccctcagaaataatgccgcatatctacaactatctgatctttgacaaacctgagaaaaacaagcaatggggaaaggattccctatttaataaatggtgctgggaaaactggctagccatatgtagaaagctgaaactggatcccttccttacaccttatacaaaaatcaattcaagatggattaaagatttaaacgttaaacctaaaaccataaaaaccctagaagaaaacctaggcattaccattcaggacataggcgtgggcaaggacttcatgtccaaaacaccaaaagcaatggcaacaaaagacaaaattgacaaatgggatctaattaaactaaagagcttctgcacagcaaaagaaactaccatcagagtgaacaggcaacctacaacatgggagaaaattttcgcaacctactcatctgacaaagggctaatatccagaatctacaatgaactcaaacaaatttacaagaaaaaaacaaacaaccccatcaaaaagtgggcgaaggacatgaacagacacttctcaaaagaagacatttatgcagccaaaaaacacatgaagaaatgctcatcatcactggccatcagagaaatgcaaatcaaaaccactatgagatatcatctcacaccagttagaatggcaatcattaaaaagtcaggaaacaacaggtgctggagaggatgcggagaaataggaacacttttacactgttggtgggactgtaaactagttcaacgattgtggaagtcagtgtggcgattcctcagggatctagaactagaaataccatttgacccagccatcccattactgggtatatacccaaaggactataaatcatgctgctataaagacacatgcacacgtatgtttattgcggcactattcacaatagcaaagacttggaaccaacccaaatgtccaacaatgatagactggattaagaaaatgtggcacatatacaccatggaatactatgcagccataaaaaatgatgagttcatatcctttgtagggacatggatgaagttggaaaccatcattctcagtaaactatcgcaagaacaaaaaaccaaacaccgcatattctcactcataggtgggaattgaacaatgagatcacatggacacaggaaggggaatatcacactctggggactgtggtggggtcgggggaggggggagggatagcattgggagatatacctaatgctagatgacacattagtgggtgcagcgcaccagcatggcacatgtatacatatgtaactaacctgcacaatgtgcacatgtaccctaaaacttagagtataataaaaaaaaaaaa

SEQ ID NO: 600 - DNA, 297 bp, Homo sapiens
  source 1..297: mol_type = other DNA
ggtcgggtatagtggctcacacctgtaatcccagcactttgggaggccaaggcgggtggatcacctgaggtcaggagttcaagactagcctagccaacttggtgaaaccccatgtctaccaaaaatacaaaaattagccaggtatggtggtgtgtgcctgtaatcccagctactagggaggctgagccacgagaatcgcttgaacctgtgaggtggaggttgcagtgagccgagatcgcaccactgcagtccagcctgggcgacagagtaagactccatctcaagagaaaaaaaaaa

SEQ ID NO: 601 - DNA, 6100 bp, Homo sapiens
  source 1..6100: mol_type = other DNA
gaacagctccagtctgcagctcccagcgtgatcgacgcagaagacaggtgatttctgcatttccgactgaggtaactgattcatctcactgggactggtttgacagtgggtgcagcccacggatggggagctgaagcagggcagggcgtcacctcaccctggaagtgcaaggggtcaggggatttccctttcctagccaagggaagccgtgacagactacctggaaaaatgggacactcctgcccaaatactgcacttttcccaagatcttagccaccggcagacaaggagattctctcccatgcctggctcggcgggttccacacccacggagccttgctcactgctagtgcagcagtctgagatcgaactgtgaggcggcagcctggctgggggaggggcgtccgctgttgctgaggcttgagtaggtaaacaaagcagccgggaagttcgaactgggcagagcccactgcagctcagtaaggcctactgcctctagactccatctctgtggccagggcatagctgaacaaaaggcagcagacaacttttgcagacttaaaggtccctgtctgacagctctgaagagagcattggttctctcagcacggtgtttgagctctgagaacggacagactgcctccttaagtgggtccctcacccccatgtagcctaactaggagatacctcccaggaggggccgacagacacctcatataggcacctgcctctctgggacgaagcttccagaggaaggatcaggaagtagtatttgctgttctgcaatatttgctgttctgcagcctccgctggtgatacccaggaaaacagggtctggggtggacctccagcaaactccaaccgacctgcagctgagggacctgacagttagaaggaaaactgaaaaacagaaaggaatagcatcaacatcaccaaaaaggtcatctacaccaaaaccccatctgtaggtcaccaacatcaaagaccaaaggtagataaaaccacaaagatggggagaaaccagagcagaaaagctgaaaattctaaaaatcagagtgcctcttctcctccaaaggatcgcaactcctcgccagcaaagagacaaagctggatggagaatgactttgacaagtcgacagaagtaggcttcagaaggttggtaaaaacaaacttctccgagctaaaggaggacgtttgaacccatcgcaaggaagtaaaacccttgaaaaaagattagacgaatggctaactggaataaacagtgtagagaataccttaaatgacctgatggagctgaaaaccacggcacaagaacttcgtgacacatgcacaaccttcaatagccgattcgatcaagtggaagaaagggtatcagtgattgaagatcaaattaatgaaataaagcaaataagacaaggttacaggaaaaagagtaaaaagacatgaacaaagcctccaagacaaatgggactatgtgaaaagaccaaatctatgtttgattggtgtacctggaagtgatggggagaatggaaccaacttggaaaacactcttcaggatattatccaggagaacttccccaacctagcaaggcaggccaacattcaaattcagaaaatacagagaacaccacaaagatactccttgagaagagcaaccccaagacacataattgtcagattcaccaaggttgaaatgaaggaaaaagtgttaagggcagccaaagagaaaggttgagttacccacaaagggacgcccatcagactaacagtggatctctctgcagaaaccctacaagaagagagtgggggccaatattcaacattcttaaagaattttcaacccagaatttcatatctagccaaactaagcttcataagtaaaggaaaaataaaatcctttacagacaagcaaatgctgagagattttgtcaccaccaggcctgccttacgagagctcctaaaggaagcactaaacatggaaaggaacaactggtaccagccactgcaaaaacatgccaaattgtaaagaccatcgatgctatgaagaaactgcatgaattaacgggcaaaataaccagcgaacatcataatgacaggatcaaattcacacataacgatattaaccttaaatgtaaatgggctaaatgccccaattaaaagacacagactggcaaattggataaagagtcaagacccatcaatgtgctgtattcaggagacccagctcatgtgcaaagacacacatagactaaaataaagggatggaggaagatataccaagcaaatggaaagcaaaaaaaaaaaaaaaaaaaagcaggggttgcaatcctattctctgataaaacagactttaaaccaacaaagatcaaaagagacaaggccattacataatggtaaagggatcaattcgccaagaagagctaactatcctaaatatatatgcacccaatacaggagcacccagattcataaagcaagtcctttgagacctacaaagaaacttagacttgcacacaataataatgggagactttaacaccccactgtcaatattagacagatcaacgagacagaaggttaacaaggatatccaggacttgaactcagccctgcaacaagcagacctaatagacatctacataactctccaccccaaatcaatagaatatacattcttctcagcatcacatcacacttattctaaaattgaccacataattggaagtaaagcactcctcagcaaatgtaaaagaacagaaatcacaacaaactgtctctcagaccacagtgcaatcaaattagaactcaggattaagaaactcactcaaatccacacaactacatggaaactgaacaacctgctcctgaatgactactggatacataacgaaatgaaggcagaaataaagatgttctttgaaaccaatgagaacaaagacacaacgtaccagaatctctgggacacgtttaaagcagtgtgtagagggaaatttatagcactaaacacccacaagagaaagcaggaaagatctaaaattgacaccctaaaatcacaattaaaagaactaaagaagcaagagcaaacaaattcaaaagctagcagaaggcaagaaataactgagatcagagcagagatgaaagagatagagacacgaaaacccttcaaaaaaatcaaggagtccaggagctggttttttgaaaagatcaacaaaattgatagactgctagcaagactaataaagaagaagagagaagaatcaaatagatgcaataaaaaatgataaaggggatatcaccaccaatcccacagaaatacaaactaccatcagagaatactataaacacttctttgcaaataaactagaaaatctagaagaaatggataaattcctggaaacatacacccacccaagactaaaccaggaagaagttgaacctctgaatagaccaataacaggctctgaaattgaggcaataattaatagcctaccaaccaaaaaaagtccaggaccagatagattcacagccaaattctaccagaggtacaaagaggagctggtaccattccttctgaaactattccaatcaatagaaaaagagggaatcctccctaactcatttcatgaggccaacatcatccttatgccaaagcctggcagagacacaacaaaaaaagagaattttagaccaatatccctgatgaacatcaatgcgaaaatcctcaataaaatactggcaaaccaaatccagcagcacatcaaaaagcttatcaaccatgatcaagttggcttcatccctgggatgcaaggctggttcaacatacacaaatcaataaatgtaattcatcacataaagagaaccaatgacaaaaaccacatgattatctcaatagatgcaggaaaggccttcaacaaaattcaacagtgcttcatgctaaaaactctcaataaactaaatattcatggagtgtatctcaaaataataagagctatttatgacaacccccagccaatatcatactgaatggggaaaaactggaagcattccctttgaaaactggcataagacaaggattccactcctacgcaacatagtgttggaagttctggccagggcaatcaggcaagagaaggaaataaagggtattcaatcaggaaatgaggaagtcaaattgtccctgtttgcagatgacatgattgtatatttagaaaaccccatcgtctcagcccaaaatctccttaagctgataagcaacttcagcaaagtctcaggatacaaaatcagtgtgcaaaaatcacaagcattcctatacgccattaacagacagagagccaaattatgagtgaactcccagtcacaattgctacaaagagaataaaatacctaggaatccaacttacaagggatgtgaaggacctcttcaaggagaactacaaaccactgctcaacgaaataaaagaggacacaaacaaatggaagaatatttcattctcatggataggaagaatcaatatcatgaaaatggccacactgcccaaagtatttatagattcaatgccatccccatcaagctaccaatgactttcttcacagaattggaaaaaactactttaaagatcatatggaaccaaaaaagaaccccccattaccaagacaatcctaagcaaaaagaacaaagctggaggcatcaagctacctgacttcaaactatactacaaggctacagtaaccaaaacagcacggtactggtaccaaaacagatacatagaccaatggaacagaaaagaggcctcagaaataacaccacacatctacaaccatctgatctttgacaaacctgacaaatacaagcaatggggaaaggattccctatttaataaatggtgctgggaaaactggctagccatatgtagaaagctgagactggatcccttccttacaccttataaaaaattaattcaagatggattaaagacttaaatgttagacctaaaaccataaaaaccctagaagaaaacctaggcaataccattcaggacgtaggcatgggcaaggacttcatgactaaaacaccaaaagcaatggcaacaaaagccaaaattgacaaaagggatctaattaaacgaaagagcttctgcatggcaaaagaaactaccatcagagtgaacaggcaacctacagaatgggagaaaatttttgcaatctgcccatctgacaaagggctaatatccagaatctacaaataactcaaacaaatttacaagaaaaaaaatcccatcaaaaagtgggtgaaggatatgaacagacacttctcaaaagaagacatccatgcagccaacagacacatgaaaaaatgctcatcatcactggtcatcagagaaatgcaaatcaaaaccacaatgagataccatcttgtgccagttaaaatggcaatcattaaaaagtcaggaaacaacagatgctggagaggatgtggagaaataggaatgcttttacactgttggtgggagtgtaaattagttcaaccattgtggaaggcagtgtggcaattcctcaaggatctagaactagaattatcatttgacccagcaatcccattactgggtatatacccaaaggatcataaatcatgctactataaagacatatgcacacgtatgtttattgtggcactattcacaatagcaaagacttggaaccaacccaaatgtccatcaatgatagactggaataagaaaatgtggcacatatacaccatggaatactatgcagccataaaaaaggatgagttcatgtcctttgcagggacatggacgaaggtggaaaccatcattctcagtaagttatcacaaggacagaaaaccaaatagtgcatgttttcactcataggtgggaattgtacaatgagatcacttggacacagggtggggaacatcacacaccagggcctgttggggggttgggggctggtggagggatagcattacaagaaatacctaatgtaaatgatgagttgatgggtgcagcaaaccaacatggcacatgtatacctatgtatcaaacctgcacattgtgtacatgtaccctagaacttaaagta

SEQ ID NO: 602 - DNA, 303 bp, Homo sapiens
  source 1..303: mol_type = other DNA
ggccaggcgcggtggctcatgcctgtaatcccagcactttgggaggcggaggccggcagatcacctgaggtcaggagttccagccagcctggccaacatggtgaaaccccgtttctactaaaaatacaaaaattagccgggcttggtggcaggcgcctataatcccagctactcgggaggctgaggcaagagaatcgcttgaacctgggaggcggaggttgcagggagccaagatcacgccattgcactccagccaggggacaagagcgagacttcgttctcaaaaaaaaaaaaaaaaaaaaa

SEQ ID NO: 603 - DNA, 6030 bp, Homo sapiens
  source 1..6030: mol_type = other DNA
agggaggagccaagatggccgaataggaacagctccggtctacagctcccagcgtgagcgacgcagaagacggtgatttctgcatttccatctgaggtaccgggttcatctcactagggagtgccagacagtgggcgcaggccagtgtgtgtgcgcaccgtgcgcgagccgaagcagggcgaggcattgcctcacctgggaagcgcaaggggtcagggagttccctttccgagtcaaagaaaggggtgacggacgcacctggaaaatcgggtcactcccacccgaatattgcgcttttcagaccggcttaagaaacggcgcaccacgagactatatcccacacctggctcggagggtcctacgcccacggaatctcgctgattgctagcacagcagtctgagatcaaactgcaaggcggcaacgaggctgggggaggggcgcccgccattggccaggcttgcttaggtaaacaaagcagccgggaagctcgaactgggtggagcccaccacagctcaaggaggcctgcctgcctctgtaggctccacctctgggggcagggcacagacaaacaaaaagacagcagtaacctctgcagacttaagtgtccctgtctgacagctttgaagagagcagtggttctcccagcacgcagctggagatctgagaacgggcagactgccttctcaagtgggtccctgactcctgacccccgagcagcctaactgggaggcaccccccagcaggggcacactgacacctcacacggcagggtattccaacagacctgcagctgagggtcctgtctgttagaaggaaaactaacaaccagaaaggacatctacaccgaaaacccatctgtacatcaccatcatcaaagaccaaaagtagataaaaccacaaagatagggaaaaaacagaacagaaaaactggaaactctaaaacgcagagcgcctctcctcctccaaaggaacgcagttcctcaccagcaacagaacaaagctggatggagaatgattttgacgagctgagagaagaaggcttcagacgatcaaattactctgagctacgggaggacattcaaaccaaaggcaaagaagttgaaaactttgaaaaaaatttagaagaatgtataactagaataaccaatacagagaagtgcttaaaggagctgatggagctgaaaaccaaggctcgagaactacgtgaagaatgcagaagcctcaggagccgatgcgatcaactggaagaaagggtatcagcaatggaagatgaaatgaatgaaatgaagcgagaagggaagtttagagaaaaaagaataaaaagaaatgagcaaagcctccaagaaatatgggactatgtgaaaagaccaaatctacgtctgattggtgtacctgaaagtgatgtggagaatggaaccaagttggaaaacactctgcaggatattatccaggagaacttccccaatctagcaaggcaggccaacgttcagattcaggaaatacagagaacgccacaaagatactcctcgagaagagcaactccaagacacataattgtcagattcaccaaagttgaaatgaaggaaaaaatgttaagggcagccagagagaaaggtcgggttaccctcaaagggaagcccatcagactaacagcggatctctcggcagaaaccctacaagccagaagagagtgggggccaatattcaacattcttaaagaaaagaattttcaacccagaatttcatatccagccaaactaagcttcataagtgaaggagaaataaaatactttatagacaagcaaatgttgagagattttgtcaccaccaggcctgccctaaaagagctcctgaaggaagcgctaaacatggaaaggaacaaccggtaccagccgctgcaaaatcatgccaaaatgtaaagaccatcgagactaggaagaaactgcatcaactaatgagcaaaatcaccagctaacatcataatgacaggatcaaattcacacataacaatattaactttaaatataaatggactaaattctgcaattaaaagacacagactggcaagttggataaagagtcaagacccatcagtgtgctgtattcaggaaacccatctcacgtgcagagacacacataggctcaaaataaaaggatggaggaagatctaccaagccaatggaaaacaaaaaaaggcaggggttgcaatcctagtctctgataaaacagactttaaaccaacaaagatcaaaagagacaaagaaggccattacataatggtaaagggatcaattcaacaagaggagctaactatcctaaatatttatgcacccaatacaggagcacccagattcataaagcaagtcctcagtgacctacaaagagacttagactcccacacattaataatgggagactttaacaccccactgtcaacattagacagatcaacgagacagaaagtcaacaaggatacccaggaattgaactcagctctgcaccaagcagacctaatagacatctacagaactctccaccccaaatcaacagaatatacatttttttcagcaccacaccacacctattccaaaattgaccacatagttggaagtaaagctctcctcagcaaatgtaaaagaacagaaattataacaaactatctctcagaccacagtgcaatcaaactagaactcaggattaagaatctcactcaaagccgctcaactacatggaaactgaacaacctgctcctgaatgactactgggtacataacgaaatgaaggcagaaataaagatgttctttgaaaccaacgagaacaaagacacaacataccagaatctctgggacgcattcaaagcagtgtgtagagggaaatttatagcactaaatgcctacaagagaaagcaggaaagatccaaaattgacaccctaacatcacaattaaaagaactagaaaagcaagagcaaacacattcaaaagctagcagaaggcaagaaataactaaaatcagagcagaactgaaggaaatagagacacaaaaaacccttcaaaaaatcaatgaatccaggagctggttttttgaaaggatcaacaaaattgatagaccgctagcaagactaataaagaaaaaaagagagaagaatcaaatagacacaataaaaaatgataaaggggatatcaccaccgatcccacagaaatacaaactaccatcagagaatactacaaacacctctacgcaaataaactagaaaatctagaagaaatggatacattcctcgacacatacactctcccaagactaaaccaggaagaagttgaatctctgaatcgaccaataacaggctctgaaattgtggcaataatcaatagtttaccaaccaaaaagagtccaggaccagatggattcacagccgaattctaccagaggtacaaggaggaactggtaccattccttctgaaactattccaatcaatagaaaaagagggaatcctccctaactcattttatgaggccagcatcattctgataccaaagccgggcagagacacaaccaaaaaagagaattttagaccaatatccttgatgaacattgatgcaaaaatcctcaataaaatactggcaaaccgaatccagcagcacatcaaaaagcttatccaccatgatcaagtgggcttcatccctgggatgcaaggctggttcaatatacgcaaatcaataaatgtaatccagcatataaacagagccaaagacaaaaaccacatgattatctcaatagatgcagaaaaagcctttgacaaaattcaacaacccttcatgctaaaaactctcaataaattaggtattgatgggacgtatttcaaaataataagagctatctatgacaaacccacagccaatatcatactgaatgggcaaaaactggaagcattccctttgaaaaccggcacaagacagggatgccctctctcaccgctcctattcaacatagtgttggaagttctggccagggcaatcaggcaggagaaggaaataaagggtattcaattaggaaaagaggaagtcaaattgtccctgtttgcagacgacatgattgtttatctagaaaaccccatcgtctcagcccaaaatctccttaagctgataagcaacttcagcaaagtctcaggatacaaaatcaatgtacaaaaatcacaagcattcttatacaccaacaacagacaaacagagagccaaatcatgggtgaactcccattcacaattgcttcaaagagaataaaatacctaggaatccaacttacaagggatgtgaaggacctcttcaaggagaactacaaaccactgctcaaggaaataaaagaggagacaaacaaatggaagaacattccatgctcatgggtaggaagaatcaatatcgtgaaaatggccatactgcccaaggtaatttacagattcaatgccatccccatcaagctaccaatgactttcttcacagaattggaaaaaactactttaaagttcatatggaaccaaaaaagagcccgcattgccaagtcaatcctaagccaaaagaacaaagctggaggcatcacactacctgacttcaaactatactacaaggctacagtaaccaaaacagcatggtactggtaccaaaacagagatatagatcaatggaacagaacagagccctcagaaataatgccgcatatctacaactatctgatctttgacaaacctgagaaaaacaagcaatggggaaaggattccctatttaataaatggtgctgggaaaactggctagccatatgtagaaagctgaaactggatcccttccttacaccttatacaaaaatcaattcaagatggattaaagatttaaacgttaaacctaaaaccataaaaaccctagaagaaaacctaggcattaccattcaggacataggcgtgggcaaggacttcatgtccaaaacaccaaaagcaatggcaacaaaagacaaaattgacaaatgggatctaattaaactaaagagcttctgcacagcaaaagaaactaccatcagagtgaacaggcaacctacaacatgggagaaaatttttgcaacctactcatctgacaaagggctaatatccagaatctacaatgaactcaaacaaatttacaagaaaaaaacaaacaaccccatcaaaaagtgggcgaaggacatgaacagacacttctcaaaagaagacatttatgcagccaaaaaacacatgaagaaatgctcatcatcactggccatcagagaaatgcaaatcaaaaccactatgagatatcatctcacaccatttagaatggcaatcattaaaaagtcaggaaacaacaggtgctggagaggatgtggagaaataggaacacttttacactgttggtgggaatgtaaactagttcaaccattgtggaagtcagtgtggcgattcctcagggatctagaactagaaataccatttgacccagccatcccattactgggtatatacccaaatgagtataaatcatgctgctataaagacacatgcacacgtatgtttattgcggcactattcacaatagcaaagacttggaaccaacccaaatgtccaacaatgatagactggattaagaaaatgtggcacatatacaccatggaatactatgcagccataaaaaatgatgagttcatatcctttgtagggacatggatgaaattggaaaccatcattctcagtaaactatcgcaagaacaaaaaaccaaacaccgcatattctcactcataggtgggaattgaacaatgagatcacatggacacaggaaggggaatatcacactctggggactgtggtggggtcgggggaggggggagggatagcattgggagatatacctaatgctagatgacacattagtgggtgcagcgcaccagcatggcacatgtatacatatgtaactaacctgcacaatgtgcacatgtaccctaaaacttagagtataataaaaaaaaaaaaa

SEQ ID NO: 604 - DNA, 3586 bp, Homo sapiens
  source 1..3586: mol_type = other DNA
ttagacaaatgatcgacatttagaaaattcaaggatacccaggaattgaactcagctctgcaccaagcggacctaatagacatctacagaactctccaccccaaatcaacagaatatatatttttttcagcaccacaccacacctattccaaaactgaccacatacttggaagtcaagctctcctcaacaaatgtaaaagaacagaaattataacaaactatctctcagaccacattgcaatcaaactagaactcaggattaagaatctcactcaaaaccactcaactacatggaaactgaacaacctgctcctgaatgactagtgggtacataatgaaatgaaggcagaaataaatatgttctttgaaaccaacgagaacaaagacacaacataccagaatctgtgggacgcattcaaagcagtgtgtagagggaaatttatagcactaaatgcccacaagagaaagcaggaaagatccaaaattgacaccctaacatcaaaattaaaagaactagaaaagcaagagcaaacacattcaaaagctagcagaaggcaagaaataactaaaatcagagcagaactgaaggaaatagagacacaaaaaacccttcaaaaaattaatgaatccaggagctggttttttgaaaggatcaacaaaattgatagaccactagcaagactaataaagaagaaaagagagaagaatccaatagatgcaataaaaaatgataaaggggatatcaccaccgatcccacagaaatacaaactaccatgagagaatactacaaacacctctacgcaaataaactagaaaatctagaagaaatggataaattccttgacacatacattcttccaagactaaaccaggaagaagttgaatctctgaatagaccaataacaggatctgaaattgtggcaataatcaatagcttaccaaccaaaaagagtccaggaccagatggattcacagccgaattctaccagaggtacaaggaggaactggtaccattccttctgaaactattccaatcaatagaaaaagaaggaatcctccctaactcattttatgaggccagcatcattctgataccaaagccgggcagagacacaacaaaaaaagagaattttagaccaatatccctgatgaacattgatgcaaaaatcttcaataaaatactggcaaactgaatccagcaacacatcaaaaagcttatccaccatgatcaagtgggcttcatccctgggatgcaaggctggttcaatatacacaaatcaataaatgtaatccagcatataaacagagccaaagacaaaaaccacatgattatctcaatagatgcagaaaaagcctttgacaaaattcaacaacccttcatgctaaaaactctcaataaattaggtattgatgggacgtatttcaaaataataagagctatctatgacaaacccacagccaatatcatactgaatgggcaaaaactggaagcattccctttgaaaactggcacaagacagggatgccctctctcaccggtcctattcaacatagtgttggaagttctggccagggcaattaagcaggagaaggaaataaagggtattcaattaggaaaagaggaagtcaaattgtccctgtttgcagacgacatgattgtatatctagaaaaccccattgtctcaggccaaaatctccttaagctgataagcaacttcagcaaagtctcaggatacaaaatcaacgtacaaaaatcacaagcattcttatacaccagcaacagacaaacagagagccaaatcatgagtgaactcccattcacaattgcttcaaagagaataaaatacctaggaatccaacttacaagggacgtgaaggacctcttcaaggagaactacaaaccactgctcaaggaaataaaagaggatacaaacaaatggaagaacattccatgctcatgggcaggaagaatcaatatcgtgaaaatggccatactgcccaaggtaatttacagattcaatgccatccccatcaagctaccaatgcctttcttcacagaattggaaaaaactactttaaagttcatatggaaccaaaaaagagcccgcatcaccaagtcaatcctaagccaaaagaacaaagctggaggcatcacactacctgacttcaaactatactacaaggctacagtaaccaaaacggcatggtactcgtaccaaaacagagatatagatcaatggaacagaacagagccctcagaaataacgctgcatatctacaactatctgatctttgacaagcctgagaaaaacaagcaatggggaaaggattccctatttaataaatggtgctgggaaaactggctagccatatgtagaaagctgaaactggatcccttccttacaccttatacaaaaatcaattcaagatggattaaagacttaaacgttagacctaaaaccataaaaaccctagaagaaaacttggcattaccattcaggacataggcatgggcaaggacttcatgtctaaaacaccaaaagcaatggcaacaaaagccaaaattgacaaatgggatctaattaaagtaaggagcttctgcacagcaaaagaaactaccatcagagggaacaggcaacctacaaagtgggagaaaattttcgcaacctacttatctgacaaagggctagtatccagaatctacaatgaactcaaacaaatttacaagaaaaaaacaaacaaccccatcaaaaagtgggcgaaggacatgaacagacacttctcaaaagaagacatttatgcagccaaaaaacacatgaaaaaatgctcatcatcactggccatcagagaaatgcaaatcaaaaccacaatgagataccatctcacaccagttagaatggcaatcattaaaaagtcaggaaacaacaggtgctggagaggatgtggagaaataggaacacttttacactgttggtgggactgtaaactagttcaaccattgtggaagtcagtgtggcgattcctcagggatctagaactggaaataccatttgacccagccatcccattactgggtatatacccaagggactataaatcatgctgctattaagacacatgcacacgtatgtttattgcggcattattcacaatagcaaagacttggaacaaacccaaatgtccaacaatgatagactggattaagaaaatgtggcacatatacaccatggaatgctatgcagccataaaaaatgatgagttcatgtcctttgtagggacatgtatgaaattggaaaccatcattctcagtaaactatcgcaagaacaaaaaaccaaacaccgcatattctcactcataggtgggaattgaacaatgagatcacatggacacaggaaggggaatatcacactctggggactgttgtggggtgggggaggggggagggatagcattgggagatatacctaatgctagatgacgagttagtgggtgcagtgcaccagcatggcacatgtatacatatgtaactaacctgcacaatgtgcacatgtaccctaaaacttaaagtataataaaaataaaaa

SEQ ID NO: 605 - DNA, 6206 bp, Homo sapiens
  source 1..6206: mol_type = other DNA
caagatggccaaataggaacagctcccgtctgcagttcccagcatgattgacagagaagatgagtgatttctgcatttcccactgaggtaccgggttcatctcattgggactggttggacagtgggtgcaggccacagagggcgagccaaagcagggtggggcatcgccttacccgggaagcacaggggttgggggatgtccctttcctagccaaaggaagccgtgacagactatggcaggaaaatcgggacactgccacccaaataatgcacttttccaatggtcttagcaaacggcagaccaggagattatatcccatgcctggctcagcaaatcccatgccaacagagccttgctcactgctagcgcagcagtctgagatccagctgcgaggcagcagcctggctggggaaggggcgtctgccattgctgaggcttgagtaggaaaacacagcagcctggaagctcaaactgggtggagcccacctcatctcaataaggcctgtctgcctctgtagactccacctctgggggcagggcatagctgaacaaaaggcagcagaaacttctacagacttaaatgtccctgacagctctgaagagagcagtggttctcccagcatggtgtttgagctctgagaatggatagactgcctcctcaagtgggtcccatgtagcttaactgggagacatctcccagtaggggccaactgacacctaatacagccaggtgcccctctgagataaagcttccagaggaaggatcaggcagcaatatttgctgttctgcagcctctgctggtgatacccaggcaaacagcgtctggagtggacctccagcaaactccaacagacctacagctgagggacctgactgttagaaggaaaactaactaacaaacagaaaggaatagcatcaacatcaacaaaaaggacatccacaccaaaaccccacgtgtaagtcaccaacatcaaagaccaaaggtagataaaaccacaaagatagggagaaaccagagcagaaaagcagaaaattctaaaaaccagaccgcctcttctcctccaaaggatcgcagctcatcgccagcaacagaacaaagctggacagagaatgactttgacgagtttacagaagtatgtttcagaaggtcagtaataacaaacttctctgaagtaaaggaagatgttcgaacccatcgcaaacaagctaaaaaccttgagaaaagattagaagaatggctaactagaataaacagtgtagagaagaccttaaatgacctgatggagctgaaaaccatcgcatgagaactacatgaggcatgcacaagcttcaatagccgatttgatcaagtggaagaaagggtatcagtgattgaagatcaaattaatgaaataaagcaagaagagaagtttagagaaaaaagagtaaaaagaaatgaacaaagcctccaagcaatatggaagtatgtgaaaagaccaaatctacatttgattggtgtacctgaaagtgacggggagaatggaaccaagctggaaaacactcttcacgatattatccaggagaacttccccaacctagcaatgcaggccaacattcaaattcaggaaatacagagaacaccacaaagatactcctcgagaagaccaaccccaagatacataattgtcagattcaccaaggttgaacagaagaaaaaaatgttaaaggcagccagagagaaaggtcaggctacccacaaatggtagcccatcagactaacagtggatctctcagcagaaactctacaagccagtagagagtgggggcccatattcaacattcttaacgaaaagaattttcaacccagaatttcatatccagccatactaagcttcataagtgaaggagaaataaaatcctttacagacaagcaaatgttgagagattttgtcaccaccaagcctgccttacaagagctcctgaaggaagcactaatcatggaaaggaacaactggtaccagccactgcaaaaacatgccaaattggaaagaccactgatgctaggaagaaatggcatcaactaatgggcaaaataaccagctaacatcataatgacaggatcaaattcacacataacaatactaaccttaaatgtaaatggaataaatgccccaaagagtcaagacccatcagtgtgctgtattcagtagacccatctcacgtgcagagactcacacaggctcaaaaaaaaaaaaaaaaaaaaaaaaaaaaaaaaaaaaagcaggggttgtaatcctagtctctggtaaaacagactttaaaataacaaagatcaaaagagacaaagaagggcattacatcatggtaaaggaatcaattcaacaagaagagctaactatcctaaatatatatgcacccaatacaggagcacccagattcaaaaagcaagtccatggagacctacaaagaggcttagattcccacacaataataatgggagacattaacaccctgctgtcaatattatatcaacgagacagaagggtaataatgatatgcaggacttgaactcagctctgcaccaagccaacctaatagacatctatagaactctccacctcaaatcaaaagaagatgcattcttctcagcaccacatcacacttattccaaaattgaccacatagttgaaagtaaagcactcctcagcaaatgtaaaagaacagaaatcacaacaaattgtctctcagaccacagtgcaatcaaattagaactaaggactaagaaactcactcaaaactgcaaaattacatggaaactgaacaacctgctcctgaatgagtactgggtaaataacgaaatgaaggcagaaataaagatgtcctttgaaaccaataagaacaaagacacaacataaaaatccctgggacacatttaaagcagtatgtagagggaaatttatagcactaaatgcccacaagagaaagcaggaaagatctaaaatcaacaccctaacatcacaataaaatgaactagagaagcaagagcaaacaaattcaaaagctaccagaaggcacgaaataactaagatcagagcagaactaaaggaaatagagacacaaaaaaacccttcaaaaaatcagtgaatccaggagatggtttttgaaaagatcaacaaaattgacagaccactagcaagactaacaaagaggaaaagagagaagaatcaaatagactcaataaaaaaagataaaggggatatcaccaccgatcccacagaaatacaaactaccatcagagaatatttgtgtagaggtgtttacagcaaactagaaaatctagaagaaatggataaattcctggacacatatacccccgccaagactaaaccaggaagaagttgaatccctgaatacaccaataaccaggctctgaaattgagacaattattaatagcctaccaaccaaaaaaagtccaggaccagatggattcacagccagattctaccaaaggtaggaagaggagctgataccaatccttctgaaactattccaatcaataaaaaaagacagaatcctccctaactcattttatgcagccagcatcatcctgataccaaagcctggcagagaaataacaaaaaaagagaattttagaccaatacacctgatgaacatcgatgcgaaaatcctcaataaaatactggcaaaccaaatcctgcagcacatcaaaaggcttatccaccacactcaagtgggcttcatccctgggatgcaaggctggttcaacatatgcaaatcaataaacgtaatccatcacataaacagaaccaaagacaaaaaccacatgattatctcaatagatgcagaaaaggccttcgacaaaattcaacagcccttcatgctaagaacttcattggtttcctagggtttattgtgtgagcacaccatatatttacagtaggaatggacgtagacacacgagcttatttcacctccgctaccataatcatcgctatccccaccggcgtcaaagtatttagctgactcgctacactccacggaagcaatatgaagtgatctgctgcagtgctctgagccctgggattcatttttctcttcactgtgggtggcctaaccggcattgtattagcaaactcatcactagacatcgtactacactacacaacaacacaacatagtgttggaagttctggccagggcaatcaggcaagagaaaaaataaagggtattcaattaggaaaagaggaagtcaaattgtccctgtttgcagatgacatgattgtatatttagaaaaccccattgtctcagccccaaatctccttacactgataagcaacttcagcaaaatctcaggatacaaaatcaatgtgcaaaagtcacaagcattcctatacaccaacaaaagacaaacagagagccaaatcatgagtgaactcccattcacaattgctaccaagagaataaaatacctaggaatccaacttacaagggatgtgaaggacctcttcaaggagaactacaaaccactgctcgacgaaataaaagaggacacaaacaaatggaagaacattccatgctcatggagaggaagaatcgatttcgtgaaaatggccatactgcccaaggcaatttatagattcactgccatctccatcaagctaccaatgacttttgtcacagaattgggaaaaactactttaaagttcacgtggaaccaaaaaagagaccgcattgccaagacaatcctaagccaaaggaacaaagctggaggcatcatgctacctgacttcaaagtatactacaaggctgcagtaaccacaacagcatggtactggtaccaaaacagagatatagaccaatggaacagagcagaggtctctacaataacttcacacatctacaaccatttgatctttgacaaacctgacaaaaacaagccatgcagaaaggattccctatttaataaatggtgctgggaaaactggctagccatatgtagaaagctgaaactgcattccttccttacaccttatacaaacattaattcaagatggattaaagacttacatgttagacctaaaaccataaaaaccctagaagaaaacctaggcaataccattcaggacataggcatgggcaaggacttcatgactaaaacaccaaaagcaacggtaacaaaagccaaaatagacaaatgggatctaattaaactaaagagcttctgcacagcaaaagaaactaccatcagagtgaacaggcaacctacagaatgggaggaaatttttgcaatctacccatctgacaaagaactaatatccagaatctgcaaagaacttatacaaatttacaagaaaaaaatcaaccccatcaaaaagtgggtgaaggatatgaacagacacttctcaaaagaagacatttatgcagccaacagacatgtgaaaaaatgctcatcatcactggtcagcagagaaatgcaaatcaaaaccacaatgagataccatctcacaccagttaaaatggtgatcattaaaaagtcaggaaacaacaggtactggagaggatgtggagaaataggaatgctattacactgttcttggtagtgtgaactagttcaaccattgtggaagacagtgtggcgattcctcaaggatctagaactagaaataccatttgacccagtgatcccattactgggtatatacccaaaggattataaatcatgctgctataaagacacatgcacatgtatgtttattgcagcactattcacaatagcagacttggaaccaacccaaatgtccatcagtgatagactggattaagaaaatgtggcacatatacaccatggaatactatgcagccataaaaaaagatgagttcatgtcctttgtaggcagatggatgcaactggaaaccattattctgagcaaactatcacaaggacagaaaaccaaacaccacatgttctcactcataggtgggaattgaacaatgagaacacttggacacagggtagggaacatcacacaccggggcctgtcatggggtggggggactgggggggatagcattaggagaaatacctaatgtaaatgacgagttaatgggtgcaaccaaccaacatggcacatgtatacatatgtaacaaacctgcacattgtgcacatgtaccctagaacttaaagtataataaacaaaataa

SEQ ID NO: 606 - DNA, 341 bp, Homo sapiens
  source 1..341: mol_type = other DNA
gcctgatgcagtggctcactcttgtaatcccagcactttgggaggcaaaggtgcgaggaccacttgtggccagaagtttaagagcactctgggcaacaaaacaagatcttgtctctacaaaagaataaaaaataaaataaaaattaattagctgggtgtggtggtgcattcctgtagtcctagctacatgtagtgaagaatttacacggtcaacaatcaaaacttgagattgaagcaggaggatcatttgagttcaggagtagaggctgcagtgagctatgattgtaccactatactccaacctaggtggcaaagcaagaccctgtctctaaaaaagaaaa

SEQ ID NO: 607 - DNA, 2022 bp, Homo sapiens
  source 1..2022: mol_type = other DNA
acagtacttggttttcactttatattgccgaaagaggcattgaagagaattggagaaacaatcttgaattgctgacaccacccctcctcccttcccagcagcagctacatggtgtggagacagaatctgggcacttggggagggagagtacagtgactgggggattttacattgaactcggtgcttccctgtgacaacagagagcaaaggcatgctgggctcagcctgcacccacagagagggaacatttggactagccctagaatcacccatcccagtggttggaacatgagtttcttggcaagccccctcacagaaggccaaagttctctagggtcctaggtacacatgaaaggcagtctaggacacagggacagcaattcctaggcaagtcctagtagtattggactgggctcagagccactggaccaaggtagcacatgactactgagataccagctaggcagctatgggagtgcttgtgccattccttgcccaacctcaggtagtgcagctcacagcaacaacagtgactcctcccttctgcttaaggagaggagagtgaagagtgaagaggactttgttgtacagcttgaatgccagctcagccacagtaggatagggcaccaggcagaaccatgaggcctcccttgcaggccctagctctcagatgacatttctagacacaccctgggccaaaagggaatccactgccttgaagaaaaggacccagtccaggccacattcatcatcttctggctaaagaactctttggtcctaaatagccagcaacaatacccaggtaatacaccatgggcattggactctgagacatcctgacttcaggtgtgatctagcacagtctcagctattgtgactatggtgaaagactccagtttgagaacagcagaggaaagagtaaagcagactttctgttgtactaaggtaccagctcagccacattggggtagagaaacaagcaggcccttggggattcttagtccaggcctaagctcttggacagcatttctggacctgccctgggccagagagagcccactgtcctatagggagagtcccagacctagcagcattcacaagctgactgaagacccttgggctttaagtgaacattggtggtggcctggcagaaccctccatgggttgttggtgatgatggccacagggaggttcctctgcctgtggaaaggggagggaagggcagggaggactttgtattacagtctgagtgccagcttagccacagtggaatagaatatcagctaaatttattagtttttttctttaatccctggctcccagacagcatgtttagatccagccagggcctagaggaacttgccaccctgaaaagaaagaaacaaacctgactggttttgtcacctactgatcatagagccttagggccttgagtgaacataggtggtagccaggtagttgttacagtgggctttgggtgagacccagtgctgtactggcttcaggtctgacccagggcaatcccaatggtggtggccacagagttgcttgcatcatcatacccgcagttcaggcacctctgcacagacaaagagagagagtgagagacttcattgtttggaagaaagtgaggtaaaaaacaagcgtttctgcgtggtaacccagagaattcttccagatcttatccaagacaaccaagggtatctgcaaagaccacagcattattgggcttgaggcctaggtccttttgaatccctggaaaggcttcccaagaaggacagacacaagcaagtccagactgtgaaaactacaataaatacgtaactctttaatgcccagacagcaacgaacatttacaagcatcaagatcatccagaaaaacatgacttaaccaaatgaactaataaggcaccaggaatcaatcctggagaaatagagatatgtgacctttcagagaattcaaaatagctgttttggaggaaactcaaagaaattcaagataacacagagaaagtattcaga

SEQ ID NO: 608 - DNA, 6238 bp, Homo sapiens
  source 1..6238: mol_type = other DNA
atgatggccaaataacagctgtggtctgcagctcccggtaagaccaatgcagaagaagtgtaatttctgcattactgactgagatacctggttcatcatattggcattggttagacagtgggtgtagcccacggagggtgagccaaagcaggctggggtgtcgcctcacccaggaagtgcaaggggttggggaactccttcccttagccaggggaagccataagggacggtgctatccagacccagatactaagctttttccatggtcttcacaacccgcagatcaggagattccctcggatgcctccacaaccagggccccgggtttcaagcacaaaactgggcgaccgtttgggtagacactgagctagctgcaggatttttttccttgtactccattggtgcctggaatgccaatgtgacagaaccattcactcccctggaaagggggctgaaaccagggaaccaagtggtcttgctcagcagctcgcacccctatggagcccagcaagctaagatccactggcggcaaagcactgtagccaggctgcctctctagattctcctctctgggcagggcatctctgaaagaaaggcagcagcctcagtcaggggcttatagataaaactcccatctccctgggacagagcacctgagggaagggggcggttgtgagcgcagcttcagcagacttaaatgttactgcctggaggctctgaagagagtagccaatctcccagcacagggctcgagctctgctaagggaaagactacctcctcaagtgggtccctgacccccatgcctcctgactgggaaacatctcacagcagggattgacagacaccccatacaggagagctctggctggcatctggcaggtacccctctgggatgaagcttccagaggaaggagcaggcagcaatctttgctcttctgtagcatctgctggtgatactctggcaaacagggtcaggagtggacctccagcaaactccagcagacctgcagaagaagggcctgactgttagaaggaaaactaacaaacagaaagcaatagcatcaacatcaacacaaaggatgcccatgcaaaaaccccatgcaaaggtcatcaacatccaagaccaaaggtagataaatccatgaagatagggaaaaactagcacaaaaagcctgaaaattccaaaaaccagaatgtgtcttctcctccaaaggatcagaactcctggccagcgaaggaacaaaactggatggagaatgagttagacgaattgaaagaagtaggcttcagaaggtgggtactaacaaactctcccaagctaaacagcatgttctaacccaatgcaaggaagctaagaacttttattggaactgctaactagaataaccagtttagcaaagaacataaatgacctgatggagctgaaaaacacagcatgagaacttcgtgaagcctacacaagtatcaatagtcgaattgatcaagcagaagaaaggatatcagagacttaatgaaacaaagcgtgaagacaagattagaagaaaaagaatgaaaaggaatgaaaaaagcctccaagaaatatgggactatgtgaaaagaccaaacccacatttgattagtgtatctgaaagttacaaggagaatggaaccaagttggaaaacacacttcagcgtattatccaggagaacttccccaacctagcaagacaggccaaccttcaaatgcaggaaattcagagaacaccacaaagatactccttgagaagagcaaccttaagacacataatcatcagattcaccaaggttgaaatgaaggaaaaaatgttaagggcagccagagagaaagcccagattacccagaaagggaagcccattagactaacagtgaatctctttgcagaaaccctacaagccagaaaagagtggggaccagtattcaacattcttaaagaaaagaattttcaacccagaatttcatatccagccaaactaagcttcataaacgaagcataaataaagtcctttacagacaagaagatgctgagggattttgtcaccaccaggcctggcttacaagagctcctgaagaaagcactaaatatggaaaggaaaaaccaatagcagccactgcaaaaacataccaaaatgtaaagaccatcaaccctatgaagaaactgcaccaactaatgtgcaaaataactaggtagcatcataatgacaggatcaaattcaaacataacaatattaattttaaatgtaaatgggctaaatgcttcaattaaaagacacagactggcaaattggaccaagagtcaagaggcttcgtgtgctgtattcaggagacccacctcacgtacagagacacacctaggctcaaaataaagggatgaaggaatatctaccaagtaaatggaaagaaaaaaaaaaagcaggggttgcaatcctagtctctgagtaaacagactttaaaccaacaaagatcaaaaaagacaaagaagggcattacataatggtaaagggatcaatgcaacgagaacagctaacaatcctaaatatatatatggacccaatacaggagcaccgagattcataaagcaagttcttagagaccgaaaaagagacttagactcccacacaataatagtgggagacttaaacatcccactgtcaatattagacagatcaacaagacagaaaatagacaaagatattcagaacttgaactcagctttggaccaagcatacctaatagacaactacagaactctccaccccaaatcaacagaatatacattcttcttagcaccatatgcacttattctaaaattgatcaaataatttgaggtaaaacactcctcagcaaatgcaaaagaatggaagtcataacaaacaatctcttagaccacaatgcaatcaaattagaactcaggattaagaaattcactcaacatcgtacaactacatggaaactgaacaacctgctcctgaaagagtactgggtatataatgaaatgaagtcaaaataaataagttctttgaaaccaatgagaacaaagacacaacataccagaatctctgggacacagctaaagcagggcttagtaggaatttatagcactaaatgcccacatcagaaagctagaaagatctaaaatcaacaccctaaaatcacagttaaaagaactagaaaacaaaaagcaaacagattcaaaagctagcagaagacaagaaataactaatattagagcagaattgaaggagatagagacatgaaaaaccattaaaaaaatgaatccaggagctggtgttttgaaaagattaacaaaatagatatactgctagccagactaataaagaagaaaagagaggagaatcaaatagacacaataaaaaatggtaaaggggatatcaccatagatcccacagaaatacaaactgacatcggagaatactataaatacctctacacaaataaaatagaaaatctagaagaaatggataaattcctgaacacatacaccctcccaagactaaaccagaaagaagtctaatccctgattagaccaatagcaagttctgaaattgaggcagtaattaataggctaccaaccaaaaaaagcccattaccagacagattcgcagctgaattctaccacaggtacaaagaggagctggtacgattccttctgaaactattccaaacaatagaaaaagagggaatcctccctaactcattttatgagaccatcatcatactgataccaaaacctggcagagacacaacaaaaagaaaaaagaaaatttcaggccaacatccatgatgaacatcgatatgaaaatcctcaataaaatactggcaaaccgaatccagcagcacatcaaaaagcttatgcaccacgatcaagttggcttcattctgggatgcaaggctggttcaacatatgcaaatcaataaatataattcattacataaatgaaaccaatgacaataaccacatgattatctcaatagatgcagaaaaggcctttgataaaattcaacaccccttcatgctaaaaacactcaatgaagtaggtactgatggaacatatctcaaaataatgagagctatttatgacaaccccacagctaatatcatcctggatgggcaaaagctagacgcattccctttgaaaaccggcacaagacaaggatgtcctctcttaccactcctattcaacatagcattggaagttttgaccagggcaatcaggcaagagaaagaaataaagggtattcaaataggaaaagggaaagtcaaattgtctctgtttgcagatgccatgattgtatatttagaaaaccccatcatctcaccccaaaactccttaacctaataagcaaattcagcaaagtctcaggataaattacaggcatttttacacaccaataatagacagagaaccaaatcatgagtgaactcccattcacaattgctacaaagagaatcaaatacttaggaatacagcttgcaaagtatgtgaaggacctcctcaaggagaaatacaaatcactgctcaaggaaataagaaaggacacaaatagaaaatcattccatgctcatggataggaagagtcaatattgtgaaaatggccatactgcccaaagtattttataggttcagtgctattctcatcaagctattgttgactttcttcacagaattagaaaaaaaaaaactactttaaatttcgtatggaaccaaaaaagggcccatatagccaagacaatcctaagcagaaagaacaaagctggaagcatcacactacctgaattcaaactatactacaagcctaccgtaaccaaaacagcagggtgctggtaccaaaacagatatatagaccaatggaacagaacagagacctcagaattaacaccacacatctacaaccatctgatctttgacaaatctgacaaaaacaagcaatggtaaaagaattccctttttaataaatgctattgggaaaactggctagccatatgcagaaaacttaaaatggagcccttcttacaccttatacaaaaattaactcaaggtggattaaagacttaaatttaagacctaaaactgtaaaaaccctgaagaaaacctaggcaataccattcagaacataggcatgttaatacacttcatgactaaaatagcaaaagcaatggcaacaaaagccaaaagtgacaaatgggatctaattaaactaaagagcttctgcaaagcaaaagagactataatcagagtgaacaggcaacctacagaatgggagaaaatttttgcaatctatccatctgacaaagggctaatatccagaatctacaaggaacataaacaaatttacaagaaaaatacaaacaacccgaacaaaaagtgggcaaaggatatgaatagacacttctcaaaagaagacatttatgtggccaagaaacatatgaaaaaaagctcatcatcactggtcattagaaaaatgcatatcaaagccacaatgagataccatctcatgccagttagaatggtgatcattaaaaactcagaaaacaacagatgctggagagggtgtggagaagtaggaacacttttacagtgttggtgggagtgtaaattagtttaaccattgtggaagacagtatggtgattcctcaaggatctagaaccagaaataccatttgacccagcaatctcattactgtgtatatacccagaggattataaatcattctactataaagacacatgcacacatatatttattgcggcactattcacaatagcgaagacttggaatcaacccaaatgtccatcaaagatagactgaataaagaaaatgtggcacatatataccatggaatagtatgcagtcataaagaaggatgagttcatgtcctttgcagggacatggatgaagctggaaactattattctcagcaaactaacacagaaacagaaaaccaaacaccccatgctctcactcaaaagtgggagttgaacaatgagaacatatggacacaggaaggggaacatcacacaccggggcctgttggttggtcggggccaaggggagggatagcatgaggagaaatacctaatgtatatgatgcgttgatgggtgcagcaaaccaccatggcacatgtatacctatgtaacaaaactgcacattctgcacgtgcatgtatcccagaagttaaagtgtaataaaaaataaa

SEQ ID NO: 609 - DNA, 6019 bp, Homo sapiens
  source 1..6019: mol_type = other DNA
ggggaggagccaagatggccgaataggaacagctccggtctacagctcccagcgtgagcgacgcagaagacgggtgatttctgcatttccatctgaggtactgggtgcatctcactagggagtgccagacagtgggcgcaggccagtgggtgcgcgcaccgtgcgcgagccgaagcagggcgaggcattgcctcacctgggaagcgcaaggggtcagggagttccctttccgagtcaaagaaaggggtgacggatgcacctggaaaatcgggtcactcacacccaaatattgcgcttttcagaccggcttaaaaaacggcgcaccacgagactatatcccacacctggctcggagggtcctacgcccacggaatctggctgattgctagcacagcagtctgagatcaaactgcaaggtggcagcgaggctgggggaggggcgcccgccattgcccaggcttgcttaggtaaacaaagcggcccggaagctcgaactgggtggagcccaccacagctcaaggaggcctgcctgcctctgtaggctccacctctgggggcagggcacagacaaacaaaaagacagcagtatcctctgcagacttaaatgtccctgtctgacagctttgaagagagcagtggttctcccagcacgcagctggagatctgagaaccggcagactgcctcctcaaatgggtccctgacccctgacccccgagcagcctaactgggaggcaccccccagcaggggcacactgacacctcacacagcagggcattccaacagacctgcagctgagggtcctgtctgttagaaggaaaactaacaaacagaaaggacatccacaccgaaaacccatctgtacatcaccatcatcaaagaccaaaagtagataaaaccacaaagatggggaaaaaacagaacagaaaaactggaaactctaaaacgcagagcgtctctcctcctccaaaggaacgcagttcctcaccagcaacggaacaaagctggatggagaatgactttgacgagctgagagaaggcttcagacgatcaaattactctgagctacgggaggacattcaaaccaaaggcaaagaagttgaaaactttgaaaaaaatttagaagaatgtataactagaataaccaatacagagaagtgcttaaaggagctgatggagctgaaaaccaaggctcgagaactacgtgaagaatgcagaagcctcaggagccgatgcgatcaactggaagaaagggtatcagcgatggaagatgaaatgaatgaaatgaagcgagaagggaagtttagagaaaaaagaataaaaagaaatgagcaaagcctccaagaaatatgggactatgtgaaaagaccaaatgtatgtctgattggtgtacctgaaagtgatggggagaatggaaccaagttggaaaacactctgcaggatattatccaggagaacttccccaatctagcaaggcaggccaacgttcagattcaggaaatacagagaacgccacaaagatactcctcgagaagagcaactccaagacacataattgtcagattcaccaaagttgaaatgaaggaaaaaatgttaagggcagccagagagaaaggtcaggttaccctcaaagggaagcccatcagactaacagcggatctctcggcagaaaccctacaagccagaagagagtgggggccaatattcaatattcttaaagaaaagaattttcaacccagaatttcatatccagccaaactaagcttcataagtgaaggagaaataaaatactttacagacaagcaaatgctgagagattttgtcaccaccaggcctgccctaaaagagctcctgaaggaagtgctaaacatggaaaggaacaaccggtaccagccgctgcaaaatcatgccaaaatgtaaagaccatcgagactaggaagaaactgcatcaactaacaagcaaaatcaccagctaacatcataatgacaggatcaaattcacacataacaatattaactttaaatatacatggactaaatgctccaattaaaagacacagactggcaaattggataaagagtcaagatccatcagtgtgctgtattcaggaaacccatctcacgtgcagagacacacataggctcaaaataaaaggatggaggaagatctaccaagcaaatggaaaacaaaaaaaggcaggggttgcaatcctagtctctgataaaacagactttaaaccaacaaagatcaaaagagacaaagaaggccattacataatggtaaagggatcaattcaaaaagaagagctaattatcctaaatatatatgcacccaatacgggagcacccagattcataaagcaagtcctgagtgacctacaaagagacttagactcccacacattaataatgggagactttaacaccccactgtcaacattagacagatcaacgagacagaaagtcaacaaggatacccaggaattgaactcagctctgcaccaagcggacctaatagacatctacagaactctccaccccaaatcaacagaatatacatttttttcagcaccacaccacacctattccaaaattgaccacatagttggaagtaaagctctcctcagcaaatgtaaaagaacagacattataacaaactatctctcagaccacagtgcaatcaaactagaactcaggattaagaatcccactcaaagccgctcaactacatggaaactgaacaacctgctcttgaatgactactgggtacataacgaaatgaaggcagaaataaagatgttctttgaaactaacgagaacaaagacacaacataccacaatctctgggacacattcaaagcagtgtgtagagggaaatttatagcactaaatgcccacaagagaaagcaggaaagatccaaaattgacaccctaacatcacaattaaaagaactagaaaagcaagagcaaacacattcaaaagctagcagaaggcaagaaacaactaaaatcagagcagaactgaaggaaatagagacacaaaaagcccttcaaaaaatcagtgaatccaggagctggttttttgaaaggatcaacaaaattgatagaccactagcaagactaataaagaaaaaaagagagaagaatcaaatagacacaataaaaaatgataaaggggatatcaccaccgatcccacagaaatacaaactaccatcaaagaatactacaaacacctctatgcaaataaactagaaaatctagaagaaatggatacattcctcgacacatacactctcccaagactaaaccaggaagaagttgaatctctgaatagaccaataacaggagctgaaattgtggcaataatcaatagtttaccaaccaaaaagagtccaggaccagatggattcacagccgaattctaccagaggtacaaggaggaactggtaccattccttctgaaactattccaatcaatagaaaaagagggaatcctccctaactcattttatgaggccagcatcattctgataccaaagccgggcagagacgcaaccaaaaaagagaattttagaccaatatccttgatgaacattgatgcaaaaatcctcaataaaatactggcaaaccgaatccagcagcacatcaaaaagcttatccaccatgatcaagtgggcttcatccgtgggatgcaaggctggttcaatatacgcaaatcaataaatgtaatccagcatataaacagaaccaaagacaaaaaccccatgattatctcaatagatgcggaaaaagcctttgacaaaattcaacaacccttcatgctaaaaactctcaataaattaggtattgatgggacgtatttcaaaataataagagctatctatgacaaacccacagccaatatcatactgaatgggcaaaaactggaagcattccctttgaaaactggcacaagacagggatgccctctctcaccactcctattcaacatagtgttggaagttctggccagggcaattagacaggagaaggaaataaagggtattcaattaggaaaagaggaagtcaaattgtccctgtttgcagatgacatgattgtatatctagaaaaccccatcgtctcagcccaaaatctccttaagctgataagcaacttcagcaaagtctcaggatacaaaatcaatgtacaaaaatcacaagcattcttatacaccaacaacagacagagagccaaatcatgagtcaactcccattcacaattgcttcaaagagaataaaatacctaggaatccaacttaaaagggatgtgaagcaactcttcaaggagaactacaaaccactgctcaaggaaataaaagaggatacaaacaaatggaagaacattccatgctcatgggtaggaagaatcaatattgtgaaaatggccatactgcccaaggtaatttacagattcaatgccatccccatcaaggtaccaatgactttcttcacagaattggaaaaaactactttaaagttcatatggaaccaaaaaagggcttgcattgccaagacaatcctaagccaaaagaacaaagctggaggcatcacactacctgacttcaaactatactacaaggctacagtaaccaaaacagcatggtactggtaccaaaacagagatatagatcaatggaacagaacagagccctcagaaataacgccgcatacctacaactatctgatctttgacaaacctgagaaaaacaagcaatggggaaaggaatccctatttaataaatggtgctgggaaaactggctagccatatgtaggaagctgaaactggatcccttccttacaccttatacaaaaatcaattcaagatggattaaagactgaaacataagacctaaaaccataaaaaccctagaagaaaacctaggcattaccattcaggacttaggcatgggcaaggacttcatgtccaaaacaccaaaagcaatggcaacaaaagacaaaattgacaaatgggatctaattaaactaaagagcttctgcacagcaaaagaaactaccatcagagtgaacaggcaacctacagaatgggagaaaattttcgcaacctactcatctgacaaagggctaatatccagaatctacagtgaacacaaacaaatttacaagaaaaaaacaaacaaccccatcaaaaagtgggcgaaggacatgaacagacacttctcaaaagaagacatttatgcagccaaaaaacacatgaaaaaatgctcatcatcactggccatcagagaaatgcaaatcaaaaccactatgagatatcatctcacaccagttagaatggcaatcattaaaaagtcaggaaacaacatgtgctggagaggatgtggagaaataggaacacttttacactgttggtgggactgtaaactagttcaaccattgtggaagtcagtgtggtgattcctcagggatctagaactagaattaccatttgacccagccatcccattactgggtatatacccaaaggactataaatcatgctgctataaagagacatgcacacatatgtttattgcggcattattcacaatagcaaagacttggaaccaagccaaatgtccaacaatgatagactggattaagaaaatgtggcacatatacaccatggaatattatgcagccataaaaaagggtgagttcatgtcctttgtatggacatggatgaaattggaaatcagcattctcagtaaactatcgcaagatcaaaaaaccaaacaccgcatattctcactcataggtgggaactgaacaatgagatcacatggacacaggaaggggaatatcacactctggggactgtggtggggtggggggaggggggagggatagcattgggagatatacctaatgctagatgacgagttagtgggtgcagtgcaccagcatggcacatgtatacatatgtaactaacctgcacaatgtgcacatgtaccctaaaacttataataaaaaaataaaaa

SEQ ID NO: 610 - DNA, 778 bp, Homo sapiens
  source 1..778: mol_type = other DNA
tattatcttcaatagaaaaagagcgttcttcaaatgaaaaaaagaaaagcttgccaaaagacaaatattaatagatccaagatttaaaattagcatgttacaaaagaaatatggctaatacatttaaaaaatattcatcctccctagaaatgaaacaaaaatacaaaaccaaatagtaccattattttacccatcaggtaggaaactttaaaacaaattttacacttaatatttgtacatgtatctgaaacaagaatgctcatactttactggatagagttggctgttaccttttagccagagataccaaatgtcttaaaacatgtatacatggcccttttaatctcactcagcaatgccacgtctaagtacggaccctgaggaaataatgaaacatacaaaaatatgtatgtaatggagacagatagtagtcacagttttaattataatggcaagtcatgggaggcaagccaatgtttaccaataaaacattagttaataaattatgatacaaccaagtagttactaaaagctaagtttccaaagaatatttaaaagtactttttaaatgttcacagtacataggagaaaaaagggttaaagaaagaactgcatacatattctgatctcataggtgggatcaacccaaagaagcctggaaaaacatataccaaaatgttgaaattgattatttctgggagtagataacaggtgattttctgcttttcttttacttttgttttctctgagatcttttttttgcatgtaatgcttttat

SEQ ID NO: 611 - DNA, 1538 bp, Homo sapiens
  source 1..1538: mol_type = other DNA
tttcttcacagaattggaaaaaactactttaaagttcatatggaaccaaaaaagagcccgcatcgccaagtcaatcctaagccaaaagaacaaagctggaggcatcacactacctgacttcaaactatactacaaggctacagtaaccaaaacagcaaggtactggtaccaaaacagagatatagatcaatggaacagaacagagccctcagaaataatgccgcatatctacaactatctgatctttgacaaacctgagaaaaacaagcaatggggaaaggattccctatttaataaatggtgctgggaaaactggctagccatatgtagaaagctgaaactggatcccttccttacaccttatacaaaaatcaattcaagatggattaaagatttaaacgttagacctaaaaccataaaaaccctagaagaaaacctaggcattaccattcaggacataggcgtgggcaaggacttcatgtccaaaacaccaaaagcaatggcaataaaagccaaaattgacaaatgggatctaattaaactgaagagcttctgcacagcaaaagaaactaccatcagagtgaacaggcaacctacaacatgggagaaaattttcacaacctactcatctgacaaagggctaatatccagaatctacaatgaactcaaacaaatttacaagaaaaaaacaaacaaccccatcaaaaagtgggcgaaggacatgaacagacacttctcaaaagaagacatttatgcagccaaaaaacacatgaagaaatgctcatcatcactggccatcagagaaatgcaaatcaaaaccactacgagatatcatctcacaccagttagaatggcaatcattaaaaagtcaggaaacaacaggtgctggagaggatgtggagaaatagggacacttttacactgttggtgggactgtaaactagttcaaccattgtggaagtcagtgtggcgattcctcagggatctagaactagaaataccatttgacccagccatcccattactgggtatatacccaaagggctataaatcatgctgctataaagacacatgcacacgtatgtttattgcggcactattcacaatagcaaagacttggaaccaacccaaatgtccaacaatgatagactggattaagaaaatgtggcacatatacaccatggaatactatgctgccataaaaaatgatgagttcatatcctttgtagggacatggatgaaattggaaaccatcattctcagtaaactatcgcaagaacaaaaaaccaaacaccgcatattctcactcataggtgggaattgaacaatgagatcacatggacacaggaaggggaatatcacactctggggactgtggtggggttgggggaggggggagggatagcattgggagagatacctaatgctagatgacacattagtgggtgcagcgcaccagcatggcacatgtatacatatgtaactaacctgcacaatgtgcacatgtaccctaaaacttagagtataataaaaaaaaa

SEQ ID NO: 612 - DNA, 6029 bp, Homo sapiens
  source 1..6029: mol_type = other DNA
ggggaggagccaagatggccaaataggaacagctccggtctacagctcccagcgtgagcgacgcagaagacgggtgatttctgcatttccatctgaggtaccaggttcatctcactagggagtgccagacagtgggcgcaggccagtgtgtgtgcgcactgtgcgtgagccgaagcagggcgaggcattgcctcacctgggaagcgcaaggggtcagggagttccctttccgagtcaaagaaaggggtgacggacgcacctggaaaatcgggtcactcccacccgaatattgcgcttttcagaccggcttaagaaacggcgcaccacgagactatatcccacacctggctcagagggtcctacgcccacggaatcgagctgattgctagcacagcagtctgagatcaaactgcaaggtggcaacgaggctgggggaggggcgcccgccattgcccaggcttgcttaggtaaacaaagcagctgggaagctcgaactgggtggagcccaccacagctcaaggaggcctgcctgcctctgtaggctccacctctgggggcagggcacagacaaacaaaaagacagcagtaacctctgcagacttaagtgtccctgtctgacagctttgaagagagcagtggttctcccagcacgcagctggagatctgagaacgggcagactgcctcctcaagtgggtccctgacccctgacccccaagcagcctaactgggaggcaccccccagcaggggcacactgacacctcacacagcagggtattccaacagacctgcagctgagggtcctgtctgttagaaggaaaactaacaaccagaaaggacatctacaccgaaaacccatctgtacatcaccatcatcaaagaccaaaagtagataaaaccacaaagatggggaaaaaacagaacagaaaaactggaaactctaaaacgcagagtgcctctcctcctccaaaggaacgcagttcctcaccagcaacagaacaaagctggatggagaatgattttgacgagctgagagaagaaggcttcagacgatcaaattactctgagctacgggaggacattcaaaccaaaggcaaagaagttgaaaactttgaaaaaaatttagaagaatgtataactagaataaccaatacagagaagtgcttaaaggagctgatggagctgaaaaccaaggctcgagaactatgtgaagaatgcagaagcctcaggagccgatgcgatcaactggaagaaagggtatcagcaatggaagatgaaatgaatgaaatgaagcaagaagggaagtttagagaaaaaagaataaaaagaaatgagcaaagcctccaagaaatatgggactatgtgaaaagaccaaatctacgtctgattggtgtacctgaaagtgatgtggagaatggaaccaagttggaaaacactctgcaggatattatccaggagaacttccccaatctagcaaggcaggccaacgttcagattcaggaaatacagagaatgccacaaagatactcctcgagaagagcaactccaagacacataattgtcagattcaccaaagttgaaatgaaggaaaaaatgttaagggcagccagagagaaaggtcaggttaccctcaaaggaaagcccatcagactaacagcggatctctcggcagaaaccctacaagccagaagagagtgggggccaatattcaacattcttaaagaaaagaattttcaacccagaatttcatatccagccaaactaagcttcataagtgaaggagaaataaaatactttatagacaagcaaatgctgagagattttgtcaccaccaggcctgccctaaaagagctcctgaaggaagcgctaaacatggaaaggaacaaccggtaccagccgctgcaaaatcatgccaaaatgtaaagaccatcgagactaggaagaaactgcatcaactaatgagcaaaatcaccagctaacatcataatgacaggatcaaattcacacataacaatattaactttaaatataaatggactaaattctgcaattaaaagacacagactggcaagttggataaagagtcaagacccatcagtgtgctgtattcaggaaacccatctcatgtgcagagacacacataggctcaaaataaaaggatggaggaagatctaccaagccaatggaaaacaaaaaaaggcaggggttgcaatcctagtctctgataaaacagactttaaaccaacaaagatcaaaagagacaaagaaggccattacataatggtaaagggatcaattcaacaagaggagctaactatcctaaatatgtatgcacccaatacaggagcacccagattcataaagcaagtcctgagtgacctacaaagagacttagactcccacacattaataatgggagactttaacaccccactgtcaacattagacagatcaacgagacagaaagtcaacaaggatacccaggaattgaactcagctctgcaccaagcagacctaatagacatctacagaactctccaccccaaatcagcagaatatacatttttttcagcaccacaccacacctattccaaaattgaccacatagttggaagtaaagctctcctcagcaaatgtaaaagaacagaaattataacaaactatctctcagaccacagtgcaatcaaactagaactcaggattaagaatctcactcaaagccgctcaactacatggaaactgaacaacctgctcctgaatgactactgggtacataacgaaatgaaggcagaaataaagatgttctttgaaaccaacgagaacaaagataccacataccagaatctctgggacgcattcaaagcagtgtgtagagggaaatttatagcactaaatgcctacaagagaaagcaggaaagatccaaaattgacaccctaacatcacaattaaaagaactagaaaagcaagagcaaacacattcaaaagctagcagaaggcaagaaataactaaaatcagagcagaactgaaggaaatagagacacaaaaaacccttcaaaaaatcaatgaatccaggagctggttttttgaaaggatcaacaaaattgatagaccgctagcaagactaataaagaaaaaaagagagaagaatcaaatagacacaataaaaaatgataaaggggatatcaccaccgatcccacagaaatacaaactaccatcagagaatactacaaacacctctacgcaaataaactagaaaatctagaagaaatggatacattcctcgacacatacactctcccaagactaaaccaggaagaagttgaatctctgaatagaccaataacaggctctgaaattgtggcaataatcaatagtttaccaaccaaaaagagtccaggaccagatggattcacagccgaattctaccagaggtacaaggaggaactggtaccattccttctgaaacgattccaatcaatagaaaaagagggaatcctccctaactcattttatgaggccagcatcattctgataccaaagccgggcagagacacaaccaaaaaagagaattttagaccaatatccttgatgaacattgatgcaaaaatcctcaataaaatactggcaaaccgaatccagcagcacatcaaaaagcttatccaccatgatcaagtgggcttcatccctgggatgcaaggctggttcaatatacgcaaatcaataaatgtaatccagcatataaacagagccaaagacaaaaaccacatgattatctcaatagatgcagaaaaagcctttgacaaaattcaacaacccttcatgctaaaaactctcaataaattaggtattgatgggacgtatttcaaaataataagagctatctatgacaaacccacagccaatatcatactgaatgggcaaaaactggaagcattccctttgaaaactggcacaagacagggatgccctctctcaccgctcctattcaacatagtgttggaagttctggccagggcaatcaggcaggagaaggaaataaagggtattcaattaggaaaagaggaagtcaaattgtccctgtttgcagacgacatgattgtttatctagaaaaccccatcgtctcagcccaaaatctccttaagctgataagcaacttcagcaaagtctcaggatacaaaatcaatgtacaaaaatcacaagcattcttatacaccaacaacagacaaacagagagccaaatcatgagtgaactcccattcacaattgcttcaaagagaataaaatacctaggaatccaacttacaagggatgtgaaggacctcttcaaggagaactacaaaccactgctcaaggaaataaaagaggacacaaacaaatggaagaacattccatgctcgtgggtaggaagaatcaatatcgtgaaaatggccatactgcccaaggtaatttacagattcaatgccatccccatcaagctaccaatgactttcttcacagaattggaaaaaactactttaaagttcatatggaaccaaaaaagagcccgcatcgccaagtcaatcctaagccaaaagaacaaagctggaggcatcacactacctgacttcaaactatactacaaggctacagtaaccaaaacagcatggtactggtaccaaaacagagatatagatcaatggaacagaacagagccctcagaaataatgccgcatatctacaactatctgatctttgacaaacctgagaaaaacaagcaatggggaaaggattccctgtttaataaatggtgctgggaaaactggctagccatatgtagaaagctgaaactggatcccttccttacaccttatacaaaaatcaattcaagatggattaaagatttaaacgttagacctaaaaccataaaaaccctagaagaaaacctaggcattaccattcaggacataggcgtgggcaaggacttcatgtccaaaacaccaaaagcaatggcaacaaaagccaaaattgacaaatgggatctaattaaactcaagagcttctgcacagcaaaagaaactaccatcagagtgaacaggcaacctacaacatgggagaaaattttcgcaacctactcatctgacaaagggctaatatccagaatctacaatgaactcaaacaaatttacaagaaaaaaacaaacaaccccatcaaaaagtgggcgaaggacatgaacagacacttctcaaaagaagacatttatgcagccaaaaaacacatgaagaaatgctcatcatcactggccatcagagaaatgcaaatcaaaaccactatgagatatcatctcacaccagttagaatggcaatcattaaaaagtcaggaaacaacaggtgctggagaggatgtggagaaataggaacactttcacactgttggtgggactgtaaactagttcaaccattgtggaagtcagtgtggcgattcctcagggatctagaactagaaataccatttgacccagccatcccattactgggtatatacccaaaggactataaatcatgctgctataaagacacatgcacacgtatgtttattgaggcactattcacaatagcaaagacttggaaccaacccaaatgtccaacaatgatagactggattaagaaaatgtggcacatatacaccatggaatactatgcagccataaaaaatgatgagttcatgtcctttgtagggacatggatgaaattggaaaccatcattctcagtaaactatcgcaagaacaaaaaaccaaacaccgcatattctcactcataggtgggaattgaacaatgagatcacatggacacaggaaggggaatatcacactctggggactgtggtggggtcgggggaggggggagggatagcattgggagatatacctaaggctagatgatgagttagtgggtgcagcgcaccagcatggcacatgtatacatatgtaactaacctgcacaatgtgcacatgtaccctaaaacttagagtataataaaaaaaaaaa

SEQ ID NO: 613 - DNA, 3056 bp, Homo sapiens
  source 1..3056: mol_type = other DNA
aatattaaaactaagcagaactgaaggaaatagagacacaaaaaacccttcaaaaaatcaatgaatccaggagctggttttttgaaaggatcaacaaaattgatagaccgctagcaagactaataaagaaaaaaagagagaagaatcaaatagacacaataaaaaatgataaaggggatatcaccaccgatcccacagaaatacaaactaccatcagagaatactacaaacacctctacgcaaataaactagaaaatctagaagaaatggatacattcctcgacacatacactctcccaagactaaaccaggaagaagttgaatctctgaatagaccaataacaggctctgaaattgtggcaataatcaatagtttaccaaccaaaaagagtccaggaccagatggattcacagccgaattctaccagaggtacatggaggaactggtaccattccttctgaaactattccaatcaatagaaaaagagggaatcctccctaactcattttatgaggccagcatcattctgataccaaagccgggcagagacacaaccaaaaaagagaattttagaccaatatccttgatgaacattgatgcaaaaatcctcaataaaatactggcaaaccgaatccagttgcacatcaaaaagcttatccaccatgatcaagtgggcttcatccctgggatgcaaggctggttcaatatacgcaaatcaataaatgtaatccagcatataaacagagccaaagacaaaaaccacatgattatctcaatagatgcagaaaaagcctttgacaaaattcaacaacccttcatgctaaaaactctcaataaattaggtattgatgggacgtatttcaaaataataagagctatctatgacaaacccacagccaatatcatactgaatgggcaaaaactggaagcattccctttgaaaaccggcacaagacagggatgccctctctcaccgctcctattcaacatagtgttggaagttctggccagggcaatcaggcaggagaaggaaataaagggtattcaattaggaaaagaggaagtcaaattgtccctgtttgcagacgacatgattgtatatctagaaaaccccatcgtctcagcccaaaatctccttaagctgataagcaacttcagcaaagtctcaggatacaaaatcaatgtacaaaaatcacaagcattcttatacaccaacaacagacaaacagagagccaaatcatgggtgaactcccattcgtaattgcttcaaagagaataaaatacctaggaatccaacttacaagggatgtgaaggacctcttcaaggagaactacaaaccactgctcaaggaaataaaagaggacacaaacaaatggaagaacattccatgctcatgggtaggaagaatcaatatcgtgaaaatggccatactgcccaaggtaatttacagattcaatgccatccccatcaagctaccaatgactttcttcacagaattggaaaaaactactttaaagttcatatggaaccaaaaaagagcccgcattgccaagtcaatcctaagccaaaagaacaaagctggaggcatcacactacctgacttcaaactatactacaaggctacagtaaccaaaacagcatggtactggtaccaaaacagagatatagatcaatggaacagaacagagccctcagaaataatgccgcatatctacaactatctgatctttgacaaacctgagaaaaacaagcaatggggaaaggattccctatttaataaatggtgctgggaaaactggctagccatatgtagaaagctgaaactggatcccttccttacaccttatacaaaaatcaattcaagatggattaaagatttaaacgttaaacctaaaaccataaaaaccctagaagaaaacctaggcattaccattcaggacataggcgtgggcaaggacttcatgtccaaaacaccaaaagcaatggcaacaaaagacaaaattgacaaatgggatctaattaaactaaagagcttctgcacagcaaaagaaactaccatcagagtgaacaggcaacctacaacatgggagaaaattttcgcaacctactcatctgacaaagggctaatatccagaatctacaatgaactcaaacaaatttacaagaaaaaaacaaacaaccccatcaaaaagtgggtgaaggacatgaacagacacttctcaaaagaagacatttatgcagccaaaaaacacatgaagaaatgctcatcatcactggccatcagagaaatgcaaatcaaaaccactatgagatatcatctcacaccagttagaatggcaatcattaaaaagtcaggaaacaacaggtgctggagaggatgcggagaaataggaacacttttacactgttggtgggactgtaaactagttcaaccattgtggaagtcagtgtggcgattcctcagggatctagaactagaaataccatttgacccagccatcccattactgggtatatacccaaatgagtataaatcatgctgctataaagacacatgcacacgtatgtttattgcggcactattcacaatagcaaagacttggaaccaacccaaatgtccaacaatgatagactggattaagaaaatgtggcacatatacaccatggaatactatgcagccataaaaaatgatgagttcatatcctttgtagggacatggatgaaattggaaaccatcattctcagtaaactatcgcaagaacaaaaaaccaaacaccgcatattctcactcataggtgggaattgaacaatgagatcacatggacacaggaaggggaatatcacactctggggactgtggtggggtcgggggaggggggagggatagcattgggagatatacctaatgctagatgacacattagtgggtgcagcgcaccagcatggcacatgtatacatatgtaactaacctgcacaatgtgcacatgtaccctaaaacttagagtataataaaaaaaaaaaaaaaaaaaaaaaaaaaaaaaaaaaagaaaa

SEQ ID NO: 614 - DNA, 395 bp, Homo sapiens
  source 1..395: mol_type = other DNA
acagaagacatataaaattatataaactaagtaaacatacaagaagcttttttaagagaaacaagaaataaatgtatttaattttaaaacagccataataaaagtagacttgataaataaaaccgaaaaccacttctttgaaaagaccgttaaaaaaacctctgagaagtcaagcaaaagagaaagaaaaggcacaaattttaaaatgttagatttagaaaaatggcataataaccaacgtggagaagctgcttcaaatcaaggagacgggaggccagcttcattccatgggaggccagcttcattccagtaggttctgtttcacctggatgaaatggaagattttcttggaatgtataaattggcttagcaggaggcagaaaacctgaataaac

SEQ ID NO: 615 - DNA, 407 bp, Homo sapiens
  source 1..407: mol_type = other DNA
aacagaagacataaaattatataaactaagtaaacatacaagaagcttttttaagggaaacaagaaataaatgtatttaattttaaaacagccataataaaagtagacttgataaataaaacccaaaaccacttctttgaaaagaccgttaaaaaaacctctgagaagtcaagcaaaagagaaagaaaaggcacaaattttaaaatgttagatttagaaaaatggcataataaccaacgtgcagaagctgcttcaaatcaaggagacgggaggccagcttcattccatgggaggccagcttcattccagtaggttctgtttcacctggatgaaatggaagattttcttggaatgtataaattggcttagcaggaggcagaaaacctgaataaacagaacaaacagaa

SEQ ID NO: 616 - DNA, 484 bp, Homo sapiens
  source 1..484: mol_type = other DNA
tatatatggaaaagagaaggtccaagaatatcaaagacattgaagaagaggaaagatttgtcctgccaaatatcagaacttttataaagctacagcaattaagacagtgtggtcctcactgataaactgactaatgaaacagaatagagagctcccaagcaaatctctacaaatttaatcttcgatacgtgatgtaggtgacatggcagatcagtaaggaaagaaaggacttttcaataaatagaatagaaaaataatggttattgatataagaaacaaaatgaaattatattcctacttcactctatatacaaacattaaattccagaggaccaaagacttacatgtcagaaacaaaactttaaaacttttagtagaaaatgtaagtgaatgggacacaaaaagccatttaaccattaaaaaagattagacattttgactatcacaaaattaagaactttttacatcaaaaagtggaaagata

SEQ ID NO: 617 - DNA, 2696 bp, Homo sapiens
  source 1..2696: mol_type = other DNA
caaaatggctgactagaggcattttgtactcgcctcttccattaagaacaaaaatagagagtagataatcacactttgaatagattatccaagacagaacactggaattcacggaaaagagacaggaaacaaagtaaggaaggaaaaagaagcaaggcagcctgttcagctgggattggctgggaactgagagagaccccccagcatggggaaaaggtaagtgagagaccctcagtggtccacatttccaccatgaaaggattctgcagttctagccacgggagagctcctcagcccttgcagtccctgaaacttaacataggaggtgccaggagattgttcaatggaactgctccagaacggagctcgcactgggtcccccacacttcctgagaacaaaacagctacagcaagatgccatttaaagcccaccccccaaaagactgtacactgtcctggagtccctgagtgccagggctgaggtgtaagagaactgcagactgttttccccagagctgaggcataagtgactgggttactgcagctggggctgaagcactacaaggcatgtgctcctgttgttgtggctgaggtacaactatggtgccagctaccatagcaggggctgaggcacaagtgccactggagctgagtgaggtgtgagtggcacatgcattccccactggccagcaaccctgtgctctccaatggaaggtagtagtacagcactgccactccctatccaagcattctgaaggtggcctagggattgccctgcacctgcccaccttggttggcacctgcacacatcatagggagcctgaagatgagactgcccagcctggctttacaccaccacctccgtggccagagcacacagtctaggggctgggggattgtccagcctagtccaccaccattggcacttgaatactcctcttgggtacctgaggttggggcttacccacttggccactactacctgtatgtaccacttgtgggcctgcagaatgggccgcccagcctgttgcagccactgccaacacaagcacatatcacttgggacccagagggtcatttcaacactgtcactgccatctcccatgccacgccagctgcccaggggcctgagaacctgatcacatgcctgggaactgctgccactactgacatctgagtaagccacccgaaagcccaagaatcagcctgcttgaacccactaacactggtgccattgtatgctcctctgaggtccaaagacaggcatgctctgtccactgctgctaccactggtgcctggagaatggcccacctggcattccagtccttagcaaaattttaccatagcttccactagtaactactcagccactgaggaaatcacagataccactgatgctatttatagccaaagaaatcatacagagactacactactgcacataccaagaatcaaagccaaagtgtcctacccaaacaacaccatagatacgtctaggaaaaagtcctcccttacaaatgcaaatgcaaaaaattagaagaaacaactgttacaccagatgtgcagatatcaacataaggacacaaacatgaaaaagcaaggaaatatgacacctcagaaggaacacaataaatttcctgcaatagattccaataaaaaataaactcacaaaatcccagaaaaagaattcaaattattgagtgtaaggaagctcaatgagatgtaagagaatgtgaaaaagaaaaacaatttgggaaatgaatgataattttatcaaagagatatatgtcataaaaaagcaaatgctggaatagaagacttcatgaaacaaagtacagaatacaattgaaagcttcaacaatatattagatcaagcagaaaaaaaagtcttagagctagaacacaggtcttttgacataactcagaaataaaaaagaataaaaaatgagcaaagcctttgtgacatatgggacacaataaagcaactacatatctaaattattgggatcccagagggttaagagaaaatgaaagagtgagaaaacctatttaatgaaataatattaataggtgaaaacttcccaaatctcacaagagatttagacatctagatataggaggccctgatagcctctaaatggatacagtgcaaaaaggtattctctatggcacattatagtcagactctctaaagtcagataattctaaggacagcaagagaaatgtgtgtaagcaactataaaggaagccccatcagactaacagtggatttcagcagaaaccttacagatcaggagaaaatgagataatatgttgacagggctgaaggggaaaaaaagtaagccaaggatactatgtctagcaaaattatccttcataaatgaaggagaaataaagtatttccaagacaggcaaaagctgagagaattgatcaccactagactggccctacaagaaatgctcacaagagtcctaaacatggaagtgaaaacatgacatttaacactatgtaaaacacacaaaagtataaaactcactggcaaagcaaacacacagatgaggaaaagactcaaatgctaccactacagaaaactaccagagtacaatgccaaacaaaagaaaaaggaaaaaaatatataaaacaactagaaaacaacagtataacaataacaaaacctcacatatcaataatcct

SEQ ID NO: 618 - DNA, 164 bp, Homo sapiens
  source 1..164: mol_type = other DNA
gggtttgaatccagactccaccactcgctagggctgcgaccctggtgagtgactctatctccctgtacaaaatggggaggacgggagagaggatgcttgaggtggcacatgaaaggccttggcatggtgcctgacacacggttgacactcagtgagtggtggct

SEQ ID NO: 619 - DNA, 482 bp, Homo sapiens
  source 1..482: mol_type = other DNA
tttgtggttcccctcatcaagacatgtagtctgtttctcatcccttgaatctgggtaaagccttgtgatttgctctgaccaaaagaacttagcagaagtgacactgtcctagtcccagttccaggccaagaactcaagaagtctttcagcttctactctcactctctttggaatcctgaagccatcatgtgaataagcctgagctagcctgctggagaggccacatggaggagaaccaagcaattccagccaacagcctgtcacctgccaggcaagtgagtaaggctatcctagaccatccaggcccagctgaggtaacagctgaccttagctccatgagggatcccaggtgtgagcagcagaactgccctgttgagcccagcccaaattgccaacccataggattgtgggaaaatacagggtttgtttctagctgccaagtttggggatggtttgttacacagcaaaagctaactggtaca

SEQ ID NO: 620 - DNA, 151 bp, Homo sapiens
  source 1..151: mol_type = other DNA
gggtctgactctgggcacccctctcaccagctacaaggccttggactcactgtacagtgtgggagccccagttcccacctctgtgacaataggatcatggccttacccttgaagcattaccgagaaggagaacagagatgggcttgaagag

SEQ ID NO: 621 - DNA, 6017 bp, Homo sapiens
  source 1..6017: mol_type = other DNA
gaggaggagccaagatggccgaataggaacagctccggtctacagctcccagcgtgagcgacgcagaagacgggtgatttctgcatttccatctgaggtaccgggttcatctcactagggagtgccagacagtgggcgcaggccagtgtgtgtgcgcactgtgcgcgagccgaagcagggcgaggcattgcctcacttgggaagcgcaaggggtcagggagttccctttccgagtcaaagaaaggggtgacggacgcacctggaaaatcgggtcactcccacccgaatattgcgcttttcagaccggcttaaaaaacggcgcaccacgagactatatcccacacctggctcagagggtcctatgcccacggaatctcgctgattgctagcacagcagtctgagatcaaactgcaaggcggcaacgaggctgggggaggggcgcccgccattgcccaggcttgcttaggtaaacaaagcagccgggaagctcgaactgggtggagcccaccacagctcaaggaggcctgcctgcctctgtaggctccacctctgggggcagggcacagacaaacaaaaaggcagcagtaacctctgcagacttaagtgtccctgtctgacagctttgaagagagcagtggttctcccagcacgcagctggagatctgagaacgggcagactgcctcctcaagtgggtccctgacccctgacccccgagcagcctaactgggaggcaccccccagcagggtcacacggcagggtattccaacagacctgcagctgagggtcctgtctgttagaaggaaaactaacaaccagaaaggacatccacaccaaaaacccatctgtacatcaccatcatcaaagaccaaaagtagataaaaccacaaagatggggaaaaaacagaacagaaaaactggaaactctaaaacgcagagcgcctctcctcctccaaaggaacgcagttcctcaccagcaacagaacaaagctggatggagaatgattttgacgagctgagagaagaaggcttcagacgatcaaattactctgagctacgggaggacattcaaaccaaaggcaaagaagttgaaaactttgaaaaaaatttagaagaatgtataactagaataaccaatacagagaagtgcttaaaggagctgatggagctgaaaaccaaggctcgagaactacgtgaagaatgcagaagcctcaggagccgatgcgatcaactggaagaaagggtatcagcaatggaagatgaaatgaatgaaatgaagcgagaagggaagtttagagaaaaaagaataaaaagaaatgagcaaagcctccaagaaatatgggactatgtgaaaaggccaaatctacgtctgattggtgtacctgaaagtgatgtggagaatggaaccaagttggaaaacactctgcaggatattatccaggagaacttccccaatctagcaaggcaggccaacgttcagattcaggaaatacagagaacgccacaaagatactcctcgagaagagcaactccaagacacataattgtcagattcaccaaagttgaaatgaaggaaaaaatgttaagggcagccagagagaaaggtcgggttaccctcaaagggaagcccatcagactaacagcggatctctcggcagaaaccctacaagccagaagagagtgggggccaatattcaacattcttaaagaaaagaattttcaacccagaatttcatatccagccaaactaagcttcataagtgaaggagaaataaaatcctttacagacaggcaaatgctgagagattttgtcaccaccaggcctgccctaaaagagctcctgaaggaagcgctaaacatggaaaggaacaaccggtaccagccgctgcaaaatcatgccaaaatgtaaagaccatcgagactaggaagaaactgcatcaactaacgagcaaaatcaccagctaacatcataatgacaggatcaaattcacacataacaatattaactttaaatgtaaatggactaaattctccaattaaaagacacagactggcaagttggataaagagtcaagacccatcagtgtgctgtattcaggaaacccatctcacgtgcagagacacacataggctcaaaataaaaggatggaggaagatctaccaagcaaatggaaaacaaaaaaaggcaggggttgcaatcctagtctctgataaaacagactttaaaccaacaaagatcaaaagagacaaagaaggccattacataatggtaaagggatcaattcaacaagaggagctaactatcctaaatatttatgcacccaatacaggagcacccagattcataaagcaagtcctgagtgacctacaaagagacttagactcccacacattaataatgggagactttaacaccccactgtcaatattagacagatcaacgagacagaaagtcaacaaggatacccaggaattgaactcagctctgcaccaaacagacctaatagacatctacagaactctccaccccaaatcaacagaatatacatttttttcagcaccacaccacacctattccaaaattgaccacatagttggaagtaaagctctcctcagcaaatgtaaaagaacagaaattataacaaactatctctcagaccacagtgcaatcaaactagaactcaggattaagaatctcactcaaagccgctcaactacatggaaactgaacaacctgctcctgaatgactactgggtacataacgaaatgaaggcagaaataaagatgttctttgaaaccaacgagaacaaagacacaacataccagaatctctgggacgcattcaaagcagtgtgtagagggaaatttatagcactaaatgcctacaagagaaagcaggaaagatccaaaattgacaccctaacatcacaattaaaagaactagaaaagcaagagcaaacacattcaaaagctagcagaaggcaagaaataactaaaatcagagcagaactgaaggaaatagagacacaaaaaacccttcaaaaaatcaatgaatctaggagctggttttttgaaaggatcaacaaaattgatagaccgctagcaagactaataaagaaaaaaagagagaagaatcaaatagacacaataaaaaatgataaaggggatatcaccaccgatcccacagaaatacaaactaccatcagagaatactacaaacacctctacgcaaataaactagaaaatctagaagaaatggatacattcctcgacacatacactctcccaagactaaaccaggaagaagttgaatctctgaatagaccaataacaggctctgaaattgtggcaataatcaatagtttaccaaccaaaaagagtccaggaccagatggattcacagccgaattctaccagaggtacaaggaggaactggtaccattccttctgaaactattccaatcaatagaaaaagagggaatcctccctaactcattttatgaggccagcatcattctgataccaaagccgggcagagacacaaccaaaaaagagaattttagaccaatatccttgatgaacattgatgcaaaaatcctcaataaaatactggcaaaccgaatccagcagcacatcaaaaagcttatccaccatgatcaagtgggcttcatccctgggatgcaaggctggttcaatatacgcaaatcaataaatgtaatccagcatataaacagagccaaagacaaaaaccacgtgattatctcaatagatgcagaaaaagcctttgacaaaattcaacaacccttcatgctaaaaactctcaataaattaggtattgatgggatgtatctcaaaataataagagctatctatgacaaacccacagccaatatcatactgaatgggcaaaaactggaagcattccctttgaaaactggcacaagacagggatgccctctctcaccactcctattcaacatagtgttggaagttctggccagggcaatcaggcaggagaaggaaataaagggtattcaattaggaaaagaggaagtcaaattgtccctgtttgcagacgacatgattgtttatctagaaaaccccatcgtctcagcccaaaatctccttaagctgataagcaacttcagcaaagtctcaggatacaaaatcaatgtacaaaaatcacaagcattcttatacaacaacaacagacaaacagagagccaaatcatgggtgaactcccattcacaattgcttcaaagagaataaaatacctaggaatccaacttacaagggatgtgaaggacctcttcaaggagaactacaaaccactgctcaaggaaataaaagaggacacaaacaaatggaagaacattccatgctcatgggtaggaagaatcaatatcgtgaaaatggccatactgcccaaggtaatttacagattcaatgccatccccatcaagctaccaatgactttcttcacagaattggaaaaaactactttaaagttcatatggaaccaaaaaagagcccgcattgccaagtcaatcctaagccaaaagaacaaagctggaggcatcacactacctgacttcaaactatactacaaggctacagtaaccaaaacagcatggtactggtaccaaaacagagatatagatcaatggaacagaacagagccctcagaaataatgccacatatctacaactatctgatctttgacaaacctgagaaaaacaagcaatggggaaaggattccctattgaataaatggtgctgggaaaactggctagccatatgtagaaagctgaaactcgatcccttccttacaccttatacaaaaatcaattcaagatggattaaagatttaaacgttaaacctaaaaccataaaaaccctagaagaaaacctaggcattaccattcaggacataggcgtgggcaaggacttcatgtccaaaacaccaaaagcaatggcaacaaaagacaaaattgacaaatgggatctaattaaactaaagagcttctgcacagcaaaagaaactaccatcagagtgaacaggcaacctacaacatgggagaaaattttcgcaacctactcatctgacaaagggctaatatccagaatctacaatgaactcaaacaaatttacaagaaaaaaacaaacaaccccatcaaaaagtgggcgaaggacatgaacagacacttctcaaaagaagacatttatgcagccaaaaaacacatgaagaaatgctcatcatcactggccatcagagaaatgcaaatcaaaaccactatgagatatcatctcacaccagttagaatggcaatcattaaaaagtcaggaaacaacaggtgctggagaggatgcggagaaataggaacacttgtacactgttggtgggactgtaaactagttcaaccattgtggaagtcagtgtggcgattcctcagggatctagaactagaaataccatttgacccagccatcccattactgggtatatacccaaaggactataaatcatgctgctataaagacacatgcacacgtatgtttattgcggcactattcacaatagcaaagacttggaaccaacccaactgtccaacaatgatagactggattaagaaaatgtggcacatatacaccatggaatactatgcagccataaaaaatgatgagttcatatcctttgtagggacatggatgaaattggaaaccatcattctcagtaaactatcgcaagaacaaaaaaccaaacaccgcatattctcactcataggtgggaattgaacaatgagatcacatggacacaggaaggggaatatcacactctggggactgtggtggggtcgggggaggggggagggatagcattgggagatatacctaatgctagatgacacattagtgggtgcagcgcaccagcatggcacatgtatacatatgtaactagcctgcacaatgtgcacatgtaccctaaaacttagagtataataaaaaaaaaaaa

SEQ ID NO: 622 - DNA, 6375 bp, Homo sapiens
  source 1..6375: mol_type = other DNA
gttgtggggaagatagccaaataggaacacctctggtttgcagctcccagctagatcaacacagaaggcgggtgttttcttcatttccaactgacatacctggctcatctcattgggactgattagagagtgggtgcagcctatggagggcgaaacaaagcagagtggggcgttgtcttaccaaggaagcacaaaaggtcgggaactccctcccctagccaagggaagccgtgagggactgtgccgtgaggaatgatgcattctggcccacatacccacagaccaggagactccttcaggtgcctataccaccagggccttgtgcttcaaacatgaaactgggcggctggttgggcagacactgagctagctgcaggagttttttttcatgccccagtggtgtctgaaatgctagcaaagagaactgttcactcccctggaaagggggctgaagccagggaaccaagttgccttgctcagcagatcccactccacaaagcccagcaagctaagatctactggcttgaaattctcgctgccagcacagcagtctgaagtcgacctgggacactcaagcttggtggaaggaggggcatctgctcctactgaggcttgagtaggcagttttctcctcacagtgtaaacaaagccacagggaagcttgaactgggcggaacctactgcagctgggtaaagccactgtagccagactgcctctctacattcttcctctctgggcagggcatctttgaaagaaaggcagcagccacagtcaggggcttatagataaaattcccatctccctgggacagagcacctgggggaaggggcggctgtgggcgcagcttcaaaagacttaaacgttccttcctgccagctctgaagagaggagaggatctcttaacacagcactcaagctctgctaagggacagacttcctcctcaagtgggtccctgatctccatgcctcttgactgggagacacctcccaccaggggtcgacagatacctcatacaggagagctccagctggcatctggcaggtgaccctctgggacgaaacttccagaggaaggagcagacagtaatctttgctgttctgcagcctccactggtgataccaaggcaaatagggtctggggtggacctctagcaaactccagcagacctacagcagaggggcctgactgttggaaggaaaactaacatacagaaaggaatagcatcaaaatcaacaaaaaggacgtccacacccaaacaccatttaaagatcaccaacatcaaagaccaaaggtagataaatccacgaaggtgaggaaaatccagcacgaaaaggctgaaaatgctaaaaaccagaacgcctcttctcctccaaaggatcataacttctcatcagcaagggaacaaaactgcacaaaactggatgagtttgatgaattgacagaggtaggcttcagaaggtggctgataacaaactgctccgaaataaaggagcatgttctaacccaacgcaaggaagctaagaaccttgaaaaaaggttaaatgaattgctaactagaataaccagtttagagaagaacataagtgacctcatggagctgaaaaacagcacaagaacttcgtgaagcatacacaagtatcaatagctgaatcgactgagtggaaaaaagaatatcagagattgaagatcgacttaatgaaataaagcaggaagacaagattagagtaaaaagaatgaaaaggaatgaacaaagcctccaagaaatatggaactatgtgaaaagaccaaacctacgtttgattgacgtacctgaaagtgacagggagaatggaaccaagttggaaaaaactcttcagtatattatccaggagaactttccccacctagcaagacaggccaacattcaaactgaggaaatacagaaaacaccactaagatactcctcgaaaagagcaaccccaagacacataatcatccgattcacaaaggttgaaatgaaggagaaaatgttaagggcagccagagaaaaaggtcaagttacccacaaagggaagcacgtcagactaacagcgggtctctctgcagaaaccctacaagccagaagagagtgggtgccgatatctgaccttcttaaagaaaggaattttcaacccagagtttcatatccagccaaacgaagcttcataagcgaaggagaaataaaattctttaaagacaagcaaatgctgagagattttgtcatcaccaggcctgccttggaagagctcctgaaggaagcactaaatatggaaaggaaaaactggtaccagcaactgcaaaaacataccaaattgtaaagacaattgatactatgaagaaactgcatcaactaatgggcataaaaaccagccagcatcataatgacaggatcaaaatcacacataacaatattaaccttaaatgtaaatgggctaaatgccccaattaaaagacacagactggcaaattggataaaaagtaaagacccattggtgtgctgtattgaggagacacatctcacgtgcaaagacacacaggggctcaaaataaatggatggaggaatatttaccaaacaaatggaaagcaaaaaaaaaaaaaaaaaaaaagggttgcaatcctagtctctgataaaacagactttaaaccaacaaagacaaaaaaagacaaagaaggacattacataatggtaaagggatcaatgcaacaagacaagctaactatcctaaatatataagcacccaatacaggagcacccagattcataaaggaagtttttagagacccacaaggagacttttactccaacacaataatagtgggagactttaacacccactgtcaatattagacagatcaacgagacagaaaattaacaaggacattcaagccttgaactcagctctggaccaagcaaacctaatagacatttacagaagtctctactccaaatcagtagaatatacattttctcagcacattgcacttattctaaaattgaccacataattggaagtaaaacactcctcagcaaatgcaaaagaatgaaaatcaaaacaaacagtctctcagtccacaacacaatcaaattagaactcaggattaagaaactcactcaaaactgcacaactacatggaaactgagcaaccttctcaatgactactgtgtaaataatgaaattaaggcagaaatacataagctttttgaaaccaatgagaacaaagacacaatgtaccagaatctctgggacacagctaaagcagtgtttacagggaaatttatagcactaaatgcccacaggggaaagcaggaaagatctaaaatcaacaccctaacatcacaattaaaagaactagagaagcaagagcaaacaaattcaaaagctagaagaagacaagaaataactaagatcagagcagaactgaagaagatagagacacgaaaaagccttaaaaaatcaataaacacacgagctggtgttttgaaaagattaataaaatagtagacccctagccagagtaataaagaagaaaagagagaagaatcagatagacacaataaaaaatgataaaggagatatcatcattgaccccacaggaatacaaactaccatcagagaatactataaacacctttacgtaaataaactagaaaatctagaaaaaatggataaattcctggacacatacaccctctcaagactaaaccaggaagaagtcaaatcactgaatagaccaataacaagctctgaaagtgaggcagtaattaataccctaccaaccaaaagagcccaggaccagaaggattcacagccaaattctaccagaggtacaaagaggagctggttccatcccttctgaaactatttcaaacaatagaaaaagagggactcttccctaactcattttatgaggtcagcatcatcctgataacaaaacctggcagagacacaacaaaaagaaaagaaaatttcaggccaatatccctgatgaacatcgatgcaaaaatccttaataaaatactgccaaaccgaatccagcagcacatcaaaaagctcatccaccacaatcaagttggcttcatccttggcatacaaggctggttcaacatatgcaaatcaatgatgaaaaacacatgattatgtcaacagatgcagaaaaggcctttgataaaattcaacaccccttcatgctaaaaactctcaataaactaggtagtgatggaacatatctcaaaaaaataagagctatttgtgacaaacccacagctaatatactgaatgggtcaaagctggaagcattccctttgaaaactggcacaagacaaggatgccctcgtgctcaaaataatattggaagttctgggcagagcaatcaggccagagaaagaaatgaaggatattcaaataggaagagaggaagtcaaattgtccctgtttgcagatgacatgattgtatatttagaataactcatcgtctcagtacaaagtctccttaagcaaataaacaacttcagcaaagtgtcaggatacaaaatccatgtgcaaaaattacaagcattcctatacaccaataatagacaaacacagagccaaattatgcatgaactcccattcacaattgctacaaaaggaataaaatacctaggagtccaacttacaagggatgtgaaggacctcttcaaggagaactacaaaccactgttcaaggaagtaagagaggacacaaacaaatggaaaaacattccatgctcatggataggaagacccaatatcatggaaatggccatacagcccaaagtaatttatagattcgatgctattcctatcaagctaccattgactttcttcgcagaattagaaaaaaaactactttaaatttcatatggaacccaaaaggagcctgcatagcccagccaatcctaagcaaaaagaacaaagctggaggcatcaccctacctggcttcaaaatatactacaaggctacaataaccaaaacagcatggtactggtaccaaatagaccaatggaacaggacagaggcctcagaaataatgccacccatctacaaccatctgatctttgacaaacctgacaaaaacgagcagtggggaaaggattccctatttaataaatggtgttgggaaaaccagctagccctatgcagaaaactgaaactggaccccttccttacaccttgtacaaaaattaactcaagatggattaaggacttaaacataagacctaaaaccataaaaaccttagaagaaaacctaggcaataccattcaggacataggcatgggtaaagacttcatgactaaaacaccaaatgtaatagcaataaaagcctaaattgacaattgggatctcattaaactaaagagcttctgcacagcaaaagaaactatcttcagagtgaacaggcaacgtacaaaatgggagaaaatttttgcaatctatccatctgacagagggctaatatccagaatctacaaagaatttaaacaaatttgcaagaaaaaaaaacaaccccattaaaaagtgggtgaagaatatgaacagacacttctcaaaagaagacatttatgcagccaacaaacatatggaaaaaacctcatcatcactggtcattagagaaatgcaaattaaaaccacaatgagataccatctcatgccagttagaatggtgatcattgaaatgtcaggaaacagcagatgctggaaaggatgtggagaaataggaatgcttttacactgttggtgagagtgtaaattaggtcaaccattgtggaagacagtgtggcgattcctgaaggatctagaaccagaaataccatttcacccagcaatcccattactgggtatattcctgaaggattataaaacattctactataaagacacatccacaagtatgtttattgcagcactgttcacaatagcaaagtcatggaaccaacccaaatgcccatcaatgatagactggataaagtaaatgtggcgcatatacaccatggaatactatgcagccataaaaaaggatgagttcatgtcctttgcagggacatggatgaatctagaaaccatcattctcagcagactaacacaggaatagaaaaccaaacaccacatgttctcactcgtaagtgggagtggaacaatgagaacacatggacacagggaaggggacatcacacaccggggcctgttggggcgtgggggggctaggggagggatagcattaggagaaataaatgtacataggtttcacaaaccactatggcacatgtacacctgtgtaataaacctgcacgttctgcacatgtatcccagaacttaaaatataataaaaaaaa

SEQ ID NO: 623 - DNA, 6024 bp, Homo sapiens
  source 1..6024: mol_type = other DNA
aggtgggagccaagatggccgaataggaacagctccggtctacagctcccagcgtgagcgacgcagaagacgggtgatttccgcatttccatctgagataccgggttcatctcactagggagtgccagacagtgggcgcaggccagtgggtgcgtgcaccgtgcgcgagccgaagcagggcgaggcattgcctcacctgggaagcgcaaggggtcagggagttccctttctgagtcaaagaaaggggtgacagacgcacctggaaaatcgggtcactcccacccgaatattgcgcttttcagaccggcttaagaaacggcgcaccacgagactatatcccacacctggctcggagggtcctacgcccacggaatcgcgctgattgctagcacagcagtctgagatcaaactgcaaggcggcagcgaggctgggggaggggagcccgccattgcccaggcttgcttaggtaaacaaagcagccgggaagctcgaactgggtggagcccaccacagctcaaggaggcctgcttgcctctgtaggctccacctctgggggcagggcacagacaaacaaaaagacagcagtaacctctgcagacttaaatgtccctgtctgacagctttgaagagagcagtggttctcccagcacgcagctggagatctgagaacggcagactgcctcctcaagtggtccctgacccctgacccccgagcagcctaactgggaggcacccccagcaggggcacactgacacctcacactgcagggtattccaacagacctgcagctgagggtcctgtctgttagaaggaaaactaacaaacagaaaggacatccacaccgaaaacccatctgtacatcaccatcatcaaagaccaaaagtagataaaaccacaaagatggggaaaaaacagaacagaaaaactggaaactctaaaacgcagagtgcctctcctcctccaaagaacgcagttcctcaccagcaacggaacaaagctggatggagaatgattttgacgagctgagagaagaaggcttcagacgatcaaattactctgagctacgggaggacattcaaaccaaaggcaaagaagttgaaaactttgaaaaaaatttagaagaatgtataactagaataaccaatacagagaagtgcttaaaggagctgatggagctgaaaaccaaggctcgagaactacgtgaagaatgcagaagcctcaggagccgatgcgatcaactggaagaaagggtatcagcaatggaagatgaaatgaatgaaatgaagcgagaagggaagtttagagaaaaacgaataaaaagaaatgagcaaagcctccaagaaatatgggactatgtgaaaagaccaaatctacgtctgattggtgtacctgaaagtgatgcggagaatggaaccaagttggaaaacactctgcaggatattatccaggagaacttccccaatctagcaaggcaggccaacgttcagattcaggaaatacagagaacgccacaaagatactcctcgagaagagcaactccaagacacgtaattgtcagattcaccaaagttgaaatgaaggaaaaaatgttaagggcagccagagagaaaggtcgggttaccctcaaagggaagcccatcagactaacagcggatctctcggcagaaaccctacaagccagaagagagtgggggccaatattcaacattcttaaagaaaagaattttcaacccagaatttcatatccagccaaactaagcttcataagtgaaggagaaataaaatactttacagacaagcaaatgctgagagattttgtcaccaccaggcctgccctaaaagagctcctgaaggaagcactaaacatgcaaaggaacaaccggtaccagccgctgcaaaatcatgccaaaatgtaaagaccatcaagactaggaagaaactgcatcaactaatgagcaaaatcaccagctaacatcataatgacaggatcaaattcacacataacagtattaactttaaatgtaaatggactaaattctgcaattaaaagacacagactggcaagttggataaagagtcaagacccatcagtgtgctgtattcaggaaacccatctcatgtgcagagacacacacaggctcaaaataaaaggatggaggaagatctaccaagcaaatggaaaacaaaaaaaggcaggggttgcaatcctagtctctgataaaacagacgttaaaccaacaaagatcaaaagagacaaagaaggccattacataatggtaaagggatcaattcaacaagaggagctaactatcctaaacatatatgcacccaatacaggagcacccagattcataaagcaagtcctgagtgacctacaaagagacttagactcccacacattaataatgggagactttaacaccccactgtcaacattagacagatcaacgagacagaaagtcaacaaggatacccaggaattgaactcagctctgcaccaagcggacctaatagacatctacagaactctccaccccaaatcaacagaatatacatttttttcagcaccacaccacacctattccaaaattgaccacatagttggaagtaaaactctcctcagcaaatgtaaaagaacagaaattataacaaactatctctccgaccacagtgcaatcaaactagaactcaggattaataatctcactcaaagccgctcaactacatggaaactgaacaacctgctcctgaatgactactgggtacataacgaaatgaaggcagaaataaagatgttctttgaaaccaacgagaacaaagacacaacataccagaatctctgggacgcattcaaagcagtgtgtagagggaaatttatagcactaaatgcccacaagagaaagcaggaaagatccaaaattgacaccctaacatcacaattaaaagaactagaaaagcaagagcaaacacattcaaaagctagcagaaggcaagaaataactaaaatcagagcagaactgaaggaaatagagacacaaaaaacccttcaaaaaaatcaatgaatccaggagctggttttttgaaaggatcaacaaaattgatagaccgctagcaagactaataaagaaaaagaggagaatcaaatagacacgataaaaaatgataaaggggatatcaccaccgatcccacagaaatacaaactaccatcagagaatactacaaaaacctctacacaaataaactagaaaatctagaagaaatggatacattcctcgacacatacactctcccaagactaaaccaggaagaagttgaatctctgaatagaccaataacaggagctgaaattgtggcaataatcaatagtttaccaaccaaaaagagtccaggaccagatggttcacagccgaattctaccagaggtacaaggaggaactggtaccattccttctgaaactattccaatcaatagaaaaagagggaatcctccctaactcattttatgaggccagcatcattctgataccaaagccgggcagagacacaaccaaaaaaagagaattttagaccaatatccttgatgaacattgatgcaaaaatcctcaataaaatactggcaaaccgaatccagcagcacatcaaaaagcttatccaccatgatcaagtgggcttcatccctgggatgcaaggcttggttcaatatacgcaaatcaataaaggtaatccagcatataaacagagccaaagacaaaaaccacatgattatctcaatagatgcagaaaaagcctttgacaaaattcaacaacccttcatgctaaaaactctcaataaattaggtattgatgggacgtatttcaaaataataagagctatctatgacaaacccacagccaatatcatactgaatgggcaaaaactggaagcattccctttgaaaactggcacaagacagggatgccctctctcaccgctcctattcaacatagtgttggaagttctggccagggcaatcaggcaggagaaggaaataaaaggtattcaattaggaaaagaggaagtcaaattgtccctgtttgcagacgacatgattgtttatctagaaaaccccattgtctcagcccaaaatctccttaagctgatacgcaacttcagcaaagtctcaggatacaaaatcaatgtacaaaaatcacaagcattcttatacaccaacaacagacaaacagagagccaaatcatgagtgaactcccattcacaattgcttcaaagagaataaaatacctaggaatccaacttacaagggatgtgaaggacctcttaaaggagaactacaaaccaactgctcaaggaaataaaagaggacacaaacaaatggaagaacattccatgctcatgggtaggaagaatcaatatcgtgaaaatggccatactgcccaaggtaatttacagattcaatgccatccccatcaagctaccaatgactttcttcacagaattggaaaaaactactttaaagttcatatggaaccaaaaaagagcccgcatcgccaagtcaatcctaagccaaaagaacgaagctggaggcatcacactacctgacttcaaactatactacaaggctacagtaaccgaaacagcatggtactggtaccaaaacagagatatagatcaatggaacagaacagagccctcagaaataacgccgcatacctacaactatctgatctttgacaaacctgagaaaaacaagcaatggggaaaggattccctatttaataaatggtgctgggaaaactggctagccatatgtagaaagctgaaactggatcccttccttacaccttatacaaaaatcaattcaagatggattaaagatttaaacgttagacctaaaaccataaaaaccctagaagaaaacctaggcattaccattcaggacataggcgtgggcaaggacttcacgtccaaaacaccaaaagcaatggcaacaaaagccaaaatggacaaatgggatctaattaaactaaagagcttctgcacagcaaaagaaactaccatcagagtgaacaggcaacctacaacatgggagaaaattttcgcaacctactcatctgacaaagggctaatatccagaatctacaatgaactcaaacaaatttacaagaaaaaaacaaacaaccccatcaaaaagtgggcaaaggacatgaacagacacttctcaaaagaagacatttatgcagccaaaaaacacatgaaaaaatgctcaccatcactggccatcagagaaatgcaaatcaaaaccactatgagatatcatctcacaccagttagaatggcgatcattaaaaagtcaggaaacaacaggtgctggagaggatgtggagaaataggaacacttttacactgttggtgggactgtaaactagttcaaccattgtggaagtcagtgtcgcaattcctcagggatctagaactagaaataccatttgacccagccatcccattactgggtatatacccaaaggactataaatcatgctgctataaagacacatgcacacgtatgtttattgcggcattattcacaatagcaaagacttggaaccaacccaaatgtccaacaatgatagactggattaagaaaatgtggcacatatacaccatggaatactatgcagccataaaaaatgatgagttcatgtcctttgtagggacatggatgaaactggaaaccatcattctcagtaaactatcgcaagaacaaaaaaccaaacaccgcatattctcactcataggtgggaattgaacaatggagatcacatggacacaggaaggggaatatcacactctggggactgtggtggggtggggggaggggggagggatagcattgggagatatacctaatgctagatgacgagttagtgggtgcagcgccagcatggcacatgtatacatatgtaactaagctgcacaatgtcacatgtaccctaaaacttaaagtataataaaaaaaaaaaaa

SEQ ID NO: 624 - DNA, 6133 bp, Homo sapiens
  source 1..6133: mol_type = other DNA
ggaggagaagccaagatggccgaataggaacagctcgagtctaccgctcccagcatgagcgacgcagaagacgggtgatttctgcatttccttttgaggtactgggttcatctcactagggagtgccagacagtgggtgcaggacagtgggtgaagtgcactgtgcactagctgaagcagggcgagtcattgcctcactcgggaagtgcaaggggtcagggagttagttctctttcctggtcaaagaaaggggtgacagacggcacctggaaaatcgggccactcctaccctaacactgtgcttttccgacgggcttaggaaatggcaccccaggagattatatccggcacctgcctcggagggtcctacgcacacggagtctcgctgattgctaacacagcagtctgagatcaaactgcaaggcagcagcaaggctgggggaggggcactggctattgcccaggctctcttaagtaaacaaagcatccaggaagctcgaactgggtggagcccaacacagctcaaggaggccgtcctgcctctgcaggctccacctctgggggcagggcacagacaaacaaaaagacagcagtaacctctgcagacttaaatgtccctgtctgacagctttgaggagagcagtggttctcccagcatgcagctggagatctgagaatgggcagactgcctcctcaagtgggtccctgaccctgacccccaagcagcctaattgggaggcgccccccagtaggggcagactgacacctcacacaaccgggtactcctctgagacaaaaattccagaggaacgatcagacagcagcattcgcggatcacgaaaatccacggttttgcagacaccactgctgatacccaggcaaacagggtctgcaatgggcctctagcaaactccaacagacctgaagctgagggtcatgtcttttagaaggaaaactaacaaacagaaaggacatccacaccaaaaacccatctgtacatcaccatgatcaaagaccaaaagtagataaaaccacaaagatggggaaaaaacagagcagaaaaactggaaactctaaaaagcagagcacctctcctctgccaaaggaatgcagttcctcaccagcaatggaacaaagctggacagagaatgactttgacgagttgagagaagagggcctcaaacgatcaaactactccgagctacaggaggaaattcaaaccaaaggcaaagaagttgaaaactttgaaaaaactttagacgaatgtgtaactagaataaccaatatagagaagtgcttaaaggagctgatggagctgaaagccaaggctcgagaactatgtgaagaatgcagaagcctcaggagatgatgagatcaactggaagaaagcgtatcagtgatgaaagatgaaatgaatgaaatgaagcaagaagggaagtttagaaaaaaaagaataaaaagaaatgaacaaagcctccaagaaatatgggactatgtgaaaagaccaaatctgcgtctgattggtgtacctgaaaatgacggggagaatggaaccaagttggaaaacactctgcaggatatcatccaggagaacttccccaatccagcaaagcaagccaacattcagattcgggaaatacagagaacaccacaaagatactcctcgagaacagcaactccaagacatataattgtgagattcaccaaagttgaaatgaagaaaaaaatgttaagggcaaccagagagaaaggtcaggttacccacaaagggaagcccatcagaataactgctgatctctcggcagaaactctacaagcaagaagagagtgggtgccaacattcaacaatcttacagaaaagaattttcaacccagaatttcatattcagccaaactaagcttcataagtgaaggagaaataaaatactttacagacaagcaaatgctgagcgattttgtcaccaccaggcctgccctaaaagagctcctgaaggaagcactaaacatggaaaggcacaatcggtaccagccactgcaaaaacatgccaaattgtaaagaacatcaagactaggaagaaactgcgtcaattaacgagcaaaataaccagctaacatcataatgacaggatcaaattcacacataacaatattaactttaaatgtaaatggactaaatgctccaattaaaagacacagactggcaaattggataaagagtcaagacccattagtgtgctgtattcaggaaacccatgtcacgtgcagagacacacataggctcaaaataaaaggatggaggaagatctaccaagcaaatggaaaacaaaaaaaaggcaggggttgcaatcctagactctgataaaacagactgtaaaccaacaaagatcaaaagagacaaagaagaccattacataatggtaaagggatcaattcaacaagaagagctaactgtcctaaatatatatgcacccaatacaggagcacccagattcataaagcaagtcctgagtgacctacaaagagacttagactcccacacaataataatgggagactttaacaccccactgtcaacattagacagatcaataagacagaaatttcacaaggataccaaggaattgaactcagctctgcaccaagaggacctaatagacatctacagaactctccaacccaaatcaatagaatatacattttttcagcaccacaccacacctattccaaaattgaccacatacttggaagtaaagccctcttcagcaaatgtaaaagaacagaaattaaactgtctctcagaccacagtgcaatcaaactagaactcggcattaagaaactcactcaaaactgctcaactacatggaaactgaacaacctgctcctgaatgactactgggtacgtaacaaaatgaaggcagaaataaagatgttctttaaaaccaacgagaacaaagacacaacataccagaatctctgggacacattcaaagcagtgtgtacagggaaatttataacactaaatgcccacaagggaaagcaggaaagatccaaaattgacactctaacatcacaattgaaagaactagaaaagcaggagcaaacacattcaaaagctagcagaaggcaagaaataactaaaatcagagcagaactgaaggaaatagcaacaaaaaaacgcttcaaaatattaatgaatccaggagctggttttttgaaaggatgaacaaaattgatacactgctagcaggactaataaagaaaaaagagagaagaatcaaatagacacaataaaaataataaaggggatatcaccactgatccctcataaatacaaactaccatcagagaatactacaaacacctctacacaaataaactagaaaatctagaagaaatggataaattcctccacgcatacactctcccaagactaaaccaggaagaagttgaatctctgaatagaccaataacaggatctgaaattgtggcaataatcaatagcttaccaaccaaaaagagtccaggaccagatggattcacagccaaattctaccagaggtacaaggaggagctggtaccattccttctgaaactattccaatcaatagaaaaagaaagaatcctccctaactcaatttatgaggccagcatcatcctgataccaaagccgggaagagacacaaccaaaacagagaattttagaccaatatccttgatgaacattgatgcaaaaatcctcaataaaatactggcaaaccgaatccagcagcacataaaaaagcttatccaccatgatcaagtgggtttcatccctgggatgcaaggctggttcaatatacacaaatcaataaaagtaatccagcatataaacagaaccaaagacaaaaaccacacgattatctcaatagatgcagaaaaggcctttgacaaaattcaacagcgcttcatgctaaaaactctcaataaattaggtattgatgggacttatctcaaaataataagagctatctatgacaaacccacagtcaatatcatactgaatgggcaaaaactagaagcattccctttgaaaacgggcacaagacagggatgccctctctcatcactcctattcaacatagtgttggaagttctggccagggcaatcaggcaggagaaggaaataaagggtattcaattaggaaaagaggaagtcaaattgtccctctttgcaaatgacatgattgtatatctagaaaaccccattgtctcagcccaaaatctccttaagctgatgataagtaacctcagcaaagtctcaggatacaaaatcaatgtacaaaaatcacaagcattcttatacaccaataacagacaaacagagagccaaatcatgagtgaactcccattcgcaattgcttcaaagagaataaaatacttaggaatccaatttacaagggacatgaaggacctcttcaaggagaactacaaaccactgctcaatgaaataaaagaggatacaaacaaatggaagaacattccatactcatggataggaagaatcaatatcatgaaaatggccatactgcccaaggtaatttatagattcaatgccatctccatcaagctaccaatgactttcttcacagaattggaaaaaactactttaaagttcatatggaaccaaaaaagggtctgcatcaccaagtcaatcctaagccaaaagaacaaagctggaggcatcaccctacctgacttcaaactatactacaaggctacagtaaccaaaagagcatgatacggataccaaaacagagatatagaccaatggaacagcacagagccctcagaaataatgccgcatatctacaactatctgatctttgacaaacctgacaaaaacaaggagtggatcccctatttaataaatggtgctgggaaaactggctagcaatatgtagaaagctgaaactggatcccttccttacaccttatacaaaaattaattcaagatggattaaagacttaaatgttagaactgaaaccataaaaaccctagaagtaaaactaggcattaccattcaggacataggcatgggcaaagacttcatgtctaaaacaccagaagcaatggcaacaaaagccaaaattgacaaatgggatctaattaaactaaagagcttctgcacagcaaaagaaactgccatcagagtgaacaggcaacctacaaaatgggagaaaatttttgcaacttactcatttgacaaagggctaatatccagaatctacaacgaacgtaaacaaatttacaagaaaagaaatacaaccccatcaaaaagtgggtgaaggatatgaacagacacttctcaaaagaagacctttatgcagccaaaagacacatgaaaaaatgctcatcatcactggccatcatagaaatgcaaatcaaaaccacaatgagataccatctcacaccagttagaatcgcaatcattaaaaagtcaggaaacaacaggtgctgcagaggatgtggagaaatagaaacacttttaaactgttggtgggactgcaaactagttcaacgattgtggaagtcagtgtggcgattcctcaagtatctggaactagaaataccatttgatccagccatcccattagtgggtatataaccaaaggactataaatcatgctgctataaacacacatgcacatgtatgtttattgccgcactattcacaatagcaaagacttggaaccaacacaaatgtccaacaacgatagactggattgagaaattatggcacatatacaccatggaatactatgcagccataaaaaatgatgagttcatgtcctttgtagggatatggatgaaattggaaatcatcattctcagtaaactatcgcaaggacaaaaaaccaaacactgtatgttctcattcatagatgggaattgaacaatgagaacacatggacacaggaaggggaacatcacactctggggactgttgtggggtgggcagggggaggagggatagcattaggagatatacctaatgctaaatgacgagttaatgggtgtagcacaccagactggcacatgtatacatatgtaactaactggcacattgtgcacataaaccgtaaaacttaaag

SEQ ID NO: 625 - DNA, 915 bp, Homo sapiens
  source 1..915: mol_type = other DNA
aggagaggatgatattactccacatatggcagggagtgttacatcccctgtaatattgttcataatatttagaagacgacaggatgatattactcccaatatagtaggaagtatacactcccctgtgatactgttcataatttttaggggattagaggatgatattacttccaatatcacagggagtgtacactggtgatattgtttataactttcagtggattagaagatattatccagaatatcacaggggttgcacaccccaagtgatattgttaatatccagtgggaaagaggatgatattactccccatatcacgggggatgtaaacccgtttgtggtattgtcacttacatccgggggggagaggatgatattactctgcatatcatagagggtgcacacggctgtaatgttgtccataataacatccagaggggaagagaatattattcccatgtttcagaaggtgtacacacccctgtgatagtctctgtaacatttagggaagaaggggatgatactactccagatattgcagggggtgtacatccccctgtgatactgttcgtaacgtttagggggaagaggatgatattactccccatatcgaagggattgtacatctccctatatattgtccataacatccagggcaggagaggatattactactccccatatcacagggggtggacacccccctctaaatatgtctaacatccaggcggggacaggaggatatttttccccataacccagagaaagtaaacctcctgtgatattgtccataacatccagtggggagaggatgatatcactccccatattgcagggggtgcacactccactctgatattggccgtaatatccgggggggggtgaagtatgaagtcactacacatatcgcaggg

SEQ ID NO: 626 - DNA, 673 bp, Homo sapiens
  source 1..673: mol_type = other DNA
tttctgcacctgctccggcgctgtgggcctccctgcgcctgcgccggcgctgtgggcccccccaccccccggcgcctgcgccggcgctgtggccccccgccccccgcgactgcgccggcgctgtggggcccccacccccctgcgcctgcgccggcgctgtgcaactttgcgagggcggagctgcgttcttcccagcaccgacacggagagcatcgccggggcggagctgagttctcctctgcacacacttcggagatacagcaaaggcggagcagtgttctcctcaacacagacctgggcaggccggggtctccgtgagggcggagctgcgttctgctcagcacagacccgggggacaccgcgaaggcagagtagcgttctcctcagcacagaccttgggggcactgcctcgctttgggacaactcggggccgcatagacgctgaataaaatccttcctgtttgcagccctgagtaatcagggtcagcgaccagtaagaagggttcagtgtggaaaagggaaaccaaaagcccctctgaatcctacccaccgaggttctccccagccaaggcgaggcgccgcagtgcgagatccacaccgcagcctcagaagacaaatgcagcattcctaatgcggacatgacacccaaaatatgacacgcccattgctcatg

SEQ ID NO: 627 - DNA, 5200 bp, Homo sapiens
  source 1..5200: mol_type = other DNA
agcctccactggtgatacccaggcaaacagggtctggagtggacctccagcaaactcgagcaaacctgcagcagagggacctgactggtagaaggaaaactaacaaacataaaggaatagtatcaacatcaccaacatcaaagaccaaaggtagataaatccacaaagatggggagaaaccagtgcaaaaaggctgaaaactccaaaagccagaatgcctcttctcctccagaagatcacaactccccaccagcaagggaacaaagctggacagacaatgagtttgagggattgacagaagtaggcttcagaaggcgggtaataacaaactcctccaagctaaaggagcgtgttctaacccaatgcaaggaagctaagagcctgaaaaaaaaaggtaggacgaattgttaactagaataaccagtttagagaagaatataaatgaactgatggagctgaaaaacccagcacaagaacttcatgaagcatacacaagtatcaatagctgaatcaatcaagcaggagaaagaatatcagagattgaagatcaactcaatgaaataaagcaagaagaaaagattcgagaaaaaagagtgaaagaaatgaacaaagcctccaagaaatagaggaatatgttaaaacactgaatctatgtttgattcgtttacctgaaagtgacagagagaatggaaccaagttggaaaacactctcaaggatattatccaggagaacttccccaacctagcaagacaggccaacattcaaattcaggaaatacagagaacaccactaagatattcctcaagaagagcaaccccaagacacaaaatcatcagattcaccaaggttgaaatgaaggaaaaaatataaagggcatccagagagaaaggttgagttacccacaaagggaagcccatcagactaacagtggatctcttggcagaaagcctacaagccagaagagagtgggggccaatatacaacattcctaaagaaaagaattttcaagccagaatttcatatccaggcaaactaagcttcataattgaagtagaaataaaatcctttacaagcaaatgctgagagatattgtcaccaccaggcctgccttacaagagctcctgaaggaagcactaaacatggaaaggaacaactggtaacagccactgcaaaaacgtaacaaattatacagaccattgacactatgaaaaatctgcatcaactaatgagcaaaataaccagctagtatcataatgacaggatcaaattcatacataacaatattaaccttaaatgtaaatgagctaaatgcccccaattgaaagacacagactggcaaattggataaagagtcaagacccatcaatgtgctgtactcaggagacccatctcatacacataggctcaaaataaagggatggaggaacatttaccaagcaagtggaaagtaacaaaaggcaggggttgcaatccttgcaatcctagtttctgataaaacagatcttaagccaacagagatcaaaagagacaaagaagggcactacataatggtaaaaggatcaatgcaacaagaagagctaactatcctagacatatatgcacccaatacaggagcactgagattcataaagcaagttcttaaagacctacaaagagacttagactcccacacaataatagtgggagactttaacactccactgtcaatattagatcaatgagacagaaaattaacaagaatatccaggacttgaactcagttctggaccaagtggacctaaaagatatctacagaactctccaccccaaatcaatagaatataccttcttctcagcaccacattgcacttattctaaaattgaccacataattggaagtaaaactctcctcaggaaatgcaaaagaatggaaatcataacaaacagtctctcagaccgcaatgcattcaaattagtatgcaggattaagaaactcactcaaaacctcacaactacatggaaactgtgtaacctgatcctgaatgactactgggtaaataaagaattgaaggcagaaataaaaatgttcttcgaaaccaatgagaacaaagacacaacgtcccagaatctctgggacacatttaaagcagtgtgtagagggaaatttatagcactaaatgtccacaagagaaagcaggaaagatctaaaattgacaccttaacatgaaaattaaaagaactagagaagcaagaacaaacaaattcaaaagctagcagaagacaagacacaaataagatcagagcagaattgaaggagatagagacacgaaaaacccttcaaaaaatcaatgaatccaggagctggttttttgaaaagatcaacaaatcagaccactagccagactaataaagaagaaaagagagaagaatcaaatagatgcaataaaacatgattaaggggatatcaccactgatcccacagaaatgcatattctcatcagagaatactaccaagactaaaccaggaagaagtgaaattcctgaatagaccaataacaagttctgaaattgaggcattaattatagcctaccaaccaaaaaaattccaggaccagatggattcacagccgaattctacgagaggtacaaagaggagctcgtaccattccttctgaaactattccaaacaatagaaaaagagagaatcctccctaactcattttatgaggtcagcatcaccttgatagcaaaacctcgcagggacacaacaaaaaaaagaaaactttagaccaatatccctgatgaacattgatgcagaaatcctgaataaaatactggaaaactgaatccagcagcacatcaaaaagcttgtccaccatgatcaagtcggcttcacccctgggatgcaagggtggttcaacatatgcaaatcaataaatgtaatccatcacataaagggaaccaatgacaaaaactgcatgattatctcaatagatgcagaaagggcctttgacaaaattcaacaacctttcatgctaaaaactctcaataaactggtattgatggaacgtatctcaaaataataagtgctatttatgacaaacccacagccagtaacatactgaatgtgcaaaaactggaagcattccctttgaaaatcagcacaagacaaggataccctctctcactactcctattcaacatagtattggaagttctggccagggcaatcaggcaagagaaagaaataaagggtattcaattaggaaaagagaaagtcaaatggtctctgtttgcagatgacatgattgtatatttagaaaaccccatcatctcagcccaaaatctccttaagctgataagcaacttcagcaaagtttcaggatacaaaatcaatgtgcaaaaatcacaagcattcctatacagcaataacagacaaacagagagccaaactgtgagtgaactcccattcaccattgctataaaaagaatgaaatacctaggaatacaacttacaaggatgtgaaggacctcttcaaggagaactacaaaccactcctcaaggaaatgagagaggacacaaacaaatggaaaatcattccatgctcatagataagaagaatcagtatcgtgaaagtgacctactgcccaaagtaatttatagattcactgctatccccattaaactgccattgactttctccacggaattggaaaaatatactttaaatttcatatggaatcaaaaaagagcctgaatagccaagacaatcctaaccaaaaagaacaaagctggaagcatcatgccacctgacttcaaactatactacaagctatggtaaccaaaacagcatggtactggtacgaaaacagatatatagatcaaaggaacagaacagaggcctcagaaatagcaccacacatctacaaccatctgatctttgacaaacctgagaaaaacgagcgctggggaaaggattccctatttaataaatggtgttgggaaaactggctagccataggcagaaagctgaaactggatcccttccttacaccttatacaaaaattaactcaaggtgggttaaagacttaaacataagacctaaagccataaaaaccgtagaggaaaacctaggcaataccattcaggacataggcatgggcaaagacttcatgactaaaacaccaaaaacaaaggcaacaaaagccaaaattgacaaatgggacctaattaaactaaagagtttctggacagcaaaagaaactatcagagtgaacgggcaacctacaaaatgggagaaaatttttgcagtctatccatctgacaaagggctaatatccagaatctacaaagaacttaaacaaatttgcaagataaaacaaccccattgaaaagtgggcaaaggatgtgaacagacacttctcaaaagaggacaattatgcaaccaacaaacttataaaaaagctcatcatcactagtcattagagaaatgcaaatcaaaaccacaatgagatatcatctcatgccagttagaatggcgaaaattaaagagtcaggaaacaacaaatactggagagagtgtggagaaataggaaggcttttacactgttggtgggagtgtaaattagttcaaccattgtggaagacagtgtggctattcctcaaggatctagagctagaaataccgtttggcccagcaatcccattactgggtatatacccaaaggattataaatcattctactataaagacacatgcacatgtatgtttattgcaggactgttcacaataacaaagacttggaaccaacccaaatgcccatcaatgatagattgaataaagaaaatgtggcacatatacaccatggaatactatgcagccataaaaaacgatgagttcatgtcctttgcagggacatggaagaagctggaatccatcattctcagcaaactaacacaagaacagaaaaccaaacaccacatgttctcactcataagtgggagttgaacaatgagaacacatggacacagggaggggaacatcacacactggggcctgttggggggtgggggcagggagagggatagcattaggagaaatgcttattataggtgatgggttgatgggtgcagcaaaccaccgcagaatatatatacctatgtaacaaacctgcacgttctgcacatgtaccccagaacttaaagtataatttaaaaa

SEQ ID NO: 628 - DNA, 2806 bp, Homo sapiens
  source 1..2806: mol_type = other DNA
agtggtgcccattcatgggggctcaaatacaggtcaaaggatcgctggagcaacgattggagaatgtggaactagctggaggacacccgagtactcttaaagcaatccccgtggtgagtaagaaggggagctcggaagcatcagggtagcaataggacaagtgtgggctgtggttcgttctaccttggaactttttcacactgatgatgaggaggaaggagagtataacaaagtaacagtagaggttacagaccaggtttatttgtcacctaaagctaaagcagaaaaggagggagaggttcatccctatccttctgcacaccctcattactattttgaagaaaacgaccctccagatctttcttttctggaggacactgggtgaaaagtagttgccctggtgactgttcgagcagcgccttgagcgactgctcttagttctattcaggcaggaatacagcaagctagacaaaagtgggatttagaggcttggcagttccctgtttgaatacaccccccagatcaacagggaaatattatagctacatttgagccttttccttttaaattactcaaaaaaattaaacaagctataaatcagtatggaccaggttctccttttgaaatgggactgttaaagaatgttgctgtttccagtcggatgattcctactgactgggacactttcactctagcttgtctaactcctgctcagttcttacaatttaaaacttagtaggcagatgaagcttccattcaggctgctcgcaatgcctgggcccaacctcaaattaatataactgcagaccaacttttgggggttggtggctgggctggtttacatgcacaagtggtcatgcaggatgatgccatagaacagcttagaggagtgtgcattagagcttggaataaatcacttcatgtggagaacaatacccttcctttagtgctataaaacagggaccaagagaaccatatgtggattttatagcttggttacaggagtctcttaaaaagatgattgcagatttggctgcttaggatatagtgttgcagttattggttttgacaatgctaatccttattgccaggctgctctgcgacctatcagagggaaagcacatttagttgattataacaaggcctgtgatgatatcagagataatctacataaagctactttgttggcacaggcgatggcaggactgagagtggataaacgaaatactctatttcctggagcttgttttaactgtgggaagcatggtcatactaaaaagaatgtaaaaaaaaaaaatcacctagtcaggccaccagataggggaaaaaacaaaactgctgatcctgaaatatgtccaaaatgtaaaaaaggaaaactttgggctaatcagtgtcactctaagtttgataaagaagggaacccgattttggaaaactccctgagaggcccatcccaggccctgttctaaaccagggcatttccatctcaggccattccctcacccccatacattatctttccccaccacagcccatagtgctgcagtagatctatgctgcacaaaagctgtgagccttctgcctggggcacccccgcaaaaggtcccaacaggagtctgtggaccgttgcgagcagggacaatgggattacttttaggaaggtctagtttaagtttaaaaggggtacaaatacacactggagtcattgattcagattacaatgaggaaattcaaattgtgatatttagttctgttccctggaaagcacagccaggagtgcgcatagcacagctcctgagtgtgccgtatgtgggaatgggaaaaagtgaaattaaatgaactggaggatttggaagcacaaataaaaaaggcaaggcagcttattgggtaaatcaaattactgataaacatcctatctgtgaaataactatccatggaaagaactttaaaggtttggtagatactatttttttttttttttggtaggagtggacatttcaattatttctctacagcactggccatccatgtggccaattcagcccactcaatttaacacagtggaaactgctaaagctccagaagtgtatcagagtagctatactttgcattgtgaagggcccaatggacaacctgggactgttcaaccaattgcaacttctgtacctataaatttatgggggagatatttattatgacaatggggagcacaagttctaattccataacaattatacagccctcaaagtcaacatatgatgcacaaaatggggcatgtccctggtataggagtagaaaaaaaattgcaaggtttgaaagaactgcttcaaacggaaagacaaagttcctgccaaagattaggataccatttttgatggtggccatagttaagcctccagaacctatacctttaaaatggttaacagataagccaatttggatagaataatggctgctaagcaaagggaaactggatgctttagagaaattagttactgaacaattagaaaatgggcacatagctccaacattttccccttggaattctccagttttcataattaagaaaaaatcaggtaaatggaaaatgttaactgacttaagagccatcaattcagttatacaacctatggaaatataacagccaggattcccttctctactataattccaaaaaattggcctttaatagtcacagatttaaaagactgtttctttactacccttttagctgagcaagactgtgaacggtttgcatttacaattcctgcagtaaacaacctgcagcctgctaagcgttttcatt

SEQ ID NO: 629 - DNA, 101301 bp, Homo sapiens
  source 1..101301: mol_type = other DNA
gcagcagttctctggaatctttgtgagggaaaaatattcagaccctcgtagtagtgttatggaatcctatgtgagggacacacattctgaacccagcagcagtgttttggaatcccttgcgggggacaaacactcagaaaccacaagcagttttctggaatcctatgtgagggacaaactctaaaaatccagcagcagtgttctggaattgtttgtgtgggacaaacattcagaacctcgtagcagtgttctggaaacctatgtgagggacaaacactcttaacatagcagcggtgttcacgaatctcatgtgagggacaaacactgagaacccagcagccgtgtttgggaatcctaagtgagagacaaccactcagaaaccagcagcagtgttctagaatcttttttgagggaaaaacattcagaccctcgtagcagagttctggaatcctaagtgagggagaaacactcagaacccagcagaagccttctggaatcctttgtgagggacaaacattcagaacctcgcagtagtgttctggaatcctatgtgaggcacagacactcttaaaccacagcagtgttttggaataccatctgagggacaagcactaggaacctagcagccgtattctggcatcctatgtgagtgacaaccactcagaacccagcagaagtgttctagaatcctttgtgtgggacaaacattcagacacgaagtaattttctggaattatatgtgaagggcaaacactcagaacccagcagtagtgtcctggaattctttgtgatggacaaacattcacgccctcatagcagtgttctggaatcctatgtgagggacaaacactcagaacccagtagcagtgttctggaatccttagtgagggacaaacgctcagaacccatcagcagtgttctggaatcctacgtgagggacaaacactcagtacccaccagcagtgttctggaattctatgtgagggacaaacactcagaacccagcagaagccttctagaatcctaggtgagggacaaacactcagaacccagcagcagtgttgtggaatcatatgtgagtgacaaacattcagaactttgtagcagtgttctggaatcctatgtgtgggacaaacactcagaacccagccactgtattctggaatcctatctgagggacaaacatttagacattcgtagaggttttctggaatcctatgtgagggacacacaatcagaaaccaacagaggtgttctggaatcctttgtgacggacaaacagaatacagcagcagtgttttggaatcctacgtgaaggacaaacatttataacctcctggaagtgttctggaattgtatgtgagggacaaacactcagaacgtcgcagcagtgttctggaatcacatgtgagtgataaacacccagaacccagcagcaggtttctagaatcctttgggagtgacaaacactcagaccctcaaagcactgttctggaatcgtacttgagagacaatcactcggaaacaagcagcagtgttctggaatcatttctgacagacaaacattcagaccctcgtagcactgttctggcatcttatgttagggacaaacactcagaactcagcagacgtgttctgctatcctatatgaaggaaaagcactcagaacacagcagcagtgttctggaatcctatgtgagggacaaacacccagaacgcagcagcagtgttctggaatcctatgtgagggacaaatactcagaacccagccactgtgttctggaatcctatgtgaggcaaaaatattcagacactcatagaagtgttctggaatcctctgggaaggacaaacactcagaaaccagcagagatgctctagaatcctttgagagggacacgtaaacagaacatagcagcagtgttctggaaacctttctgagggaaaaacattcagactctcacaggagagttctgcaatcctatctgagggacaaacactcagaacccatcagcaatgttctggaataacatgtgagagaaaaacactcagaacccagcagtagtgttctagactcctttgtgagggacaaacccgcagacactcgaagcagtgttctggaatcctatgtgagggacaaacactcagaacccagaagcagtgctctgtaatcctttgtgagggaaaaacagacagaacccagcagcagtggtctgcaatcctatgtgagggcaaacactcagaacccagcaacagtgttctggaatcctttgtgagtgacaaactttctcaacctcgtagcagtgttccggaacgctatgtgagagacaaacactcttaaccgaccagcagtgttctgtaattcctatgtgaaggacaaacactcagaacccagcagccgtgttctggaatcgtatgtgagtgtcaaacactgagaacccagcagcagtgttctggaatcctttgtgagggacaaatattcagacactagaagcagtgttgtggaatcctatgtgaacgacaaacactcagaatcctacagaagtgtcctggaatcctttgtgttggacaaacattcagaaactcgtagcagagttctggaatcctatgtgagggacaaacactgagaacccagtagcagtgttctggaatccttagtgaggaacaaacactcagaatccagcagcactgttctggaatgctcgttgagggacaaacactcagaacccaacagcaatgctcttgaattctatgtgagggacaaacactcagaacccatcagcagtgttctggaatcctacatgatggacaaacactctgaacccagcagcagtgttctggcatcctatgtgagggacaaacactcagaacccagccaccgtgttctggaatcctatctgtctgataaatattcagacactcatagaaatgttctggaatcctaagtgatggagaaacactcagcaatcagcagcagtcctctggaatcctttgtgaaggataaacaaagagaacccaccagcagtgttctggaatctttctgagtgaaaaacattcagaacctagtagcagtggtctggaatccaatgtgagggagaaacactcagaacccagcagcagtgtgctggaattcatagtgagggacaaatattcacaacctcgtagcagtgttctggaatcctatgtgagacacaagcacttttaacccaccagcagttttttggaatcacatgtgggggacaaacactcagaacccagtagcagtgttctagaatcctctgtgagggacaaacattcagacattcgaagcagttttctggaatcctatgtgaggggcaaacaatcagaaaccagcagcagtgttctggaatcctttgtgatggacacacattcagacccttgtagcagtgttctggaatccattctgagggacaaacacacagaaaccagcagcagtgttccagaatcctttgtgatggacaaacactcagaacgcagtagcagtgttctggaatcataggtgatggacaaacactgagaacacagcagcagtgttctggaattctgtgtgagggaaaaacactcagaacacagctgcagtgttctggaatcctatgagagcgacaaaccttcagaacttcataacagtgttctggaatcctatgtgggagacaaacactcagaacccagccactgttttctgggatcctacttgagggacaaacattcagacactagtagaggtgttctggaatcctatgtgagggacaaacactcagaacccagcagcagtattgtggaattctatatgatggacaaccactcagaacccagtggcagtgttctggaatcccatgtaagggacaaacactcagaacccagcagcagtgttctggaatcctttgtgcaggacaaacactcagaacccagccaatgtgttctggaatcctatcagagggacaaacattcagacacttgtagaagtgttctggaatcctatgtgaggaagaaacactcagaaacaagcaacggtgccctggaattatttgtgaggaaaaaacagaacccagcagcagcgttctggaatcctatgtgatggaaaaactttcagaaaccagcaggagtgttctggaatcttctgtgagggacaaacaatgagaaccacgtatcagtgctctggaatcctatgtgagggacaaacattcttaacccggcttcagtgttctagaatctcatgtgacggactgaaactcagaacccagcagccgtgttctggaatcctatgtcagtgatcaacactcagaaaccagcaacagttttctcgaatcctttgtgacggacaaacattcatacactaggagaagtgttctggaatcctatgtgagggacaaacactcagaaactagcagcggttctcggcaatactttgtgagagacaaacataacccagcagcagtgttctgaaatcctttgtgaggataaaacattcaaaacctctcaccagtgttctggaatcctatgagagggccaaacattcagaacccagcagcagtgttctggaatcccatgtgagggacaaatactcagaatccagcagcagtgttctagaatcctttgtgagggacaaaccttcagacactcgaaggagtgttctggaatcccatgtgagggacaaacactcagtaaccagcagcagtgctctgtaatcctttgtgtgggaaaaacagaacccagcagctgtgttctggattcgtatgtgagggacaaactctgagaatccagcagcagtgttgtgggatcgtttttgaggggcaaacattcagaatcttgtagcagtgttctggaatcctatgtgaaggacaaacactctgaaactagcagcagtgttctggtatcctgtgtgagggacaaatactcagaacccagcaactgtgttctggaatcccatgtgagggacaagcactcaaacctagaaacactgttctggaatcctatgtgagggacgaacattcagacccttgaaacagtgttctggaatcctatgtgagggacaaacactcagaacccagcagcagtgttgtggaatcctatgtgagtgacaaacactcagaacccgtcaacattgttctggaatcctatgtaaaggacaaacagtcagaacccagcaacaatcctctctaatcctttgtgagggacaaacacacagaacccagcagcagtgttcttgaatcctttgtgagggaaaaacattcagaccttcgaagcagtgttctggagtcctatgtgagggaaaaacactcagaacccagcaacattgttctggaatcctatgtgagggacaaacactcagaacccagcagcaatgttctggaatcctatgtgagggacaaacattcagaagttcttaggagtgttctggaatccaatgtgagggacaaacactcagaacccagctgcagtgttcttcaatcctatgtgaaggacaaacactcagaacccagcagcagtgttctggaatgctatgtgagtgtcaaacactcagaacccagcagcagtgttctggaatcctttgtgagggacaagcattcagaacctcatagcagtgttcagcaatcatatgtaagggacaactgtgaaccgagcagcagcagtgtttttgagtcccatgtgagggacaaacactccgaaatccgcagctgtgttctggaatcctacgtgagggacaaacactcggaaccctgcaacagtgttctggattcatttgtcacggacaaacattcagactgtcgtagcagtgtggtggtatcctatttgaaggacaaaccctcagaaaccagaagcagtgctctggattgccttgtgaggtacaaacaagcagaacccagcagcagatttctggaatcctttgtgaaggacaatcattcaaaccctcggagcattgttgtggaatccaatgtgagggacaaaagctcagaaacctgcagcagtgttctggaatcctatgtgagggacaagctttcagaccctcatagcactgttttggaatgctctgtgaaggacagatattcagaccctcgtagcaggattctagaatcgtatgtgagccacaggccatcagaaccctgcatgtgtgttctggaattctacgtgagggacaatccctcagaacattgcagcagttttctggattcctatgtgagggacagacactcagaaccctgcagtagtgttctggaatcctatgtgattgataaacattaaaaacacagcagcagtgttcttgtatcccacatgatgcacaaacacacagaaccctgacaaagtgtcctggaatcctaagtgagtgacaaacactcacaacccagcagcagtgttctggaatcctttgtgagggactaacattcagaccctcctagcagtgttctggaattatatgtgagggtcatacacagaaaccagcagcagtgttctggaatcctatgtgaaggacgaatagcaagaacccagcaactgtttgggaattttatgtgggggacaaaccctcagaaagaagcagcagtgttataaaatcctttgtgaggacaaacattcagacactcatagcactgtcctgtaatgctatataagggaaaaacattcagaccctcgtatcagtgttctgaaatcctatgtgagggacaaacactcagaaaacagcagcagtgttctggaatcctatgtgagggacaaacactcagaacccagccgcagtgtaagggatttctacgtgagggacaaatattcagacactcagaacactgttttggaatcctaagtgagggacaaacactcagaaccccgcagcagtgttttggaatcctatgtgagggacaataattgagaacctcaaagcactgttctggagtgctctgtgagggacaaacattcagaccctcgtagcagtattctgtaatcctatgtgaggcacaaaccctcagaactcagcagcagtgttcttgaattctatgtgagggacaaaccctcagaaactagcagcagtattctggaatcccatgtgagggaccaatactcagaaccctgcagcagtgttctggaatgctatgtgagggacaaacacaaaaaacccagcagcagtgttctggcttcctatatgagggacaaacattcagaacccagcagaattgttctggaatcctatgtgagggacaaacactcacaaaccagcagcagtgttttggaatcctatgtgagggacaaacattcagactctcggagcagtgttctggaatcctatgtgaaggacaaacactcagaacccagtatcagtgctctggaatcctatgtgagagacaaggattcagacactcgtagcagtaatacagaatgccttctgaggaacaaactttgagaccatcccagcattgttctggaatcgtaggtgagggacaaccattcagaacccagcagtgttccggaatccttggtgaggaaaaaactttcagaccctccaagcagagttctggaatcctatgtttgggacaaacactcagaacatagcaactgtgttctgcaatccgatgtgagggacaaacattgagaacccactagcggtgctctggaatccgttgtgaccgacaaacttactgacccctgtagcagtgtttcagaatcccatgtgttggagaaaccctcagaacacagcaggagagttctagaattctagtgagggacaaaccctcagaaactagcagcagtattctgcaatcctatgtgagggacaaacgctctgaacacagcagcagtgttctggaactcgttgacagagacaagctctcagatccaagcaccagttttctggaatcctatgtgagggaaaatcactctgaactcagcagcagtgttctggaatcccaagttagggacaaacactcagaacccagcagcattgttctggaatcctatgtgagtgacaaaccctaagaaaccagaagcagtgttctagaatcctctgtgagggacaaatattcagaaaaacgaaggagggttgtggaatcctatgtgagagacaaccattcagatcccagcagcagtgttctggaatcctttgtgatggacaaacattcagaccccagtagcagtttcctagaatcctatgtgagtcgcaaaccttcagaagccagcagcagtgttctgaaatcgtatgtgagcaacaaactttcagatattagtagcagtattctggaatcctatgtgggggacaaactttcagaacccagccagtgtgttctggaatcctatctgagggacaaacattcagacagtcgtagaagtattctggaatccaaactgagggacaaacactcagaaaccagaagcagtgctcaggaatcctttgtgaggaacaaacatacaaaactcagcagctgtgttttggaattctatgtcagcctcaaacactcagaaaacagcagtattgttctggattcctaagagagggacaaacactcagaacccagcagcagtgttctggaatcctaggtgagtgacaaacactcagaacccaatagcagtgtgctggaatcctatttgagggacaaacactcagaacccaacagcagtgtgctggaatcctatgtgagggacaaacactcagaaccaagcaggagtgttctagaatcctttgtgaggcacaaacactcagaacccagcagcagtgttctggaatcctttatgagggacaaatgttcagaacctcatggcagtgttttggaatcctatgtgagtgaaaaacactcagaacccagcagcagtgttctagaatccgttgtgagggaaaaaccttcagaaccttgaagcagtgttctggaatcgtatatgacggacaaacactcagaacccagcagcagcgttctggaatcctattgagggacaaacactaagttttcatcccctgtgttctcgaatactatgtgagggacaaacattcagtcactcaaagaagtgttctggaatactatgtgagggacaaacactcaaaaaccaacaacagtgctctggattcaattgtgggggacaaacactcagtacccaacagaagtgtcctccaatcctttgtgagggacaaacactcagaacccagcagcagtgttcaggaatcctttgtgatgggcaaacattcagaccctcgtagccgtgtcctcgaatcctatgttagggaaaaacaacaagaactcagcagcagtgttgtggaatcctatgtgaggaaaaaacactcagaacacagcagcagtgtcttggaataccgtgtgatcaacaaagattcataacttcatagccatgttctggaatcctttatgagtgaaaaacactcagaacccagaagcagtgttctagaatcctttatgagagacaaagtttcagaccctcgaagcagtgttctggaatcgtatctgagtgacaagcactcagaatccagcagctgggttctggaatcctatgtgagtgacaaacactcagagcccagcagcagtgttttggaatcctatgcaagggacaaacactcagaacccagccactgtgttccagaatcctgtctgagggacaaacattcaaacactcgtagaagtgttctgtaatcctatgtgagggacaaacactcggataccagcagcagtgatctggaatcattcaggagtgacaaacactcagaacacagcagcactgttctggaatcctttcttagggacaaacattcagaatttcgtagcagtgttctgcaatcctaagtgagggacaaacactaagaacccagcagcagtgttgtggaatcatttgtgacggacaaatattcatatcctctaagcattgttctggaatcctttgttagggacaaacattcagacactcatagcagtgttctgtaatcgtaagtgagggacaaacactcagaaacctgcagcagtgttctggaatcatatgtgaggaaaaacacgcagaaatcagtagcagtgttctggaatcctatgtgagcgacaaacactaagtacccagcagcagtgttctggaatcctatgtgaggcacaaaccctcagaaccaagccactgtgttctggaatcttacctgagggacaatattcagacacccgtagaagtgttctggtagcctatgtgagggagaaacactcagaaaccagcagctgtgttatggaaacatttgtgagggacaaataaacagaaccgagaagcagagttctggaatcctttgtgaggtaaatatataaagaccctcgtagcaatgttctggaatgctgtgtgagaaacacacactcagagacgacagcagtgttccggactactatgtgagggacagaccctcaattcccagcagtagtgatgtgaaatcctatgtgagcgacaaacattcagaacttcgtagcagtgttctggaatcctatgtgggggacaaacactcagaacccagccactgtgttctggaatcctatctgagggacaaactttcagacactcgtaggagtctctggaatcctatgtgaggaacaaacactcagaacccagaagcagtgttcagtaatcgtttgtgagggacaaacattcagaacctcaaagcagtgttctggaatattatgtgagggccactcagaacccagcagcagtgttcagtaatcgtttgtgagggacaaacattcagaacctcaaagcagtgttctggattattatgtgagggccaaacactctgaacccagcagcagagttctggaatcccatgtgagggacaaacactcagaacccagcagcagtgttctggaatactttctgagggaccaacattcagaatcttatagcactgttctggaatcctaagtgagagacaaacactcagaacccaggagcagtgttctggaatcctattgagggacaaacactcaaaacccagaagcagtgttctagaatccttcatgagggacaaacattcatatcctcaaagcagtgttctggaatcctatgtgagggacaaaaactcagaacccagcagcagtgttctggaaactttggattagaccaacattcagaccctcgtaccagtgttttggaatcctatgggatagacaaacactcagaacccagacactgtgttctggaatcctatgtgagggacaaacactcagaattcagcaccatgctctgcaatcctttgtgggggacaaacactcagaatgcagtagcagttttctggaatcctttgtgaggggcaaatattcagaccctcgttgctgtgttctggaatcctatgtgagggacaaatactaaggaaccagcagaagtgttctagaatcctcattgagggaaaaaaaattcagaacatcgaagcagagttctgaaatcctatgtgagggacaaacactcagatcccagcatcattgttctggaatcctttgtgatggacaaacattcagaacctcgtagcacttttctggaatcctatgtgagtgacaaacattcagaaccaagcatcagtgttctgaaatcgtatgtgagtgacaaacattcagatataagtagcagtattctggaatcctatgtggaggacaaatagtcacattccagccactgtgttctggaatcctgaggaccaaacattcaggcactcgtagaattgttctggaatcctatgtgaggaggaaacactcagataccagaagcagttctcaggaatcctttgtgatggacaaacatacagaactcagcagcagtgttttcgaatcctatgttagtgacaaacactcagaaacctgcagcagtgttctgtatcctatgtgaggaaaaaacactcagaacccaaaagcagtgctctgtaatcctttgtgagagacaaacaaacagaacacagcagcagtgttctggaatcctatgtggggctcaaaaactcggaacccagcagtagtgttatggaatcctttgtgagggaaaaacattcagaatctcgcagcagtgttctggaatgctatgtgagggacaaacattcttaaaccaggagcagtgttctgcattcccatgtgagagacaaacactcagaaaccagcaggtgtgttctggaatcctatgtgagtgacaaacactcagaaaaaagcagcagtgttctagaatccttagtgaggggaaacattcagacactcaaagcagtgttctgcaatcctacgtgagggacaaacacagagaatccagcagcagtgttctggaatcctttgtgagggacaaacattcagaacatcataggagtgttctggaatcatatgtgagggacaaatactgtgaagccaacggcattgttctggaatctgatgtgagggataaacactcagaacccagcagcagtgttctggaatcctatgtgagtgacaaacactcagaacccagcagcagtgtccttcaatcccatgtgaggcacaaacactcaaaacccagccacagtgtactggaatactatctgagggacaaacattcacaccctcgtagaagtgttcgggagtcctatgtgagggacaaactctaagaaaccagcagcagtgctctggaatcctttgggagggaaaaacactcaaaacctcctatcagtgttctgtgatccgatgttagggaaaaacattcaaaccctcgtagtagtgtcctggaatcctacatgagggacaaaccctcagaacccagcagcagtgttctggaatcccacgtgagggaaaaacattcagaccctcgtagcattgttctggaatccaaaatgagggacaaacactcagaacccaaaagctgtattctggaatcccatgtgagggacacagactcagatcccagcagcagtgttctggaatcctatttgagggacaacccctcggaacacagtaactgtgaactggagtcgaatctgagggacaaacattcagacattcgtagaagtgttctggaatcctatgtgagggacaaacacaggaaaccagcagcagtgctctagaatcctttgtgagggacaaacatacagatcccagaagcagtgttccagaataattgtgagggaaaaacattcaaacactcgtagcagtgttctggaatcctatgtgagggacaaacactcagaacccagcagcagtgttctggaatcctatgtgagcaacaaacattcaaaactttgtagcaatgttctgatattctatgtgagggcaaacactcagaacacagcagcagtgctctggaatcgtaagtgagggacaaacactcagaacccagcagccgtgtgctggaatcctatgtgagggacaaactctcagaatccatcagcagtgttctggtatcctacgtgagtgacaaacactccgaacacagcagcagtgttccagtatctttgtgaggggcaaacactcagaacccagcagcagtgttctagagtcctttgtgagggacaaacatgcagaacctctcagcagtgttctcaaatcataagtttgggacaaacaatgtgaacacagcagcagtgttttggaataacctgtgaggcacaaacactcagaacccagcagcagtgttctggaatcctatgtgagtgacaaacactcagaacccagcagcagtgttcgacaatcctttgtgagggacaaaccttgagaccctcgaatcagtgttctggaatcctatgtgtgggacaaaccctcagaacccagtagaaattttctagaatcctttgtgtcagacaaacattcagaccgttgcagcagtgttttggtatcctatgtgagggacaaacactcagaatgcaggagcagtgttctagaatcctatgtgagtgaaaaacactcagaaccgcggagcagtgttctagagtcctatgtgagtgaaaaacactcagaaccccgcagtagggttctagaatcctatgtgagggaaaaacactcagaaccccgcagtagggttctggaatcctatgagaggaacaaatactcggaatgcagcagcagtgttctggaatcctatatgagggaaaaacactcagaacccagctactctgttctggaatcctatctgaggtacaaacattcagacacgggaaaaagtgttctggaaacctgtatgagggacaaacactcagaaaacagcagcagtgctctcgaatcatttgtgagggacaaacaaacagtacacagcagcagtagtctggaatcctatgtgagggaaaacctctcaggacccagaagtagtgttatgaaatctcttgtgagggacaaacattcagaaccttgtagcagtgttctggaatcctttctgaagagaaacattcagaccctcatagcagtgttctggaattctatgttagggacaaacactcacccccagcagcagtgttctggaatcctatgtgagggacaaacactcagaacccagcagcagtgttctagaatcctttttgaaggacaaacattcagaacctcgtagcagtgttctggaatcttatgtgagggacaaacactctgaacccaacagcagtgttttcaaatcccatgtgagggacaaacactctgaacccagtagcagtgttctgtaatcctatgtgaggaacaaacactctgaacccagcagcagtgttttcaaatcccatgtgagggacaaacactcagaacgcagcagcagtgttctgtaatcctatgtgagtgaaaatcattcagaacgcagaagcagtgttctagaatcctttgtgtgggacaaactttcagaccctcgatgcagtgttttggaatcgtatgtgagttataaacactcagaacccagaagctgggctctggaatcctatttgagggacaaacagtcagaacctggcagcagtgttctggaattctatgtgagggacaaccctcataacccagccactgtattctggaatcctatctgagggacaaacattcagacacttgtagaagtgttctggaatactatgtgagggtcaaacactcagaacaaagcagcagtggtctggaatcctctgtgagggacaaaccctcagaacacagcaacagtgttcgggtgtcctaagtgagggacaaacactcagtacccacgaggagtgttctgcaatccaatgtgagggacaaccactcagaacccagcagcagtgttctgtaatcctatgtggaggacaaacacacggaaccctgcagcagtgttctggaatcctatgtgagggacaagcgttcagaacctcatagcactgcactggaattctatgtgagggacaaaaattcagaccctcctagcagtgttctggaatcctatgtgaggtacaaatcctcagaatggagcagcagtgttctggaattcgatgtgaaggataagcctcagaacctagcggcggagttctggaatacaaagtgagggacaaacactcagaacacagcaacagtgttctggaatgttaggtgaggaacaaacactccgaacatatcagctgtgttctggaattctatatgagggacaaaccctcagaacccagcagcattgttctagaattctatatgagggacaaacactcagaacccagcagcagtgttctggaatcctatctgagggacaaacactcagaatgcagcagcagtgttctgaaatcctatgtgagaaaaaacactgagaacccagtagaagttttctggaatcctatgggagagctcagctttcagacactcataggagtgacagaatcctatgtgagggacaatgattcagaccctcattgcagtattctggaatcctatctgagggacaaacattcagaccttcgtagcagttttgtggaatcctatgtgagggacaaacactcagaatgcagcagcaatcttctggaatcctatgtgagggacaaacactcagaacacagcagcagtgttccagaatactttgtgagggacaaacattcagacaatcttaacagtgttctgaaatcctatgtgagggacaaacagtcagaacccagcagcagtgttttggaatcctatgtgaggaacaaaccctcagaaccgagcagcagtgttctggaatctaatgtgagggacaaacacttagaacccagtggcagtgttctgtaatcgtttgtgagggacaaacattcagaccttcatagcagtgttctcgaatcctatgtgagagacaaacactaagaatgctgcagcagtgttctggaatcccatgttagtgacaaacactcagagcccagtagcagtgttctagaatcctttgtgagagtcaaatactgataccctcagagcagtgctctggaatcctatgagacggacaaacactcagaaccctgcagtagtgttctgcattccaatgtgagggacaagcattcagaccctcatagcactgttctagaattctctgtgagggacaaacattcagaccctcgtcgcattgttctggaatactatgtgaggtacaaaccctcagaaatcagcagcagtattctgttattccttgtgagggacaaacaatcagatcaagcagcattgttctgaaatgctttgtgatagacaaactttgagaccatcgtagcagctttatggaatcttttgtgaggcacaaaaactcattacccagcagcagtgtcctggaatcctacgtgagagacaaacactcagaaaccagccactgtgcagtggaatcctatctgagggacaaatgttcagaaatttgcagaagagttctggaatcctatgtgcaggacaaacactgaaaaaccagcatcagtgttccggaatcacttttgagagacaaacaaacagaaaccagcaacagtgttctggaagcctttgtgagggaaaaacattctgaccctcatagcagtgttctggaatcctatgtgccggacaatcactcagaagttagcagcactgttgtggtatcctatgtgaaggacaaagattcagaacccaaaataagtgttctggaatcctaagtgagggacaaactctaacaacccagcagcagttgtctgtaattttttgtgagggacaaatattcagactctcgaaccagtgttctggaatcctatgtgagggacaaaccttcagagcctcgtagcactgttttggaatcctatgtgagggacaaacactcagaacccagcagcaatttttctggaatcctatgtcagcgacaaacactcagaacaaagcagcagtgttctggaatcctttgtgaggaagaaacattcagaacctcataggattgttctggaatcatatatgagggacaaatactgtgaagccaatgacattgttctggaatctgatgtgagggacaaacactcagaacccagcagcagtgttctggaatcctatgtgagtgacaaacactcaaaaaccagcagcagtgttctggaatcatttgtgagggacaaacattcagaccctagaagctgtgttctggaatccaatgtgagggacaaacactcttatcacaacaggagtgttctgcaattctttctgacagacaaacattcacatcctcttagcatttctcgggaatcctatgtgagtgaggaacactcagaacccagcaacagtgttcttgagtcctatgtgaggaacaaacactcacaatgcagccactgtgtactggagtcctatctgagggtcaaacattcacaccctcatagaagtgttctggaatcctttgtgagggacaaactctaagaaaccagcagcagtgtaccggaatcctttgggagggaaaaacactcagaacctcctagcagtgttcttggatcctatgtcagagaaaaacattctgaccctcgtagcagttttctggaatcatatatgagggacaaacactgagaacccagcagcagtgttctggaatcctatgtgagggacaaacattcaggaaacagtagtagtgctctagaatcctttgtgagggacaaacactcagaatgcagcagcagtgttctagaatcctttgttaggtacaaacattcagaaacttgtagaagagttctggaatgcgatgtgagggacaaacactcagaatccagccactgtgtactggaatcctattgacggcaaacattcagaacctcgtagaagtgttctggaattctatgtgagagacaaacactaagaaatctgcagcactgttctataatcctttctgagggacaaacaacagaatccggtagcagtgttctacattctctatgagggaaaaacattcagaacctcgtagcattattctttaatcccatatgagggacaaacactcagaacccagtagcagtgttctggatccctttgtgagggataaacattcagacattcctagcagtgttcaggaatcctatgtgagtgatataatttcagaacttcgtagcactgttctggaattctattagagggacaaacactcaggagccagcagcagagttctagaatcctatgtgagggagaaacactcataaaaaagcagcagtgtcctggaattctatgtgagggacaaacacacagaacccagcagcagtgttgtagaatcctttgtgagggacaaacactcagaacccagcagtagtgttctggaatcctttgtgagggacaaacattcagaacatcgtagctgtgttctgaaatcccatgtgagggacaaacagtcagaatccagccaatgagaattgccatcctatctgagggcaaacactcagaacctcgtagaagtgttctggaatcctatctgatggacaacactaagaaatctgcagcactgttctggaatcctttgtgagggacaaacaaacagaacacagtagcactgttctacaatcctttgtgagggaaacacattcagactctcgtagcagtgttctggaatcctatgtgaggggaaaactttcagaacatcgtggcagagttctggaatcctgtacgagggagaaacactcagaacccattagcagtgttctgaaaccctttgggagggagaaacactcacactctcataacagtgttctggaatcctatgtgagggaaaatcactcagatccttgtagcagggttctgaatccctttctgagggataaacattcagacccttgtagcagtcttctggaatcctatgtgagggacaaacagtcagaacccagcagcagtgttctggaatcctatgtgtaggacaaatactcagaactcagcagcagtgttctggcaacctaagtgagcgaaaaactttcagaacttcgtagcagtgttctggaattctatgtgaggggcaaacactcagaagccagcagcagtgctgtggaatcctatgtgagggacaaacactcagaatccagccaccgtgcactggaatcctatctgagggcaaatattcagaacctcagagaagggttctggaatcctatgagggacaaacactaagaaatctgcaacagtgctctggaatcctttggagggacaagcaaacagaaccctgtagcagtgttgatcagtcctttgtgagggaaaaacattcagacccttgtagcagggttctggaatcctatgtgagggaaaaatattcagacccttgtagcagtgttttggagttctatatgagtgacagacactccgaacccagcagcagtgttctggaaacatttgggagggaaaaatattcacaccctcgttaaagtattctggaatcctatgtgagggaaaaagattcagatcctgatagcattgttttggaatccaatatgaagtatgaacactcagaacccagtagcagtgttctggaaccctttgttgggcataaacattcagcccctcgtagcaatgttctggaatcctatgtgtgggacaaacactcagaacccagcagcagtgttctggaatcctatgtgagggacaaactctcagaaaaaagcagcagtgttctggaaacctatgtggagacaaactctcagaaatttgtagcagtgttctggaattctatgtgagggacaaacactcagaacccagcagcagtgttgtggaatcctaactgagagacaaacactcagcacccagcatcagtgttctggaatccaatgtgagggacaaacactcagaacccagcagcagtgtactgtaatcctttgtgagggagaaacattaagaaactcgtagcagtgtcctgaaattctatgtgagggacaaatattcagaatctagccattgtgtactggaatcctatccaagcacaaacattcagaacatcgtagaagtattctggaatcctatgtgagggaataacactaagaaatctgcagcagtgctctgaaatcctttgtgaggtacaaacagaacccagttgcagtgttctacaatccttagtgagggaaaatctttcagaccctcatagcagtcttctggaatcctatgtgagggaaaaacattcagaaccttgtagcactgttctggaatcctatatgagggaaaaacactcagaacacagcaacagtgttctggaattatttgggagggaaaaatattcacaccctcgtaacagtgttctcgaatcctatatgaggggaaaacatttagaaactcgcagcattgttctggaatccaatatgaggggaaaacactcagaactccatagcagtgttctgtaaacctttgtgaggaataaacattcagaacctcgtagctgtgttctggaatcctacgtgagggagaaatcctcagaactcagcagcagtgttgtggaatcctatgcaagggacaaaccctcagaatccagcagcagtgttttggaatcttatgtaagcgacaaactttcagaacttcatagccctgttctggaattctatgtgagggactgacactcagaaccaagaagcagtgttctggaatcctaagtcagggacaaacactcagaacccagcagcagtgttctcgaatcctatgtgaggcacaagtacttagaactcagcagtagtgttctagaattatttgtgaggcacaaacactcagaaatcagcagcagtgttctagaatcttttttgtgtgacaagcattcataaccttgtagcagtgttctggaatcctatgtgagggacaaacactcagaatccagccactgtgtactggaatcctatccgagggcaaacattcagaacctcgcagaagtgttctggaatcctatgtgagggacaaacagtaagaaatctgcagcactgctctggaatcttttttgagggaaaaacaatcagaacccagtggcagtgttcttcaatccttttgtgagggaaaaacattcagaacctcataacagtcttctgggatcctatctgagggaaaagcattcacaacctcgtagcagtgatctggaatcctatatgtgggacaaacactcagaacccagcagcagtcttctgcaatcctttgggaggggaaaacattcacaccctcgaaaaggtgttctggattcctatgtaatagaaagatattcagaccctcatattattgttctggaatccaatatgagggacaaatgctatgaacccagtagcagtgttctgaaatgctttgtgagggataaacattcagacctttgtagcactgttctggaatcttatgcgggggacaaacactcagaacccagcagcagtgttctggaatcctatgtgagggacaaacactcagaacacagccacagtcttctggaatcctatatgagccacaaacgttcagaacttcatagcagtgttctggatttctatgttatggacaaacactcagtagccagcagcagtgttctggattcctaagtgagggacaaacattcagaaaccaacagcagtgttcctgaatcatatgtgatggacaaacacacagaacccagcagaagtgttctagaatcttttgtgagggacaaacactcagaacccgacagcagtgttctgtaatcctttaggagggaaaaactttcacaccctcataacagtgttccggaatcctaggtgagggaaaaacattcagacactcgtaccattgttttggaagacaatatgagggcaaccactcagaacccagcagcagtttcctggaaacctttatgagggataaacattcagaacctcgtagcagtgttttgcaatcttatgtgagggacaaacactagaacccagcagcagtgttctggaatcctatgagagggagaaacactcagaacccagcagcactgttctggaatcctatgtgagtgacaaactttctgaatttcgtagcaatgttctggaattctatgtgagggacaagcagtgagaaatcagcagcagtgttctggaattctatgtgagggacaaaaattcagaccctcctagcagtgttctggaatcctatgtgaggtacaaatcctcagaacctagcagcaatgttctagaatcttttgtgagggacaaacactcagaacccagactaagtgttctagaatcctttgtgaaggacaaacattcagaacctcgtagcagtgttctggaattctatgtgagggacaaacactcagtatccagccacagtgtactggaatcctatctgagagccaacattccaaacctcatcacagtgttctggaatcctatgtgaaggacaaacactaagaagtctgcagcagtgccctggaattctttgtgtgggaccaaaaacataactcagtagcagtgttctaaaatcctttgtgagggaaaaacattcagatcctcatagcagcgttctggaaccctatatgagggacaaacactcagaaccgagcagcagtgttctggaatcctttgggagggaaaaacattcacaccctcgtaactgagttctggaatcctacgtgagggaaaaactttcagacattcgcagcattgttctggaatccaatatgaaggacaaaccctcagaatccagtagtagtgttctggaaacatttgtgagggataaacattcagaccctcgtagcagtgttctggaatccaaagtgagggacaaacactcagaacacagcagcagtgttctggaatcctaagtgagagacaaacactcagaacccaggagcagtgttctggaatcctaagtgagcagcaaactttcagaaatttgtagcagtgttctggaattctatgtgagggagaaacactcagaacccagctgcagtgttttggaatcctaagtgatggacaaacactcagaacccagcagcagtgttctggaatcctaagtgagggacaagcgttcggaatccagcattattgttctagaatcctttgtgaggacaaacactccgaacccagtcccagtgttctagaatcctttattagggacaagcattcagaacctcgtagcagtgttctggaatcctatctgagggacaaatactcagaatccagccactgtgtactggaataatatatgagtgcaaacattcagaacctcgtagcagtgttctggaatcctatctgagggacaaatactcagaatccagccactgtgtactggaataatatatgagtgcaaacattcagaacctcatagaagtgttctggaatcgtatgtgagggataaaaactaagacatctgcagcagtgctctggattcctttgtgagggacaagcaaacagaacccagtagcaatgttctacaatgctctgtgagagaaaaacattcagaacctcgtagcagtgttctggaatcctatgtgagggaaaacattcagaccctagaagctgtgttctggaatcctacctgagggacaaacactcagaacccagcagcagtgttctggaatcctttaggagggaaaatattcacaccctcgtaacagtgttctggaatcctatgtgagggaaaaacattcagacactcgtagcactgttctggaatccaatataagggcaaacactcagaacccactagcagtgttctggaaacctttgtgagggataaacattcagaccctcgtagcagtgttttggaatcctatgtgaggaacaaacactcagaatgcagaagcagtgttctggaatcctatgagagaaacaaacactcacaacccagcagcagtgttctggaatcccatgtgagcgacaaactttctgaacttcctagcagtgttctggaattctatgtgagttacaaactctgagaagccagcagcagtgttcttgaatcctaagtgagggacaaacactcagaacccagcagcagtgttctggaatcctatgagagggacaaacactcagaacctatcagaagtgttctagaatcctttgtgagggacaaacactcagaacccagcatcattgttctagaatcctttgtgagagtcaaacattcagaacctcgtaacagtgttctggaatcctaggtgagggacaaacactcagaatccagccattgtgtacttgaattctagctgagggcaaacattcagaaccccatagaagtgttctggaatcctatgtgtgggacaaactctaagaaatctgcagcagtgctctggaatccattgtgaggggcaaacaaacataacccagtagcagtgttctacaatcctttctgagggaaagacattcagaccatcttagcagtgttcttgaatcctttgtgagggaaaagcattcagaccctcgttgcagtgatttggaatcctatatgtgggacaaacactcagaacccagcagcaatcttctggaatcctttggtagggaaaaacattcaaactatcgaaacagtgttctggaaacctatgtgatggaaagacattcggaccctcttgatattgttctggaatccaatatgagggacaaatgctaacagctcagtagcagtgatctgaaacactttgtgactgataaacattcagacccttgtagcactgttctggaatcttatgtgagggacaaacactcagaacccagcagcagtgttctggaatcctgtgtgagggacaaacactcagaacccagcagcagtgttctggaatcctgtgtgagggacaatcactcagaacccagcagcagtgttctggaatcctatgtgtgtgacaaactttcagaacttcgtagcagtgttgtggatttctatgtcatggacaaacactgagatggcagcagtgttctggattcctaagtgatggacaaacactcagaaaccaacagcagtgttctggaatcctatgtgatggacaaacaccggaacccagcagcagtgttccagcatcctttgtgagggacaaacactcagaactcagcagaagtgttctagaatactttgtgagggacaaacattcagaacctcgtaacactgttctggaatcctatgtgaggggcaaacactcaaaatccaaccactatgtactggaatcctatctgaggctaaacattcagaacctctgagaagtgttctggaatcctaagtgagggacacacactaagaaatctgtagctgtgttctgggatcttttgtgtgggacaaactaacagaactcagtagcagcattgtacaatcctttgtgagggaaaaatattcagacctcttagcagtcttctggaatcctatgtgagggaaaaacattcagaccctcgctgcagtgttctcaaatccaacatgagggacaaacactcagaacccagtagcattgttctggaaacctttgtgagggataaacattccgaccctcgtagcagtgttctggaatcctaagtgagggacagacactcagaaccaagcagcagtgttctgaaatcctatgtatgcgacacagttttagaatttcatagcggtgttctggaattctatgtgagggacaaacactcagaagccagctgcagtgttctggaatcctatgtgagggacaaacattcagaacccagcagcagtgttctcgaatcctatgtgagggactaacccagagaacacagcagcactgttctagaatcctttgtgagggacaaacactcagaacccagaagcagtgttctagaatcctttgtgagggacaaacaatcagaatctcgtagaagtgttctagaatcctatgtgagggacaaacactcagaatccagagactgtgtactggaatcctacttgagggcaaacattcagaacctcggagaattgttctggtatcctatgtgagggacaaaccctaagaaatctggagcatcgctctgtaatcctttttgagggacaaacaaacagaacccaggttcagtgtcctacaatcctttgtgagggaaaaacattcagactctcgtagtagtgttctggaatcctatgtgaaggacaaacactcagaaaactgtagcagtgttctggaatcctatgtgagggagaaatacccaggactcggcagcattgttcggcaattctatgtgaggagcaaacactccgaaaccagcagcagtgttctaaaatcttttgtgagtgacaagcattcagacactcagagcactattctgtaacgctaagtgagggagaaacattcagaccctcgtagcagtgttctgaaatcctatgtgagagacaaacactaagaacgcagctgcagtgttctggaatcctatctgagggacaaacactgagaacccagcagcagtgttctggaatcctttgtgcatgacaaacattcagaaattcatagcagtgttctggagtcatatgtgagggacaaacactctgaaaccagctgcagtgttttggaatcccatgtgagggacagacactcagaacccagcagcagtgttctggaatcctacgtaaatgaaagacactcagaacccagaagcaatgttccagaatcctttgtgagggacaaactatgagaccttcaaagcagtgttctggaatcttatgtgagggaaaaacactgagaacccagcagcagcgttctggaatcctatgtgtgggacaaacactcagaacccagccgcagggttctggaatgttatgtgatggacaaacacacataagccagccactgtgttctggaatcctatgtgagggatggacactcagaacccagcagcagtgttctggattcctatatgagggacagacactcagaaccttgcagcagttttctggaatcctaggtgaggtacaatcactcagaacccagctgcagtgttctggaatcctatgtgtggaacaaacattcagaccctcgtagcagtgttctggaatcttatgtgatgatcaaacactcagaaaacagtagtagtgttctggaatcctatgtcagggacaaacactctgaacccaacagtagtgttctggtatcgtttgtgagggactaacattcagaccctcatagcactgttctgaaatcctaggtgagagataaacactcagaacccatctgcagtgttctggaatcctgagtgagggacaaacactcagaacccagcagcagtgttctgaaatcctttgtgagggacaaacattcagaacttcgcagcattgttctggaatcatacgtgagggacaaacactcaaaaccccccagcagtgctctggaatcctatgagagggacaagcattcagaccctcatagcactgttctggaacgctatgtgaaggacaaacattcagagcctcatagcagtgttctggagtcctatgtgaggtacaaacccatagaactcagtagaattctgcaaatctacatgaattacaaacactcggaacacagcagcagtgttctcgattcctatttgaaggacaaacaatcagaaccctgcagcagtgctctggaatcccatctgagggaccatcactaaaaacccagcagtaatgtattgtaccttacatgattgacaaacacacagaacccatcagaagtgttctggaatcctacgtgagtgacaaacactcaaaacccagcatcagagttctggaatcctttgtgaaggacaaacattcagaccattgtagaactgttctgaaatcctaggtgtgggacaaaaactcagaacccagcactgttgttctggaatcctatgtgagggacaaatacccagagcccagcagcagtgttcaggaattctatgtgacgtaaacccttagaacccagcacctgtgttctggaaaactttttggggacaaacagtcagacactcatagcactgttctataatgctatgtgagggagaaactttcagactctcatagcagtattctgaaatcctatgtgagggacaaacactcagaaaacagcagcagtgttctgttgtcctatgtgaggaacaaacactcagaacccagcagcagtgttcaggaattctatgtgagggacaaagcctcagaacccaacagcagtgttctggaatcctttgtgagggacaaatattgagacacccagagcagtgttttggaatactatgtgaaggacaaacactcagaaccctgcagcagggttctggaatcctatgtgtgggacaaccattcagaccctcataacactgttctgtaatgttctgtgagggacaaacattcagaccctcatagcagtgttctggaatcctgcgtgaggtacaaaccctgagaagtcaaaagcagtgttctggaattctatgtgaaggacaaaccctcagaaccttgcagcagtgttctggaatcgtatgtgagggactaacactcagaatccagcagcagtattctggaatgctatgtgagggcaaacacacaaaacccagcagcagtgttctggtatcctatataagggacaaacactcagaacccagcagaggtgtcctggattcctatgtgagacacaaacattcaaaaactagcagcagtgtccaggaatcctaaatgagggacaaacattcagaccttcggagcagtgttctggaatcctatgtgaaggacaaacactcagaacgcaatagcagtgttctggaatcctatgtgaaggacaaacactcaggacccagtagcagtggtagggagtgctttctgatggacaaacattcagaaccttgtagcaattttctggaatcctatgtgagggacaaacgctcagaacacagcagcagtgttctggaatactttgtgagggacaaacactcagaacccagcagcatttttctgcaatcttttgtgagagacaaactttcatacccttggagccatgttctcgaatcctttttgagggacaaacactcagaacccaacagcagtggtctggaatcctctatgagggacaaacactcagaacccagcagcagagttctggactcctaagtgagggacaaacactcagaacccagcagcagtgttcgggaatccaaagtgacggacaaacattcagatcccttcagcagtgttctgggatcctaagtgagggacaagcattcagaccctcatagcactgttctcgaatgctctgtgagggacaaacattcagaacctcgtagcagtgttctgggatcctatgtgaggtacaaaccttcagaacccagcagcattgttctggaattctacatgacggacaaaccctcagaacctagctgcagtgttctggaatcctatgtgagggacgaacactcagaacccagcagcagtgttctgcattcctatgtgagggacaagcactcagaaacctgcagcagcgtttgggaatcccatgtgagggacaaatactgaaaacccagcagaagtgttcttgtatcctacatgatggacaaacacacagaacccagcagaagtgttctgaaatcctgtatgagtgacaaacactcacaacccagcagtagggttctggaatcctatgtgagggacaaacattcagacccttgttgcagtgttctggaatcctatgtaagggacaaacactcacaatacagcagcagtgttctggaatcataagtaacggactaacactcagaaccaagcagcagtgttctggaacgctatgtgagggacaaacactcagtatgcagcagcagtgttccagaatccaatgtaagggagaaacactcagatccaggcagcagggttctggaatcctatgtgtgggacaagcattcataccctcatagcactgttctggaatgctctgtgagggacaaacattcagaccctcgtaggagtgttctggaatcctatgtgaaggacaaatactcagaaaacactagtagtgttctggaatactaagtgaggggcaaagattctgaacctagcagcagtgtcctggaatcgtttgtgaggacctaacattcagaaactcatagcagtgttctggaatcctaggtgagagacaaacactcagaacccagctgtagttttctggaatcctatgtgagggacaaacactcagaacccagaagctgtgttctggaatcctttgtgaagaacaaacattcagaccctcggagcctttttctggaatcctatgtgagggacaaactttcagatccccgcggcaatgttccggaatccttcgggagggacaatcattcagaccctccgagcactgctctgtaatgttatgtgagggtcaaacattcagaccctcttagcaatgttctggaatcctaagtgaggtacaaaacctcagaacccagaagcggtgttctggaattctacgtgagggacaaaccctcagaacctagcagcagtcttctggagtcttatgtgagggacgaacacagagaacccagcagcagtgttctggattcctatgtgagggacaaacactcagaaccctgcagcagttttctggaatccaaggtgagggacaatcactcagaacccagcagctatgttccggaaacctatgtgagggacaaacattcggaccctcgtgtcagtgttctggaatcctatgcgacgatcaaacactcagaaaacggtaccagtgttccggaatcctttgtgagggacaaacactctgaacccagcagcagtgttctggtatcgtttgtgaggcagcaacattcagacccctgtagcactgttctggaatcctaggtgagagacaaacactcagaaccctgcagcagtgttctggaatcctacgtgaggtgcaaacattcagaccctcatagcactgttctggaatgctacgtgagggacaaacattcagaccctagtagcagtgttctagaatcctatgtgaggtacaatccctcagaacccagcagcagtgttctagaattctacgtgaaggacacacactcggaacacagcagcagtgttctggattgttatgtgaaggacaaacactcagaaccctgcagcagtgctctggaatcctatgtgagggacaaacactaaaaacccagcagtagtgttttgtattctaaatgatgtacaaacacacagaacccatcagaagtgttctggaatcttatgtgagtgaaaacatttggaaaccagcagcagtgttctggaatgctatgcgagggacaaacattcagacccttgtagcactgctctgaaatcctaggtgtgggacaaaaactcagaacccagcagtcgtgttctgaaatcctatgtgagggacaaatacccagtacccagcagcaatgttcaggaattccatgtgaggaacaaaccctcagaacccagcagcaatgttgtggaatactttgtggggaacaaacagtcagacactcatagcactgttctataatgctatgtgagggagaaacattcagaccctcgtagcagtgttccgaaatcctatgtgagggacaaacattcagaaaacagcagcagttttctgtagtcctatgtgagggacaaacactcagaacccagtagcagtgttcgggaattctatgtgagggacaaaccgtcagaacccagcagcagtgttctggaatcctttttgagggacaaactttcagacactcagagcagtgttttggaatcctatgtgagggacaaacactcagaaccctgcagcagggttctggaatcctatgtgtgggacaagcattcagaccctcatagcactgttctggaatgctctgtgagggacaaacattcagacccttgtagcagtgttctggaatcctgtgtgaggtacaaaccctcagaactcagaagcagtgttctggaattctatgtgaaggaaaaaccctcagaaccttgcagcagtgttctggaatcgtatgtgagttactaacattcaaaacccagcagcagtgttctggattgctatgtgagggacaaacacacaaaagccagcagcactgttctggtatcctatataagggacaaacactcagaatccagtagaagtgttctggtattctatataagggacaaacactctcagaatccagcagaagtgttctggattcccatgtgagggacaaacattcaaaaatcagcagcagtgttctgaaatcttaagtgagggacaaacgttcagactctcggagcagtgttctataatcctatgtgaaggacaaacactcagaacccagtagcagtgttctggaaccctatgtgagggacaaacactcagaacccagtagcagtgttctggaatactttgtgaaggacaaacactcagaactcaaaagcagtgttctggtatcgctttgagggacaaccattcagacactcgtagcagtgctctgggattatatgtgagggacaaacattcagaacccagcagcagtgttctggtatccttggtgaggaacaaactttcagaacctccgagcagtattctggaatcccgggtttggacaagcactcagaacccagcagcagtgttcgggaattctatgtgaggaacaaaccgtcagaacccagcagcagtgttctggaatcctttttgagggacaaactttcagacactcagagcagtgttttggaatcctatgtgagggacaaacactcagagccctgcagcagggttctggaatcctatgtgtgggacaagcattcagaccctcatagcactgttctggaatgctctgtgagggacaaacattcagacccttgtagcagtgttctggaatcctgtgtgaggtacaaaccctcagaactcagaagcagtgttctgcaattctatgtgaaggacaaaccctcagaaccttgcagcagtgttctggaatcgtacgtgaggtactaacattcagaacccagcagcagtgttctggaatgctatgtgagggacaaacaaaacccagcagcagtgttctggtattctatataagggacaaacactcagaatccagtagaagtgttctggtatcctatataagggacaaacactcagaatccagcagaagtgttctggattcctatgtgagggagaaacattcaaaaatcagcagcagtgttctgaaatcttaagtgagggacaaacattcagaccgtcggagcagtgttctataatcctatgtgaaggacaaacattcagaacccagtagcagtgttctggaaacctatgtgaggggccaacactcagaacccagcagcagtgttctggaatgctatgtgagggacaagcattcagaccctcatagcagtgttctggaatcttatgtgagggacaatcattcagaccgtcgtggcactgttctggaatcctatgtcatggaaaaacactcagaaccctgcagcagtgttctgaaatacgatgtggtggacaaacaaagaacacagcagcagtgttcgggaatcctttgtgagggaaaaacattcagaacctcgtagcagtgttctgtaatcctatgtgaggaacaaaccctcagaacccagcagcagtgttctcgaatccaattggtgggacaaacactcagaacccaacaggattgatctgtaattctttgtgagggacaaagattcagacactcgtagcagtgttctggaatcctatgttagggacaatcactcagaaacctgcagcaatgttctgcaatcctatgggagggacaaacactcagaacccagccactgtgtactggaattctaacagagggaaaaacattcagaccctcctaaagtgttctgtaatccaatgtgaggaacaaaccctgagaacccagcagcagtgttctcaaatccaatttgtgggacaaacactcaggacccatcaggagtggtctggaattctttgtgaaggacaaagattcagaccctcttagcagtgttcttgaatcctatgttagggagaatcactcagaaccctgcatcagtgttctggaatcctatgggattgacaaaccctcagaacccagcagcaatgttctggaatcctatgggagggacaaacactcagaaaccggcagcagtgttctggaatcctttgtgagggacaaatattcagaccctcgtagcaatgttatggaatcccatgtgctatataaaccttcagacccccgtagcagtgttctcgaatgctatgtgagggacaaataatcagaacccagcagccatgttctgtaatactatgtgagggacaaacactgagaaccctgcagcagtgtttgtgagggacttacattcaggccttcttatcagtgttatggaatcctatgtgagggaccaaccctcagaacccagcagcagtgtgctggtttccttcctgaggcacaaacattcagagcctcgtaacagtgttctcgaatcctatatgagggacaaacaccccgaacccagcagcagtgttttggaatcctttgtgagagaaaaacattcagaccctcaaagcagtgttctggaatcctatgtgacagagaaacacccaaaacccagcagctgtgttctggtatcctacatgaggggcaagcattcagaccatcatagcagtgttctggaatcatatgtgagagacaaacattcagaccctcatagctgtgttctgcaatcctgtgagagggaaaaacattcagaacccagcagcagtgttctggaatcctatgtgaaggacaaacactcagaacccagcaacagtattctggaatcccacgtgagggactagcattcagaccatcgtagcaatgttctggaatgctatgttacggagaatccttaagaccgtcgtaccagtgttctggaatcctatgagagggacaaacaatcagaacccagtagcagtattctggaatcctttgtgagggacaaacaccaggaacccagcagcagtgttctggaatcctatgtgtgggacaaactctcagatcccagcagcagtgttccggattgctatgtaagggacaaacactgagaacacggcagcagtgttctggaatcctttgtgagggacaaagattcagaccctcgtagcagtgttctggataagatgtgaggctcaatcagaacccagcagaattgtcctagaatcctatgtgagtaacagagactcagaacccagcagcagtgttctggaatcctttgtgagggacaaacattcagaaccttggagaagttttctggaatactatgtgagggtaaaacaccaagaacccaggagcagtttcttgaaaacgttgtgagggaaaagctttcagacatttgtaccagtgttctggaatccgatgtgagggacaaatattcagaacctcgtagcagtgttctgtaatcctaagtgagggacaattactcagaacccagcagcagtgttctggaatcctttgtgagggacatagattcagaccctcttagcagtattctctaatcctatgtgagtgacaaacattcagacactcgtagcagtgttctggaaacctatgtgtaggacaaacactcagaacccagcagcagtgttctggaatcctatttgattggcaaagacacagaacccatcagcagtgttctggaaaaccagcagcagagttctggaatcctatgtgagggagaaatcctcagaacccaccagtgtgttttgaaatccattgtgaaggacacacattcataccctcctagaagtgttctggaatcctatgtgagtgacaaactttgagaccctcgtagaagtattcaggaatcatatgtgagtggcaaacactaagaaccgagcagaagtgttctggaatcatatttgattgacaaacacacagaaccccgcagcagtgttctggaatcctttgtgaaggaaaaaccttcagaaacttgtagcagtgttctggaatcctatgtgagggagaaacactgagaacccaacagcagtgttctggaatcctatgagagggtcaaacactcagaacccagcagcagtgttctggtatcctatgttatggacaaacactcagaacccagcagcagtgttctggattcctttttgagggaaaatcattcagaccctcgtagccatgttctgtaatcctatgtgagggacaaagtctcagaacccagcaacgatattacagaatcctttgtgagggactatattcagacccaggtagcagtgttctggaattcaatatgagaaacaaacactccgaacccggcagcagtgttctggaatcttttgtgagggacaaatattcaggccctcatagcagtgtcctttaatcttaagtgaggggcaagcactcagaactctgttgcagtgttctggagtcctatgtgagggacaagcattcagacacttgtaacagtgttccataatcctaagtgtgggacacacattcacaccctcgtagcagtgtcctgagtcctatgtgagagacaaacactgagaacccagcagcagtgttctggaatcccttgtgagggagaaacattcagacccccgtagcagtgttctggaatcctatgtgaaggacaaacactcagatcccagcagcagtgtttgggaatcctttgtgaaggtcaaacgttcagaccctctcaggagggttctggaattctatgtgagggacaaacactccgaaaccagcagcagtgttctagagtgtttcatgagggacaaacactcaggccctcagagcaatattctttaaacctaagtgagggacaaacactcaaaaccctgtaacactgttctggaatcctttgtgtggacaaacacacagaacccagcagcagtgttctggagtcctttgtgagggaaaaacattcagaccctccgagcggtgttgtggattcctatgcttggaccaaacactcagaacatggcagcagtgctctataatcctttgtgaaggacaaacattcagacccttcaagcagtgttctggaatcctatgtgagtgacaaacccttaaaacccagcagcagtgttctagaatattatgtgagggacaaaccctcagaacttggcaacagtattctggaatcctatgtgagggtaaaacactcagaacccaactgcaaggttcttgaatcctatgtgagggataaacactcagaacccagcagcattgttctgtaatcttttctgtgggacaaactttcgtacagttgtagcagtgttctggagtccaatctgaggacaaacactcagaaaacagcagcagtgttctggaatcctttgtgagggacaaacattcagaccctcagagcagtgttgtggaatcctatgtgaggggcaaacacacagaacgtggaagcagtgtcctggtattctctctgtgggacaaacactcagaacctagccatggtgttccggaattctatatgagggacaaaccctcaaaaacgagaatcattgttgtggaatcctttgtgtgggacaaacattcagacactcatagcagtgttctggaatcctaggtgagggacaagcactcagaatccagcagcagtgttctagaattctacgtgagggacaaacccacagaacatatcagcagtattcaggaatcctatgtgagaggcaaacactcagaaccccgcagcactcttctggaatcctttgtgagggacaaactttcataccctcttaacagtgtactggaatcttatgtgaggacaagcactcagaacacagcaacagtgtactggaatcctatgtgggggacaaacagtgagcaacgagtagcagtgttctggaattctaagggagggacaaaccctcagaacccagtagcagtgctgtggaatcttacgtgaggaaaaaacactccaaatccagcagcagtgttccggaattctatgtacaggacagacactctgaaaccagcagcagtgttctttaatactttccaagttacaaacatgcagaccctcgttgcagtgtactggaatcctatgtgagggaaaagcattcagactctcgtagcagtgttctggaatcctatgtgagggacaaacactcagaacccagaagcagtattctggaataatttggcagggacaaacattcagaccctcatagcagtgttctggaatcctatgtgagaaacaaacgttcagacccttgtagcagtgttctcgaaaccggtgtgtgtttcaaaccctcagaacccagcagcagtgttctggaatcctaagtgaggacaaacactcagaacccagcaacattcttctggaatcctatgtgagggataaacactcagaacccagcaacagtgttctagaatcctacgtgagggacaaaccctcagaacccaacagcagtgttctggaatcttttgtgagggacaaacattcagaccatcgtatcagtggtctggaatcctatttgagggacaaaccctaataacccagacgcaatgttgtggaattctatgtgagggacagaacatcagaacctagcagtagtgttttggaatcctatgtaagggagaaacactccgaacccatcagcagtcttctggaatcctgtttgtgggacaaacattcagaccatcgtagcactgttctggaagtctacgtgagggacaaacactcagaacacagcagcagtgttctggaatcccatgtgagggacaaacactcagaacccagcagcagcgttatggaatcctttgtgaaggcagacattcagaccatcatagcagtggtctggaatcctatgtgagggacaaaccctcagatcccagcagcagtgttatggaatcctttgtgaaggcagacattcagaccatcatagcagtggtctggaatcctatgtgagggacaaaccctcagaaaccagcagcagtgttctggaattctatgtgtctctaacattctgagggtttgtccctcacataggattccttaacactgctgctgggttctgagtgtttgtccctcacataggattccagaactctgctgcttagttcagagtgtttgtccatcacttaggattccagaacaattctgctgggttgtgagtttttgtccaactcataagattccagatcactgttgctggattctgagtgtttggccctcacatgggattatagaacactgctaccagggtctgcatgtctcaccctcacaaagtattccacaacagtgctatcaggatctgaatgcttgtcccccacataggattccagaacactgctgcagttttctgagtgtttgtccctaacataggattccaaaacactattctgagtgcctgaacgtttgtccctcacatgggattccagaactctgctgctgggttctgagtgtttgtcccacacaaaggattgcagaacaatgttgctgggttcttagtgtttgaccctcacataggattccagaacatagctgctggttcaaagtgtttgaccctcacatacgattccagaacacggctacaaggttctaaatgtttgtccctcacgaaggattccaggacactgctgttggtttctaagtgtttttccgtcaaacagtattccagaacactgctgctgggttctgagtgtgtgtccctctcactgagttccagaactatgctgctaggttctgagggtttgcccttcacattgaattccaaaacactcctgctgggttctgattgtttgtccctctcatagaattccagaacactgctaggagtgtctgtatttttctccaacgcataggatttcagaacattgctatgagggtctgaatgctagtccctcacatgggattccagaacactgcggctgggttctgagtatttgttcctcacaaaggattccagaacactgctggtaggttctgagtgtttgtccctcacataggattccagaactctgctgtgagggtcggaatgtttcactctcagataggaatccagaagactgctgctgggttctgaccggtcgtccctcacataggatcccagaacactgcttcgagtgtctgagagtttgtacctcacataggattccagaacagggctgctaggatctcagtgtttgtctctcacatgggattccagaacactgctgctgggttctgagtgtttctccctcacataggattgcagaaaactgagacgagggtctcaattcttttccttcacaaaggattccaggacactgctgctgggctctgtttgtccctcaaaaaggattccagagcaccgctgcttgtttctgagtgtttgtctctcacataggattctagaacacttctacaagtgtctgaatgtttgtccctcagataggattccagaacacagtggctgggttctgagtgtttgtccctcacacaggattgcagaacactgctacgagtttctgaatgtttgtccctcacataggattgtagaacactgctgctgggttctgagtgtttgttcctcacatagaattccagcacactgctgctggattctcagtgtttgtccctcacatgggattcgagaacattgcaacgaagttctgtatctttgtcgctcaaacaggattccaaaacattgctgctgggttctgtgtgtttctccctcacttgcgattccagagcacttctacgagattctgaatgtttgtccctcacaagggatgctagaacattgctgttggtttctgagtgtttttccctcacataggattctagaaggctgttgctggcttctgagtgtttgtcactcacatagaatggcagaacattgctacaaaattctgaatgtttgtcactcacataggattctagaacactgctgctgggttcagagtgtttgtccctcacataggattgcagaacactgctgctggtttctgagtgtttgtccctcacataggattccagaaaactgctgctggtttctgaatgtttgtccctgacataggattccagaacaatactgctgggttctgagtgtatgtccctcacagaggattccagaacactactgctggattctgagggtttgtccctcacaaaggattccaaaacactactgctgggttctgagtgtatgtccctcacagaggattccagtacactattgctggattctgaaggtttgtccgtcacataggattccagaacactgctactagggtctgaatgttttccatcacaaaggattccagacaactgcttctgtgttctgagggtttctacaacagattgcattccagaacactgctaggagggtctgaatgtttgtccctcacataggattccagaatactgcacctggattctgagtttttgtccttcacataatattccagaacacttctgggagcttctgaatgtttgtgcctgacataggatttcagaacacttctgttgggttctgagtgtttttacctcatataggataccagaatactactgctctgttttgtgtgtttgtctcttacatagcattccagaacactgctgcagggttctgagtgttattaccttacgtatgattccagaacactgctgttaggttctgagggtttgtccctcacatagaattccagaaagctgctgctgagttgtgagggtttgtacctcacacaggatttcagaacactgctacgagggtctgattgtttgttcctcacagagcattccacaacagtgctatcaggatctgaatgcttgtcccccacgtaggattccagaacactgctgcagttttctgagtgtttgtccctaacataggattccaaaacactattctgagtgcctgaacgtttgtccctcacatgggattccagaactctgctgctgggttctgagtgtttgtcccacacaaaggattgcagaacaatgttgctgggttcttagtgtttgtccctcacaaaggattacagaacactgttgctgggttctgagtgtttgtccctcacataggattccagaacacagctgctggttcaaagtgtttgaccctcacatacgattccagaacacggctacaaggttctgaatgtttgtccctcacgaaggattccagaacactgctgctgggctctgtttatttatccatcacaaaggattccagagcactgctgatggtttctgagtatttgtcactcacataggattccagaacacttctacgaggctccgaatatttttccctcagataacattccagaacacagtggctgggttctgagtgtttgtccctcaaacagaattccagaacactgcttcgagggtctgaatgtttgtatatcacaaagcaatctaaaacactgctgcaggtttctgactgtttgtcactcattaaggattcgaaaatactgctgctgggttcttagtgtttggccctcacgtaggattccaggatactgcttttgagttttgagtgtttgttccttacaaatgattccagaacattgctacaggtttctgactgtttgtccttcacataggattccagaagacttcttcaagtctccgaatgtttgtccttcagataggattccagaacacaggggctgggttctgagtgtttgtccctcccatagggtatcagaacactgctgctgggttctgagtttttgtccatcacataggattccagaacactgctgctttgttctgagtgtttgtccctcacctaggaatccagaacactgcagctcggtaatgagggtttgtccctcacatagaattctagaacactgcagatattttctgagcgtttctccctcagttgggattccagaaaactgataagattttctgaatgtttgtcccttaccaagtattccagaacactgatgctgggttctgactgtttggccctcacattggtttccaaaacactgctatgcccaaaacactgctatgtctgaatgtccctcacatagaattccagaaccctgctaagggggtctgaatgtttgtcactcacaaaggattccagaacactgctgatggtttcttagtgtttgtcattcacataggattccagaacactgctgatggtttcttagtgtttgtcattcacataggattccagaacactgccttgaggaactgaatgttgtccctcacaaaggagtacagaacactgctgctgggttctgagtgtttgttcctaatgtgtgattccagaccaccgctatgagggtctgaaagtttttccctcataaagtattgtagaacaaggctactgggttctatttgtttgaccttcacaatagattccagagcactgctgcagatttcttagtatttgtccctcacgtagaattccagaacatttctactaggttctgaatgtttgtccctcagataggattctagtacacagtggataccagaacactactgctgtgttctgagtgtttttcctcacaaagtattctagaacactgctgctgggttctgagtgtttgtccctcacataggattccagaacactgttgctggattctgagtgtttgtcactcacataagattccagaacactgctactgggttctgtgtgtttgtccctcacataagattccagaatactgctacgaatttctgaaagtttgtcactcccacaggactccagaacactgcagttgggttctgagtgtttttccctcacataggattccagaacactgctgctggtttttgagtgtttgtccctcatataggattccagaacactgttacgagggtctgaatatttttcccacagtaaggattccagaacactgttatgaaggtgtaaatgtttttccctctcaagggattccagaacactgctgctggtttctgagtgtttgtcactcatatatgattacagaacactgctacgaggctctgaaaatatttccctcacataggattccagaacactgctagaaaggtctgaatgtttttccctcataaaggattccagagcactgctgttggttttttagagtttctccctcacataggattccagaacactgctacgagggtctgaatgttaggcccacagataggattcctgtacacagtgagtgggttctgagtgtttgtccctcaaacaggattgaagaacacggctgctgggttgtgagtgtttgttcttcatataggattctagaacactgcttgctgctgggttctgagtgtttgtccctcacttaggattcccaaaatctgttacgagggtctgaatgtttgcccatcacaaaggattgcagaacattgctgatgggatcggagtgtttgtccatcacataggattccagaacactgctttgagcgtctgaaagtttgtcccacagaaaggattctagaacactgctgctggtttctgagtgtttgtcactcacataggattccagaactctgctacgaaattctgaatgtttgttgctcacattttatttcagaaaactgctgctgggttctgagggtttgacttcatagaggagtccagaacactgccgttgggttatcagtgtttgtccctcacataggattccagaacactgctacaagggtctaaatatttttccctcacaaagattccagaacacagctgctgggttctgtttgcttgtgcttcacaaaggattccagatcaccgctgctagtttctgagtgtttatccctcacataggattccagaacacttccacgagtgtctgaatatttgtcactcgacaagattccagaaaacagctgctggtttctgagtgtgtgttcatcacatagaattccagaacactgctactgggttctgagtgtatgtccctcagataggattccagaacacttctgctggattgtgagtgtttgtccctcacataagattccagaacactgctgctgggttctgagtgtttgtgcctccattaggattccgtaacactgctacaagggcctgaatgtttgtccataacaaaggattccagaagatttctgctgggttatgactgtttgtacctcacataggattccagaacactgcttcgagggtttgaatgtttgtccctcacaaaggattcaagaacattcctgcggggttcggagtgtttgtcactcacgcaggattccagaacactgctgctgcgttctgggcttttatccctcacttaggattcaagaacactcctacgaggttctgaacgtttgtccctaaaaaggattagagaacagtgctgctgggttcagatttttgtccctcacaaaagattccagagcactgctggtggtttctgagtgttgtccctcacataggattccagaacacttctacgattgtctgaatgtttgtccctcatataggattccagaacacagtggttgggtactgagtgtttgtccctcacatgggattccagaacactgctgttgggttctgagggtttgtctctcacataggattctagaacactgctgctgggttctgagtgtttgtccctcaaatgggattccagaacagtgctatgaagttctgaatctttgtctttcactcaggattccaaaacactgctgctgggttctgaatgtttgtcccttacataggattccagaacactgctacggggttctgaatgttttccctcaaaaaggttacagaataaaactctggcttgtgtttgttgccctcacaaaggtctccatagcaccgctgctgttttctgagtgtttgtccctcacataggattccagaacacctccacgggtgtctgaatatttgtccctcagaaggattccagaacacagtggcttggttctgagtgtttgtccctcacttaggattccagaacactgctccgacggtctgaatgtttgtccatcacaaaggattcctgaacactgctgctgggttgtgactgttcctccctcacataggattccagagcactgctttgagggcatgaatgcttgtcccacacaaagaattctagaacactgctgctggattctgagtgtttgtcactcacataggattccagaatactgctgttgggttctgagtgtttgtccctcacatgggattccagaacgttactgcctggttctgagtgtttgtcccacatctaagattccagaacaatgctgctgggttctgagtgtttgtccctcacataagattccagaacactgctacgaggttctgaatgtttgtccctcagaaaggattccagaacgctgctgctgggttctgagtgcttatccttcacataggatttcagacccctgctgcagtgatctgagtgtttgtccatcacataggattccagaacactactgctgagttctgagtgtttctccctcacagaggattctacaacactgctgctggattctgagtgtttctcccacacctaggattccagaacactgcgaagaggttccgaatgtttctccatcacaacagattacagaagattgctcctaggttctgagagttgtcaatcacataggattgcagaacactgcttcgaaggtctgaatgtttgtccctcaaaaagcattccagcacactgctgctggtttctgagtgtttgtccctcacttgggattccagaatactgctgctgggttctgtgagtttgtccctcaaataggattccagaacactgcttcgaggttctgaatgtttgtaccccacaaaggattctagaacactgctgctgggttctgagggtttgttcctcatttaggatttcagaacactgctgctgggttcagagtgtttgtctctcaagagtgattgcagaacactgctgctcagttcagacggtttgtccctcacacaggattaaagaacactgctatgaggttctgaatgtttttccctcataaaggattccagaatactgctgctggtttctgagtgtttatccctcacataggattccagaacacttctaccagtgtctgaatgtttgcccctcagttaggattcaagaacacagtggcggggttccgagtgtttgtccctcacataggattccagaaccctgctgcttggttctgtgtgtttgtccctcacggaggattctaggacactgctgctggcttctgggtgtttgtccctcacatgggaaatcagaacactgctacgacagtctgagtgttgtctgtcacaaaggattccagaacactgctacgaatttctgaatgtttttcgctgacatgtgatttcagaacactgctgttgtgttctcagtgtttgtccatcacataaggttccagaacactgctgctgggtcctgtgtgtttgtccctcacatagaattccagaacactgctacggggttctaaatatttttccctcacataggattccagaagactgctgctgggttctgtttgtttctcccacaaaaaggattccagaacacctatgctggtttctgagcgtctctcacgtaggattccagaacacttccacgagtgtctgaatgtttgtcactcagataggtttccagaacacagtggctgggtttgagtgtttgtccctcacataggattccataatgctgctgctgggttctgattgcttgttcctcacatacgattccagaacactgcttctgagttctgagtctttgtttcacatataattccagaacactgctgttgggttctgagtgttagtccctcaccaaggattccagaacactgctgctggtttctgagtgtttgtacctcacttagctttcaagaacactaatactgagttctgagtgtttgtcccttacgtaggattccagaacactcctacgagggtctgaatgtatgtccatcacaaaggattccagaacactgctgttgggttctgagtgtttctcccctacataggaatccagaacactgctactgggttgtgagtgtttgtgcctcacataagattccagaacactgctacgagggtctgaatgtttgtctctcacaaaggattccataacactgctgctgggttctgagagtttgtacctcacataggattccagaacagggctgctaggatctcagtgtttgtctctcacatgggattccagaacacgactgctgggatcagagtgtttcgccctcacataggattccagaacactgctgctgagatcacagtgtttttccctcacataggattccagaacactgccacgaggttctgaatgactggcccgcacagacaattccagaacccagttcctgggttctgagtgttgtcactcacatagtattccagaacactgcaactgggttctgactgtttgtccctcatattagattccagaacaatgctacgagggtctgaatgtttttccttcacataggattccagaacacttttacgagggtgtgaatgtttttccctcccaaaggattccagaagactgctgctgggttctgagtgtttgtccctcatataggattccagagcactgctacgagggtctgaatttctttccctcacataggtttccagaacactgctataaggatgtgaaagtttttccctcaaaaggatagcagcacactgctcctgcgttctgtttgtttgtcactcagaaaggattctagaacactgctgcagatttcttagtgtttgtccgtcacacaggattccagaaaacttctacgaagttcggaatgtttttccttcagataggattccagtacacagtggaatccagtacacagccactgtttctgagtgtttgtacctcacataggattccagaacactgctgctgggttctgaatctttgtcccacacaaaggattctagaccactgttgctgtgttctgagtgtttgtcccacacataggattctgaaaaactgctacgagggtctgaatgtttgtccatcacaaaggattccagaaaactgctgcagggattgtggtgtttgtccctcacgtaggattccagaacactgctttgaggttcagaatgtttgtcacacaaaaaggattcttgaacagtgctgctggtttctgagtctttgtcgctcaaacaggattacagaacattgcagctgggttctgagtgtttgtccctcatatgggattgcagaacactgctgctgtgttctgagtgtttgtcccttacgtacgattcctgaacattgctatgaggttccgaatgtttgttcctcacaaaggattccagaacactgctgctgggttctgagtgtttgtacctcacgtagaattccagaacactgctacgaagttgtgaaagtttgtccctcacagaggattccagaacactgctgctgggctcagagtgtttgtccctcacataggactccaaaccactgctgctgggttcggagcatttgtccctcacataggattccagcacactgctatgacggtctgaatgtttatccctcaataaaggttccagaacactgctactgggttctgagtgtttgtccctcatattggattccagaacaatgctacgagggtatgaaggtttctccctcacatgggattcaagaacactattaggagagtgtggtttcccgagcgctgctggtgggttctgtgtgtttgtccctcatataggatcccagaacactgctatgagggtatgaatgtttttctatcacataggattccagaacactgctatgagggtctgaatattttttcctcacaaaggattgtagaacactgctgctgggttctgagtgtttgtccctcacataggataccagaacactgctgctgggttctgaatgtttgtccctcacttaggaatccagaacactgctgctgggttctcagtgtttgtccctcacatagaattccagaacactgctacaaacttctgaaagtttgtcgctcacgtagtattccagaatattgtgctgggttctaagtgtttgtcccacacataggattccagaacacagctgctgggttccgagtgtttgtccctcagataggattccaaaatactattacgagggtctgaatgtttttccctcacgaaagattcaagaacactgcttctgggttctgattgtttgcccctcacaaaggattccagagcactgctgctggcttctgagggtttttccctcacataggattccagaactcttctacgagtgtttgaatatttctccctcagataggattccagaacacaatgactgggttctaagtgattttccctcacataggttaccagaacacagctgctgggttctgagtgtttgtccctcacataggattacacaacactgctgctggattcggaatggttgtccctcccataggattcccgaacactactgctgggttctgagtgtttgttcctcacataggattctggaacactgctacgagggtctgaatgtttgtccaacaaaaaggattgcagaacattgcttctgggttctgagggtttgtctctcacataggattccagaagactgcgtgggtctgaaagtttgtctctcataaaggactctagaacactgctgccgggttctcagtgtttgtcactcaaataagattccagaacactgctgctgggttctgagtgtttgtctctcacatggtattccagaacattgctgcttggttctgagtttttgtccctcacgtgtgattccaaaagactgccactgggttcagagtgtttgtccctcacatactattccagaacactgctactaggttctgaatgtttgtccctcacaaattatttctgaccactgctgatgggttctgagtgtttgtccccaacataggattccagaactctgctgctgggttctgtttgtttgtccctcacaaaggaatccagagcactgatgctggtttctgagtgtttttcccgcacataggatgccagaacactgctacgatggtctgagtgtttctccgtcacaaaggattgcagaatactgcagctgggttctcagtgtttgtccctcacatagacccaaaacactgcttggagggtctgaatgttagtcccacacaaaggattctagaacactgctgctgggttctgagtgtttttccttcacaggggaatcaaaaacactgcagttgggttcaaagtgttcggccctcacatatgattccagaacacagctacaaggttctgaatgattgtccctcaaaaagtattccagaacactgcttttgggttctgagtgtttgtcgctcacgtgggattcaaaaacactgctgctgggttcagagtgtttgtcgcttacataggatgccagaacacggctcttgatttctcagtgtttgtccctcacaaaggattccagaacacttctgctggtttctgagtgtttttccctcacataggattccagaactcttccccgaggttcccaatatttgaccctcagataggattccagaacacagtggctgggttttgagtgattgtcccacacttcgggaatcagaacactgctgttgggttctgagtgtttctccttcacacaggattccagaacactgctgctgagttctgagtgtttgtccctcagataggattccaaaacactgccgctcgatactgagggattgtccctcacatagatttctagaacactgcagcttgtttttgagggtttctctctcacttaggattccagaacactgctaagtgtgtctgaatgtttgtccctcacaaagaactccatatcactgctacgagtgtctgaacgcttgtccttcacaccagattccagaacactgctactgggttctgagtgtttgtccttcacataggattccagaacactcctctgagggtgtgagtgtttgtccctcacataggattccagaacactgcttctggattttgagtgtttgtccctcacatacgattccagaatacttctgcagggttctgagtgtttgttcctcacttaggataccagaactctgctgttgggttctgagtgtctgtccctcacatatcatttcacagcatggctgctgggttctgagagtttgtccctcaaatagaattccagaacactgctgctgagttttgagtgtttgtacctcacatacgattccagaacactgctacgagtctctgaatgattgtccatcacaaagaattccagagcgctgctgctagtttgttagtgtttgtccatcacataggattccagaacacttctgcaagagtctgaatgttgtcactcagatagattccagtacacagaggctgtgttctgagtgtttgtccctcacgtaggattccagaacactgctgctggtttctgagtgtttgtcccacacataggattccagaacactgttgctgggttctgagtgtgtgtccctcacataggaatccagaaaaatgcttcgagagtttgaatgtttgtccctcacaatggattatagaacactgctcctgggttctgagagtttgtcactcacataggattccagaacactgatgctgtgttctgagtgtttgctcctcacataggattccagaacactgcttccagggtctggatgtttgtccctcacaaaggattctagaacactgctgctgggttgtgagtgtctgtccctcacttaagattccagaacactgctgctggattctgagtgtttgtccctcacataggattccagaacactgctcctgggttctaagtgctcgtcccccacaaaggaatccagagcactgctgctgggttctgagtgtttgtcccttacataggataacagaacactgctaagatcgtctaaaggtttgtctgtctgaaaagattccagaaaactgctgctgggttctgagcgtttgttccccacataggattccagaacactgattcgatggtctgaatgtttttccctcacaaaggattctagaacactgctacagggttagtagtgtttgtccctcatataggattgcagaacactgctcctgggttcttagtgtttgtccctcacattagattccagaacactactactgggttctgagtgtttgtccctcacagaggattccagaacactgctcctgggttctgtaggtttgtccatcacatagcgttccagaacactgctaagagtgtctggatgtttgtccatcacaaaggattcgagaacgctgctactggattctgagtgtgtgttcctcacataggattccataacaatgcttcgagggtttgaaagcttgtccctcacaaaggattccggaacactgctgctgggttttgagtgtttgtcactcacttcggattccagaaccctgctgctgggttcagagggtttgtccctcacataacattccagaacactgcttcgagggtctgaatgtttgttcctcacaaaggaatctagaacaatgctgctgggttgtgagtgtctgtccctcaattaggatttcagaacactgctgttgggttctgagcgtttgtccctcacatgggattccagaacgctgctcctgggttctcagtgtttatcccttatgtaggattccagaaccctccttctcggtttgtttgtcccccaaaaaggaatccagagcactgctgctggtttccgagtgtttgtccctcacatgagataccagaacactgctatgatcatctgaatgtttgtcccccacaaaggattctagaacaccgctgctgtgttctgagagtttgtcactcacataggattccagaaaaatgctgccgagttctgagtgtttgtccctttcatgggattcgaaaacattgctgctgggttcagagtgttgtccctcacataggattgcagagcacttctacgaggttttgaatgtttgtccctcacaaaggattccaaaacattgctgctggtttgtgagtgtttgtctctcacatgggattacagaacacttctgctgggttctgtgtgtttgtcccgcatatattaaaccagaacactgctggtgggttttgtgtgtttctccctcacatagcattcctcaacatgctgctgggttctgagtgtcagtcccacacatacgattccagaacactgctgctaggttctgaagatttctccctcacataggattccagtaaaaagctgcttgtttgtgagtgtttgtccctcacataggattccataacagttctgctgggttccgagtgtttgtctcatataggataacagaactctgctgcttggttttgagtgtttgtccctcacatagcattccagaacactgcggctgggttctgagtgttagtccctcacatatgattccagaacactactgctaggttctgagggtttctccctcacataggattccagaactctgctacaagtttctgaatgtttgtccctcacagagcattccagaacagtgctatgatggtctgaattattgacccatatataggattccagaacactgctgcaggtttctgagtgtttcttcctcacataggattgcagagcattgatggtgggttctgagtgtttgcacctcacacaggatttcataacattgcttcagggttctgagtgtttgtcagtcacataggattccagaacactgctgctgaattctgagtgtttgcccctcacttaggtttccagaacactgccacgagggcctgaatgtttgtccatcacaaaggattccagaacaattctgctgggttctaagtgtttgtccctcacataggattctaggacactgcttcgagtgtctgaatgtttgtcttcacaaagaattctagaactctgctgctgggttctcagtgtttgtccctcacataggattccaggacacttctacacatgtctgaatgtttgtccctcagataggattccagcacacagtgactgagttgtgagtgtttctccctcacataggattccagcacacagtgactgggttctgaatgtttctccctcacataggattccagaatactgctgctgccttctgagtgtttgaccctcacataggattccagagccctgctgctgggttctgagtgtttgtccctcacataggattctagagcactgctactgggttctgagagtttgtccctcacataggatagcggaacagtgctacaatggtctgaatgtttgtccttgagataggattccagcacacagtgactgggttctgaatgtttctccctcacataggattccagcacacagtgactgggttctgagtgtttctccctcacataggattccagaacactgctgctgccttctgagtgtttgaccctcacataggattccagaaccctgctgctgggttctgagtgtttgtccctcacataggattctagagcactgctactgggttctgagagtttgtccctcacataggatagtggaacagtgctacaatggtctgaatgtttctccaaaacaaaggaatcaaaaacactgctgctgggttctgagtgtttgttcatcacataggattccagaacactgattctagggtctgaaggttttttgcccacaaaggattctagaacactgctgctgggttctgagtgtttttcactcacataggattccagaacactgctgctgagttctgagtgtttctgcctcacatgggattccaaaacaatgctgctgggttcagtgtgtttgtccctcacctaagattccagaacactgaagagagtttctgaatgtttgtccctcacaaaggactctagaacactgctgctgggttctagtgtttgtccctcacaaagattccagaacactgctgctgggttctgagtatttgtcactcacataggattgcagaacactgctgctgagctctgagattttgtccctcacgtaggtttccagaacacggctgctgggttctgagttgttgtccctcacatacgattccagagcagtgctgctgggttgtgagtgtttgctctcacatagaatatcagaacactgctacgaagttctcaatgttcgtcgctcacataggattgcagaacactgctgctgggttgtgagggtttgtctctcacatacgattccagaccactgctatgagggtctgaatgtttttacctcacataggattccagaacactgttactaggacctgaatgtttttccctcacaattattccagaacactgctgatgggttctgtttttttgtccctcacaaaggattccaaagccctgctgctgttttcttagtgtttgtccctcacatagtattccagaacacttctacgagtgtctgaatatgtgtccctaatataagattccagtacacagtgtctgggttcccaggggttattcctcagacaggattccagaacactgctgttgggttctgagtctttttccctcacatggcattccagaatacagctgctggcttctgagtgtttgtccctcatattggattccagaacaatgctattgagggactgaatgtttctccctcacataggattccagaacacagctacgaaggtctgaatgtttttccatcacgcaggattccagaacactgctttgagggtctgagtgtttttacctcacaaaagattcagaacactgctggtgggttctgagtgtttgtcactcatataggattccagaacactgctatgcgggtctgaatgtttttccctcacataggatcccagaacactgctaggggggtctgagtgtttttctctcccaaaggattccagagcactgctgctggttatttagagtttgtccttcacataggattccagaacacttctactagggtctgaaggtttgacactcaaataggattctggtacacagtggctgcgttgtgagtgtttgtccctcacataggtttcaagaacagtgctgctggattccaagtatttgcccctcacataggatcccagaacatttctgctgggttctgagtgtttgtctctcacctaggattcctgaaaactgctacgagggtctgaatatttgtccgtcacaaagaattgcagaacattgctactgggataggagtgtttgtccctcacataggattccagaacacagcttctaggttctgaatgttagcccctaacaaaggattccagtactacgctgctggtttctgggtgtttctcacacacataggattccagaacactgctgctggattctcagtgtttgtctctcacatgggattccagaacactgctgctggtttcagagtgtttgtccctcacatacgattccataacactgatatgaggttctgaatgtttctccctcactaaggattccagaacactgctgcaggttctgagtttttctccctcatataggattccagaacactgctgctgggttcagagtgtttttccatcacataagattccagaacactgctactaggttctgagtgtttggccctcacaagggattccagaacactgctgctgggtcatgagagtttgtccctcacatagaactccagaactctgctcctgtgtactgtttgtttgtccctcacaaaggattacagagcaccgctgctggtttctgattgcttatcactcacataagattccagaacacttctacgagtgtttgaatgtttgtccctcagacaggattccagcacacagtggctgggttctgagtgttgttccctcacataggatttcagaacactgtttcgagggtctgaagatttgtccctcacaaaggaatctagaacagtgctgctgggttctgagtgtttgtcactcacatagaattccagaacactgctgctgggttctgagtgtttgtgcctcacaagggattccaaaacacttctgctgggttcagagtgtttgtccttcacttacgcttccagaacactgctgagagtttctgaatgtttgtcccatacaaaggactctagaacactgcccctgggttctaagagtttgtctctcacataggattccagaacacggctgctgggttctgagagtttgtccctcacatacgattccagaacactgctgctgggttctgagtgtttgtccctcacataggattccagaaaactgcagggggatctgaatgtttgtccatcaaaaaggattcaggaacaatgctgctggatctgagtgtttgtccctcacataggataccagaacactgccacaactgtctgaatgtttgtctgacacaaaggattccagaacactgctgccgcgttctgagtgtttgtctctcaaaaacgattccacaacactgctatgagcttctgaatgctttttcctcacagaggattctagaacacttctgctgggttcggagtgcttgtccctcagaagggattccagaacactgctgctggattctgagtgtttgtccctcacataggattccagaacactgctgctggattctgagtgtttgtccctcacataggattccagaacactgcttctgggttcagactgtttgtcactcacataggattctagaacactgctgctggtttctgagggtttgtccctcacacaggattccaaaacactactgctgggtctcagtctctgtccctcatattggattacagaaaaatgctatgagagtctgaatgtttttccctcacataggattccagaacactgttacgaggctgtaaatgtttttccttcccaaaggattccagaacactgctgttgggttctgagtgtttgtccctcacataggattccagcacactgcttcgaggggctgaatatttatccctcacaaagggttccgaaacactgttattgcgttctgactgtttgtccctcatattggattccagaacaatgctaagagggtttgaatgtttttccctcacataggattccagaacacttctgctgggttcagagttcttgtccctcagaaaggattccagaacactgctgctggattctgagtgtttgtccctcacataggattccagaacactgctgctggattctgagtgtttgtccctcacataggattccagaacactgctgctggattctgagtgtttgtccctcacataggattccagaacactgcttctgggttcagactgtttgtcactcacataggattctagaacactgctgctggtttctgagggtttgtccctcacacaggattccaaaacactactgctgggtctcagtctctgtccctcatattggattacataaaaatgctatgagagtctgaatgtttttccctcacataggattccagaacactgttacgaggctgtaaatgtttttccctcccaaaggattccagaacactgctgttgggttctgagtgtttgtccctcacataggattccagcacactgcttcgaggggctgaatatttatccctcacaaagggttccgaaacactgttattgcgttctgactgtttgtccctcatattggattccagaacaatgctaagagggtttgaatgtttttccctcacataggattccagaacacttctgctgggttcagagttcttgtccctcagaaaggattccagaacactgctgctggattccaagtgtttgcccctcacataggattccagcacactgcttcgagggtctgaacgtttatccctcacaaagggttccaaaactctgttattgctttctgactgtttgtccctcatattggattccagaataatgctatgagggtttgaatgtttttctctcacataggattccagaacactgttatgagggtgtcaatatttttccctcccaaagaattccagaacactgctgctgggttctgagtgtttgtccctcatataggattccaggactctgctacgagggtctaaatgtttttccctcacataggattccagaacactgctacgaaggtctgaatatttttccctcacaagggattttagaacactgctactgggttctgtttatttgtccctcacaaaggattccagactactgctgcaggtttcttagtgtttctccctcacataggattccagaacacttctacgaagttctgaatgtttgtcctcagataggattccagtacacagtggctggattctgagtgtttctccctcacataggattccagaacactgctacaaggttatgaatgtttgtccctcacaaaggattctacaacactgctactgggttctgagtgtttgtccctcccataggattccaggacactgctgctgagttctaagcgtttgtctcttacctaggattccagaacattgctgctgggttctgagtgtttgtccctcacatagaattccagaacaatgccacgaagatctaaaaggttttcgctcacataggaatccagaagacttctgctggtttctgagtgtttgtctctctcatgggattccagaacactactgctgggttctgagtgtttgccctcacataggattccagaacactgctacaagggtctgaatgtttgccctcagatatgattccagtacacagtggctgaattctgagtgtttctcattcacgtagaattccagaacagtgcaacaaggttctcaatgtttgtccctcacaaaggattctagaacactgctgctgggttctgagtgtttgtccctcacaaaggattctagaacactgcttctgggttctgagtgtttgtccctcagataggattccagaacactgctgctgtgttctgagtgtttgtccctcacttaggattccaggacagtgttgctgcgttctgagtgtttgttcctcacatagaattccagaacactgctacgaagttctgaaagtttgtcactcacatagctttccaaaacactgctcctgggttctgagtgtttgtccctcacatacgatttcagaacgctgttacgaggctctgaatgtttatccctcacaaagggttccagaacactgctactgggctctgattgtttgtccctcatattggattccagaacaatgctacgagattctaaatgtatttccctcacataggattccagaacactgttaggaagatgtgaaaggttttcccttccaaagtattccagaacactgatgctgggttctgagtgtttgtccctcatataggatttcagaacactgctacgatggtctgaatgtttttccctcacataggattccagaacacttctacgaggttctaaatatttgccctcagatagaattccagtatgcagttactggattctgagtgtttttcactcacatatgattcctgaacactgttgctgttttctgagtgtccgtccctctcttaggattccagaacactgctgctgggtcaggagtgtttgtccctcacataagattcaagaacacagctgctgggttgtgtgtgtttgtccctcacatatgtttccagaacacggctacgagggtctgaatgtttatccctcacaaaggtttccagaacactgctactgggatctgagagtttctgcctcatgttggattccagaaaaatgctacgacggtctgaatgttttttgctcacacaggattccagaacactgttacgagggtgtgaatgtttttcactcccaaaggattccagaacactgctgctggcttctgagagtttgtgcctcatataagattccagaaaactgttacaaggatcggaatgtttttccctcagaaaggattgtagaacactctttctgggttctgtttgtttcttcctcacaaaaaaactacagaacactgctgcagatttcttagtgtttgtccctcacataggattgcagaacacttctagaggttctgaatgtttcccctcaggcaggagtcctgtacacagtgtctggattctgagtgcttctccctcacttaggattccagaacactgctgctgggttctgagtgtttgtccctcacataggattctagaacactgctacgagggtctgaatgttttttcctcacaaagggttccagaacattgctgctgggttctgagtgttagtccctcatatgggattccagagcaatgctacgagggtctgaatgtttttccctcacacagaattccagaatactgttatgacggtgtgaatgttattccctcccaaaggattccagaacactgctgctgggtactgagtgtttgtccctcagataggattccagaacactgctacgagggtctgaatgttttttcctcaccaaggattgtagaacactgctactgggttctgtgtgtttgtccctcagataggattccagaacactgctacgagggtctgaatgttttttcctcaccaaggattgtagaacactgctactgggttctgtgggtttgtccctcagaggattccagagcactgttagagatttctaagtgtttgtccctcacatatgattccagaacacttctacaaggttctgaatgtttgccctcagatagaattccagtacacagtggctgtattctgactgtttgtcccataaataggattctagaacactgctacaagattctgaatgtttgtccctcacaaagattctagaacactgctgctgggttctgagtgtttgtccatcacatgggattccagaactctgctgctgggttctgagcgtttgtccctcacttacgattccagaacactactacgaagttctgaaagtttgttgctcacataggattctggaacactgctactgcgttctgagtgtttgtccctcacatagcattccagaacagtgctgctgggttctgagtgtttgtccctcacgtaggattccagaacactactacgagggtcagaatgtttatccatcacaaagggttccagaacactgctactgggttctgagtgtttattccttatactggatttcagcacaacgctacgatagtctgaatatttttctctcacgtaggattccaaaacactgttacgatggtgtgaatgtttttccctcccaaaggatttcagaatactgctgctgggttctgagtgtttgtccctcatataggattctaggacactgctacgagggtctgaatgtttttccctcacataggattccagaacactgctactagggtctgaatgtttttccctcacaaaagactgtagagcactgctactgggttctgtttgtttttccctaacaaaggattccagagcactgcagcagatttcttagtgtttggccctcacatagcattgcagaacaattctacgagcttctgaatgtttgatctcacacaggattccagtacacagtggctggattttgagtgtttgtccctcacataggattacagaacactgctatgaggttctgagtgtttgtccctcacaaaagattctagaacgctgttgcaggcttctgagtgtttgtcactcacgtaggattccaaaacactgctacgaggttctgaatatttttccctcacaaaggattccagaacactgcagctgggttctgagtgtttgtccctgacatggaattcgtgaacactgctacgaatttctgaatcttggtcgctcacacaggattccaaaacagtgctgcagggtcctgagtgttcgtccctcacataggatcccagaacactgttacgagggtcttaatgtttttctctcagaaagcattccggaacactgccgctaggttctgtttgtttatccctcacaaaggactccagagcactggtgctagtttctcagtgtttgtccctcacgaaggattgcagaacaattctccgagtgtctgaatgtttgtcccgcatataggattccagaatacagaggctgggttttgagtctttgtccctcatatacgattccagagcattgctgcgaagttcttaatgtttgtcgctcacataggattccagaacactgctgtagtgttctatgtgtttgtccctcacataggattcgagaacacttctgtaggattctgagtgtttgtccctctcataggattaaagaacattgccaccaggttctgaatgtttttccctcatgaaggattccacagcactgctgctgtgttctgagtgtttgtcccttacataggtttccagaacactgctgttgggttctgagagtttgtccctcacataggattccagaacacagctacgagggtccgaatgtttttccctcaaaaatgattcctaaacactgctactggttttgtttgtttttcctcacaaaggattccagagcacagctgctgggttctacatgtttttccctcacataggattccagaacacttctatgagtgtctgaatgtttgtctctaagataggattccagatcacagtggttgggttctgactgtttgtccctcacctaggattctaggacactgctgctgagttctgagtgtttgtccctcacaaaggattacagaacactgctgctgagttctgagtctttgtccctcacataggattgcagaacactgctacgaagttctgaatctttgtcacttgcacaggattccaaatcactgctgcagggttctgagtgttttcaccacacataggattccagaacactgctgctgggttcctagtgtttgttcctcacagaggattccagaacactgcttcgggtgtctgaatgtttgtccctcacaaagtattctagaacactgctgctgggttctgagtgtttgtcactcacataagactccagaacacggctgctgggtgctgagtgtttgttcctcacaaggaattccagaacactgttgcagggttaagagagtttttcccacacataggtttccagaacactgctaagagcttctgaatgtttgtccttcacaaaggattccagaacactgctgctgggttctgagggtttgtccctcacataggattccaaaacactgctagtgggatctgtttgttagttcctcacaaaggattacaaagcactgctgctggattctgagtgtgtgtccctcacataggattccagaacacgactgctatgttctgggtgtttgttcctcacataggataccagaacactgctactgggttcacagtgtttgtccctcacataggattccaaaacactgttacaagattctgaatgtttgtccctcacaatcgattccacaacactactcctgggttctgagagtttgtacctcacataggattcaagaacactgctacagggttctgtgtgtttgccctgcacaaaggattacagagcactgctgctggtttctgagtgttggtccttcacataggttccagaacactgcttcgagtgtctgaaggtttgtccctcacaaaagattctagaacactgctgctgggttctgagtgtttgcccctcacatgggattccggaacactgctttgagtgtctgaatgtttttccctcacaaatgtttccagaacacggctgctggattctgtttgtccctcacaaaggattccatagcgccgctgatggtttctgagtgtttgtccctcacataggattccagaacacttctgcgattgtctgaatgtttgtccctccgaaaggattccagagcacagtggctggattcttagtgtttgcccctcacgtaggattccagaacactgctgcttggttctgagtgtttaaccctcccataggattccagagcactgctgctggtttctgtttgtttgttcctcccaaaggattacagagcactgctgttgggttctcagtgtttgtccctcacatacgattccagaacacagctgtttgattctgtgtgttagtgcctcacatagaattccagaacacggctgctgggttctgagtgtttgtccctcacataggattccagaacactgccgctgggttctgaatgtttgtccctcacatagggttccagaacactgataccagtttctgagtgtttgtccctcacacaggatcccaggacactgctacgagtgtctaaatctttttccatcacaaatgattccagaacactgctgctgggatctgagtgtgtgtacctcacataggattccagtacactgctacgaatgtctgaatgtttttccctcaaatatgattccagaacactgctgctacatttgtttgtttttcctcaggaaggattccagagcacagctgctggtttctgcatgtttttcccccacagaggattccagaacacttctatgaatgtctgaatgtttgtccctcagagaggtttccagaacacagtggctaggttctgattatttgtccttcacataggattccagaacgctgctgctgggttctgagtttttgtccctcacataggattccagaacagtgctgctgggttctcagtgtgtgcctcttacatggaattccagaacaatgctatgaattcctgagtccttgtcgctcacacaggattccaaagcactgctgctgggttctgagtgtttttaccgcacataggattccaggacactgctgctgggttctgagtgtttgtccctcacataggattccagaacactgctacaagtgtctgaatgtttttgcctcagaaaggattccagaacactactgttgggatctctctgtttgtccctcacaaaggattccacagtactgctgttggtttctgagtgtttgtccctcacataggattccagaataattctaagagtgtctaaatgtttatctctcagattggaatccagaaaacaatggtttggttctcagggtttgtcccttacataggattccagaacacagctacgaagttctgaatgtgtctcgtacacataggattccagaacactgctgctggattcggagtgtttgtccctcacataccattccagaacacagctgctggtttctgagtgtctatcccttacatagaattccagaacactgttcctgtgttctgagtgtttgtccctcacataggattccaaaacactgctactgggttctgagtgtttgtccctctcataggattccagaacactgctaatgggttctgagtgtttgtccctcacataggattccaaaacactgttactggtttctgagtgtttgtccctctcataggattccagaacactgctaatgggttctgagtgtttgtccctcacataggatcccagaacactgctacgagggtctaaatctttttccttcacaaaggattccagaacactgctgctggtaactgagtgtgtgtccctcacataggattccagaacactgtttcgagtgtctgaatatccctcacaaagtattgtagaacactgctgctgggctcttagtgtttgtcactcacttaggattccagaacactgctgctgggttctgagggtttgtctctcacatgatattcgtgaacactgctgcgaagttctgaatatttgttgttctcacaggattccaaaacactactgctgggttctgagtgtttgtccctcacataggattccagaacaattttatgagggacttaaagtttttttctcagaaaggattccagaacactgctgctgttttctgtttgtttgtccctcactgaggactccagagctctgctgctggtttctgagtgtttctccctcacatagaatttcagaacactcctacgagtttctaaatgtttgtccctcagataggattccagaacacagtagctgggttttgagtgtttgtccctcacataagattccagaacactgctacgaagttctgaatgtttgtcactcacataggattccagaacactgcttctgtgttccgttttttgtccctcacacaggattccaaaacactcctgcagggtttggaatgtttgtccctcacattagactccagaacactgctgctgtgttctgtgtgtctgtacctcaggtacaattcaagaacactactgctgggttatgagtgtttgtctctcaagtaggattccagaacactgctgctggtttctgagagtttgtacctcacataggattccagaacactgcaactgggttctgagtgtttgtccctctcatgggatcccagaaaactgttatgagggtctaaatgtttgttcatcacaaaggattccagaacactgctgctgggttctgattctttgtccctcacataggattacagagcactgcttcgagtgtgtgagtgtttgttcctcacaaaggattctagaacactgctgctgggttctgagtgtcactcacttaggattccagaacactgctgctgggttctgagtgtttgtccctcacatctgattcgtgaacacttccacgaaattctgaatacttgtccctcacacaggattccaaaactctactgctggattctgagtgtttctccctcatataggattccagaacattctttcgagagtcttaatgttttctctctgaaaggattccagaacactgcgctgggttctttatgtttgtccctcacaaagaactccagagcactgctactggtttctgagtgtttgccctcacataggattccacaaaatttctatgagtgtctgaatgtttgtccctcagatagtattccagaacacagtggctggggtttgagtgtttgtccctcaaataggattccagaacacagctgctgggtgttgagaggttttccgtcacataggattccagaacactgttacgagggtctgaatgtttttccctcacaaaggattccagagcactgttactggttactgcctatttttccttcacgtaggattacagaacacttctgcgagtgtctgaatgtttgtctctcagataggattcgagaaaacagtggctgggttctgagtgtttgtccctcacatactattccagaatactgccactgggttctcagggtttttccctcacatgggattccagaacactgctatgaaattctgaatctttttcactcacacaggatcccaaaacactgctgctgggctctgacagtttgtccttgacataggattccagaacaccgctgctggtttctgagtgtttgtccctaacatgggattccagaacactgctgctgggttcagtgtatttgtccctcaaatgggattccacaacactgctacaaggtcctgaatgtttgtccctcagaaacgaatccagaacactactgctggtttctgagtgtttgtccctggcataggattccagaacactgctgctgcgttctgtttgtttgtcccttacaaaggattacagagcacttctgctggtttctgagtggttgtccctcacataggattccagaaccctgcttcgattgtctgaatgtttatccctcacaaaaaattctagaacactgctgctgggttctgagtgtttgtctctcacattggattccagaacactgctgctgggttgtgagtatttgtccatcacataggattccagagcactgttgcgagggtctgaatgtttttctctcacaaaggattccagaacactgctgctgtttctgtttgtccctcaaaaaggattctacaacacttctacgagtctctgaatgtttgtcactcagataggattccagaaaactgtgcagacttctgagtgtttgtccctcacataggattccagaacactgctgctgggttctgagtgtttgtcctgcacccagaattcgagatccctgctgttgggttctgagtgttcgtgctcacataggattccaggacactgctcctgggttcggagtgtttgtctctcgcatacgatcccataacactgctgctgggttctgagtatttgtccctcccacaggattgcagaacactgctgctgggttctgagcgtttgtcccccacatgcgtttcgtgaacactgctacgaagttcggattctttgtcgctcactcaggattccaaaacactgctgctgggttctgagtgtttgtccctcacatgggattacagatcacagctgctgtattctgagtgtttgttcctcacataagataccagaacattgttgctgggttgtatgtgtttgtccctcacattggattccagaacactgctgctaggttgtccctcacgtaggattccagaatactgctacaagggtatgaaagtttgtctctcacaaaggattccagaacactgctcctggtttctgggtgtttgtccctcacatataattcccaaacactgctgtaagggtctgaatatttgtcccttatagggattccagaacactgtttttgagttctgagtgtttgcccctcacaaaggattccagaacactgctacgagggtccaaatgtttgtccctcacaaaggattccgtatcactgctatgagtgtctgaattcttgtccctcacataggattccagaacactgctactgggttctgagtgtttgcccttcacataggattccagaacactgctccgagggtctgaatgtttgtccctcccataggaatccagaacactgctgctggtttgtgagtgtatatccctcatataggattccagaacatttctgctgggttctgagtgtttgtccctcatataggataccagaacactgctactgggttctgattgtttctccctcacatagcattcctgaacacggctgctgggttctgagtgtttgtccctcacaaaagaatgtagaactctgctgctgggttctgagtgtttgtctctcatctaggattccagaacactgctgctgggttctgagtgtttgtccctcacttaggatcccaggacactgctacgagggtgtgaaagtttttccatcgcaaaggattccagaatactgctcctgggttcagagtgtttgtccctcacataggattatagaacactactaagagggtctgaatgtttttccctcacataggattccagaacactgctgctcggttctcagtgtgtgtccctcacataggattccagcatactactgctgtgttctcagtgtttgtccctcacagaggattccagaacactgctgctgatttctgagtgtttgcccttcacataggattccagaacactgtcgcgagggtctgaatgtttgtccatcacaaaggattccagaacactgctgctgggttctgagtgtttatccctcacagaggattccagaacactgctgctgtgttctgagtgtttgtctctcatctaggattccagaacactgctgctgggttctgagtgtttgtccctcacttaggatcccaggacactgctacgagggtgtgaaagtttttccatcgcaaaggattccagaatactgctcctgggttcagagtgtttgtccctcacagaggattccagaactctgcatccagggtctgaattttgtccgtcgcaaaggactctagaacactgctcctttgtactgagtgtttgtcactcacataggattcctgaacaccactgctgggttctgagtgtttgtcactcacatgggattccagtacactgctgctgggttcagagtgtttcaccctctcataggattccataacactgctatgaggttccgaatgtttgtccctcagaaaggactccagaacactcctgctgggttctgagtgtttgtccctcacataggattccagaacacttatatgagtgtctgaatgtttttccctcatataggattccagaacacagtggcggggttctgagtgtttgtcccttacgtaggattccagaacactgctggtgggttctgagggtttgatcctcatctaggattccagaacacagctgttgcattctgagtgtttatccctcagataagtttccagaaccctgatgctgggttctgagtgtttgtccctcacataggattctagaacactgctgctgggttctgagtgtttgtccttcacataggattccaaaacactgccacggggttctgtttgtttgcccatcacaaggattccagaacaggattgctggtttctgattgtttgtccttcacgtagaattccggaaaactgctacgagtgtctgaaagtttgtcaatcacaaagggttccagaacacagtggctgggttcttagtgtttgtccctcacataggattccagaaattaatgctggtttctgagtgtttctccaacacataggattccagaaccctgctgctggtttctgagtgtttgtccctcacatgggatcccagaacactgcttctgggttctgattgtttctccttcgcatatgattccagaacactactaagagattctgaatgtttgtccctcacaaaggattacaaaacactgctgctgggtacttagtgtttgtccctcatacagtaatccagaggactgctactgtgttctgagtgtttgtccctcacataggacaccagaactcttctatgagtgtctgattatttatcactcaggtgggattccagaacacagtggctgggttctgagtgtctgtccctcacatccgattccagaacacttcttcgagggtctgaagttttgtccctcataaatgattccagaactctgctgcagggttctgagtgtttgtccctcacataggattccagaacactgctacaacggtctgaatgtttgtccatcacaaaggattgcccaacactactgctcggttctgagtggttgtccctcacataggattccagaacactgttttgagggtaagcatgtttgtccctcaaagaggattctagaacactgcttctgtgttctgagtgtttgtgactcacataggatgccagaacactgctaagtgggtctgtatgatttttcctcatattggattccagaacactgctactaagttctgaatgtttttccctcacaaaggattccagaacagtgttgctgggttctgtttgtccctcacaaaggattccagagcactgctgcaggtttcttagtgtttgtctcccacataggattccagaatacttctacgagggtctgaatgtttgtccctcatataggattccagtacatagtgtccgggttctgattgtttgtcgctcacataggattgcagacaactgctgctggattctgagtgtttgtccctcacataggactccagaacactgctgctcagttctgactgtttgtcactcacatgggattccagaacactgttgttgtgttctgagagtttgttctccacttaggattccagaacactgctacgaggttctgaatgtttgtccctgacaaaggattccagaacactgctgctgagttcagagtgtttgtccctcacaagaaattccagagcactgcttctaagttctgaatgtttgttgcttacataggatttcagaacactgctgctgggatctgagagtttgtccctcacttaggtgtccggaagactgctgctgtgttctgagtgttttccctcatgtaggattccagaacactgctacgagtgtctgaatggttttccctcacaaaggtttcctaaacactgttgctgtgttctgtttgtttgtccctcataaaggtttccagagcactacccactactacgagggtctgaatgtttgcccatcacaaaggattgcacaacactgctgctgggttctgagtgtttgtacctcacataggatttcagaacactcctgctggattctgagtgtttctgcctcacatacgatttcagaatactgctgctgggttccgagagtttgtcactcaaataggattccagaaaactgctgctgatttctgagtgtttttccctcacttatgattccagaacactgctatgaggttctgaatgcttgtctctcacaaaggattccagaacagtactgatggcttctgagtgtttgtccctcacttaggattccagaacaattctacggggttgtgaatgcttgtccctcataacggattccagaacactgctgctgagttctaagtgtttgtccctcacagaggattccacagcactgctgctggtttccaagtgattgtcccacgaataagattccagaatacttctacgagtgtctgaatgtttgtccctcagatattattccagaacacagtggctgggttctgagtgtttttcccccacataggattccagaatacagctacgaatatctgaatgtcactcacataggatttcagaacactgctgctgggttctgaacgtttctcactcacatagggttcaagaaaactgctatgaaggtcttaatgtttgtccatcagtaaggattccagaatactgcttcagggatctgagtgtttgtttcatacataggattccagaaccctgtttcgagtttctggatatttgtcccacacagaggattctagagcactgctgctggtttctgagggtttgtcactcacataggattccagaacactgctactgggttctgagtgtttctccctcacataggatttcagaacactgctgctgggttctgagtgtttgatcctcacatgggattccagaacaatgctaagaagttctgagtctatgtcgatcataccggattccaaaacactgctgctgggttctgagcgtttgtccctcacattgtattccagaagattgctgctgggttctgagtgtttgttcctcacataggattccagaacactgctacgaggttctgaatgtttgcccatcacaaaggattccagaacacttctgtggggttctgagtgtttgtccctcacaaaggattccagagaactgccgctggtttctgagtgtttgtccctcacaaaggattccagagaactgccgctggtttctgagtgtccctcacaaaggattccagagaactgctgctggtttctgagtgtttgtccctcagataggattacagaaagcttctgagagtgtctgaacgtttgtcaattaaataggattccagaacacagtggctaggaactcagtgtttgtccctcacgtaggattccagaacaatgctacgagcatctgaatgtttgtccattccaaaggattccagaacactgctactgggatctgagtgtttgtccctcacgtgggactccagaacactgcttcgaggttctgaaagtttgtccctcacaaggaattcaagaaaacagctgctgggttctgagtctttgcctctaacataggattccagaacactgctgctgggttctgagtgtttgcccctcacatgggattccagaacactgctgctgggttcagagtatttgtccctcacataagattccagaacactgctgagaggttctgaatgtttctacctcacaaaggattacagagcactgctgctggtttctgagtatttgtccctcacataggattccagaacacttctaagagtgtctgaaagtttgtccctcagacaggattccagaaccctgcttcttggttctgagggattgtacctcacttaggattccgaaacactgctgctgggatctgagtgtttgtcccttacatagaattccaaaaaactgctacgaagttctgaatgttttttgctcacataggattccagaaaaatgttgctgctttctgagtgtttgtccctcacgtaggattccagaacactgctgcgagtgtctgaatgtttatccctcactaaggattccagaacacttctactgggttctgagtgttagtccctcatattaggttcctcgacaatgctacaagtgtctgaatatttttccctcacataggattccaaaacaccgctgttgggttgtgtttgtttgtccttcacaaaggattccagagcactgcttcaggtttcttagtgtttgtccctcacataggattccagaacacttctacgaaagtctgaatgtttgtccctcagatagtattatagaacacagtggctgggtcctgagtgtttgtccctcataaagtattccagaacactgctgctgggttctgagtgtttgtccctcacataggattccagaacactgcttcgagcgtctgaacgtctgtgcctcacaaaggattctagaacactactgctggtttctgagtgtttgtcactcacataggattccagaacactactgctggtttctgagtgtttcttcctcacatgtgattccagaacactgctatgaacttctgaatctttgttgatcacataggattccaaaacattgctgttgggttctgagtgtttttccttctcataagattccagaacacttttactgggttctgagtgtttttccctcatactattccagaacaatgctacgagggtctcaaagattttccctcacaaaggattccagaatattgctgctgggttctgagtgtctgtcactcacataggattacagaacgctactgctgggttctgagtgtttttccctcacttaggattccagaacactgctgctggcttctgagtgttgtccctcacatatgattccagaacactcatgctgggttctgagtgtttatccctcatataggattccagaagactgctacggagttctgagcttttgtccctcacataggattccagaacacttctacgagtatctgaatgtttgtccctcagataggattccagaacacattggctgggttctcagtgtttgtccctcacatacgataccagaacactgctttcaggttctgaaggtttgtccctcacaaaggattctataacactgcttctgggttctgagtgtttttcactcacatgggattacagaacactgctgctgggttctgagtgtttgtccctcacatgggattccaaaacactgcttctgggttcagagggtttcttccacacatactataccagaacactgctatgaggttctgaatgtttgtccctcacaaaggattccagaacactgctgctgggttctgagtgtttgtccctctcataggattctagaacactactgctgcgttctgattgcttgtcactcacattaattacaaaacactgctgctgggttctgtatgtttgtccctctcaaaggattcctgtgcactgctgctggtttctgagtgtttgtccctcacataggattccagtacacctctaagagtctctgaactttgtcgatcacacaggatgccagaacactgctgctgggttctcagtgtttgtccatcacataggattccagaacactactactgggttctgtttgtttgtccgtcacaaagcattacagatcaccgctgctgggtcctgggtgtttctgcctaacataggattccagaacactgcttggagggtctgaatggttgtccctcagaaaagattccagaacacggctgctgggttttgagtgcttgtccctcacaaaggtttctagaacattgctgctgggttctgaatgtttgtccctcacaaaggaatctagaacactgctgctggtttctgagtatttctccctcacttacgattccagaacactgctgctgggttctgagggtttttccctcacataggattacagaacactgctgctgggttctgagtgtttgtccctcacatatgattccagaacacggctgcgagggtctgaatgtttgtccatcataaagtattccagaacactgctgctgggttctgagtgtttgtccctcacataggattccagaacactgcaacgacgctctgaatgtttgtccattccaaaggattccagaacagtgctgttgggttctgagtttttgtccctttcataggattccagaacaaagttttgaggttctcattgtttgtccctcacaaagatttctggagtactactgctggcttgtgtttgtcactctcataggattccagaaatctactgctgggttctgagtgtttgtccctcacgttggattccagaacacttctacaagtttctgaatgtatgtccctcggataggattccagaacacagtggctgggttctgcgtgcttgtcccccacgtaggattccagaatactgctgtgaatatctgaatgtttctctctcacataaggtttcagaacactgcagctgggttatgaacctttgtcaatcacataggattatagaaaactgctacgagagtctgaatgtttgtccatcccaaaggattccacaacactgctgctggtatctgagtgtttctccctcacataggattccacaatcttgcttccatgttccgaatatttgttcctcatagaggattctagaacactgctgccagttctgagggtttgtcactcacataagattccagaacactgttgaagggttttgagtgtttatccctcacgttggattccagaacactgctgctgggttcagagtgattgtccctcacatacaattccaaaacaatgctatgaggttctgaaagtttgtccttcacaaaggattccagaacactgcttctgggttctgagagtttctccctcacttaggattacagaacactactgttgggttctgagtgtttgtccgtcacataagattccagaacactgctgctgggttctgagtgtttgtcccgcacatgggattccagcacacagctacgaagttgtaaatctttattgatcacgcaggattccaaaacactgctgctggattctgagtgtcctcacataggaatccagagcactgctgctgggttctgagtgtttgtccctcacataggattccagaacactgctacgagggtctgaatgtttgcccatcacaaaggattccagaacactgcggctgggttctgagtgtttgtccctaacataggattccagagcactgctgttggtttctgagtgtttgtcccttacataggattccagaacccttatatgagtgtctcaatgtttgtccctcagataggattccagaacacagtggctgggttctgagtgtttgtccctcacataggattccagaacactgctatgagggtctgaatgtttgtccatcacattggattctggagcactgctgctgggttctgagtgtttgtctcccacctgggattccagaacactgcttcgaaggtctcactgtttgtccctcacaaaagattctagagcactgctgctggcttctgagtgttttactctcacataggattccagaaaactgctgctgggatctgcgtggttgtccctcacatgggattccagaacactgctgctgggttctgagtgtttgtcactcacatacgattccagaacactgctgacgggttttgagattttgtctctcatatgggattctagaacactgctgctgggttctgagggtttgtcacacataggattccagaacactgctaggaggttccgtatgtttgtccctcacataggattccaaaacactgctgctgggttccgtatgtttgtacctcacaaaggattcctgagcactgctgctggtttctgactgtttgtccctcagaaaggattcctgaacacagtggctgggttctgagtgtttgttctccacatgggattcccaaatactgctacgacgttctgaatgcttgtctctcacataggatttcagaacactgttgctgggttctgaaggtgtgtccctcacgtaggattctggaacactgctctgggtcctgagattttgacccacttataggattccagaacactgctatgagggtctcaatgttttttcctcacaaagtattccagaacactacatctgggttccgtttgtttgtgcctcacaaaggtttccagagcacagctgctggtttctgtgactttgtccctcacgaaggattcttgaacacttctactagtgtctgaatatttgtccctcagataggaatgcagaacacattggctgagatctgagtgtttgtccctcacttagaattccagaacactgctgctgggttctgagtgttgtccctcacataggattccagaatcctactgatgggttctgagtgtttgtcacccacatagtattccggaagaatgctgctgtgttctgagtgtttgtatctgacataggattccagaaaaatggtgctgtcttctgagtatttgtccaacacataggattccagaacactgctgttgcattctgagtgtttgtccctcatatagaattccagaactctgctgctgggttctgactgtctgtccctcacatacgattcccgaacactcctaggaggtactgaatgtttttccctcacataggtttccaaaacacagctgctggattctgtatgtttctccctcacaaaggattcctgagcactgctgctgtgttctgagtgtttgttcctcacataggaatccggaacacttctgttgctttcttagtgtttctccctcaaataggattccagaacactactacgacggtctgaatatttgtccatcacaaaggaatccagaacactgctgctgggttctgagtgtttgtccctaacataggatgccagaacactgcttcgagggtctcaaggtttgtccctcacaaaggattctagacaactgctgctgccttctgagtgtttgtcactcacataggattccggaaaactgctgctggtttctgagtgtttgtccctcacatggtattccagaagactgctgctgggttctgagtgtttgtcactcacataggattccagaacactgctgttgggttctgagtgtttgtcactcacataggatccagaacacggctgcagggatctgagtgtttgcccctcacataggattccagaacatggctgctgggttctgaatgtttgtccctcccaaatgattcctgggcactgctgctgggttttgagtgtttgtctctcacattggattcgtgaacactgctacgaagttatgaatctttgtcactcacacggcattccaaaacactgcctctgggttctgagtgtctgtccctcaaaaaggattcgataacactgttacgagggtctttatgtttttctctcagaaaggattccagaacactgctcttgggttctgtttgtttgtccctcaaaaaggactcagagcattgctgctggattcagaatgtttgtccctcacataggattccagaacacttcgacgagtgtctgaatgtttgtccctcagataagattccagaacacagtggctgtgctttgagtgcttgtcttttacataagattccagaacactgctattaagttttgaatatttgtcactcacataggattgaagaacactgctgctgtgttctgtgcttttattcctcacataggattccagaacactgttgctgggttttgagagtttgtccctcacataggattccagaacactactacggggatctgaatgtttttccctcacaaacgattccagaacactgctgctggctttgtttgtttatcctcacaaaggattccaaaacacagctgctggtttctgggtgtttttccaacacataggattccggaacacttatatgagtgcctgaatgtttgtctctctgataggattccagaaaacagcggctgggttctgactgtttgtccctcctataagattccagaacacttctgctgggttctgagtgtttgtccccaacataggattccacaacactgccactgggttctgagtgtttgtcccgcacctgagattccagaacactgctactaagttctgaatctttgtcgctcacacaggattccaaaacactgctgctgggttctgagtgtttgtccctgacataggattccagaccacggctgctgggttctgagtgtttgtccctcacatgggattccagaacactgctggttggttcagagtgtttgtccatcacataggattccggaacgctgctgctgggttctgagtgtttgtccctccataggattccagaacacttctgctaggttctgagtgtgtgtccctcacatagaattccacaacactgctgctggattctgagtgtttatccctcacataggattccagaacactgctatagggttctgagtgtttgcccctcacataggatgccagaacactgctacgagtgtctgaatgtttgtccttaacaaaggattccagaacactgctgctgggttcggactgtttgtccctcacgtaggattccagaacattgcttcgagtgtctgaatgtttgtccctcacaaaggattctgcaacattgctgctgggttctgagtgtttctcactgatataggattccagaacatggctgctgggttctgagtgtttgttcctcacatgggattccagaacacttctgctgggttaagagtgtttgtcactcacacagaatttcagaaaactgctaagaggttctgaaggtttgtccctcacacaggattccagaacacttctgctgggttctgagtgtttgttcctcacataggattccagaacactgctgctgggttctgtttgtttgtccctcacaaaggattacagagcactgctgctgggttctgagtgtttgtctctcacttaggaatccagagcaatgctgctggtttctgagtgtttgtccctcacataggattccgaaacatgggtgctgggttctcagtgtttgtccctcacataggataccagaaaactgctgctgggttcagagtgtttgtccctcacataggattccagaacactgctaggaggttctgagagtttgtccctcacaatagactccacaacactgctgccgggttctgagagtttgtccctcacgtaggattccagaacactgcttcgagtgtctgaaggtttgtccctcacaaaggattgtagaacactgttgctcggttctgagtgtttgtccctcacatgagattccagaagactgctgctgggttctgagagattgtccctcacaaaggattccagaacactgctgttgggttctctttgtttttcctcacaaaggattccacagcaccactgctggtttctcagtgtttggccctcacgtaggattccagaacaattctaggagtgtctgaatgtttgtctctcagatagtactccagaacacagtggctgcgttctgagtgtttgtccctcacataggattccagaacactgctgctgggttctgagtgtttgtccctcacacaagatttcagaacactgctgctgcgttctgagtgtttatccctcacataggattccagaacgctgatactgggttctgagtgtttgtatctcacatgggatcctagaacacacctatgagggtctaaaagtttgtccatcacaaaggattccagaacactgcttctgggttctgaatgtttgtccttcacatatgactccagaacactgtttcgagtgcctgagtgtttgtcgctcacatatgattccagaacacagtggctgggttttgagtgtttgtctctcacataggatttcagaacactgctacgaggttatgaatgtttgtccctcacaaaggattccagaacactactgctgggttctgagtgcttgtccctcacataggattccagaacactgctgctgggttcagtttgtttgtccgtcacaaaggattacagagcactgctgctgggttctgagtgtttgtccctcacataggattacagaacattgccgctgggttctgagtgtttgtacctcccataggattccagaacactgctgctgggttctgagtgtttgtccctcacattggattcgtgaacactgctatgaaattctgaatctttgcagctcacacgagattccaaaacactgctgctgcgtcctgagtgtttgtccctcccataggattccagaacactgttaggagggtcttaatgtttttctctcagaatggattccagaacactgctgctgggttctgtttatttgtccctcacaaaggactccagagcactgctgctggattctgagtgtttgtccctcacgtaggattccagaacaattctactagtgtctgaatgtttgtccctccgataggattccagaacagtggcagggtttttagtgtttgtccctcacataggattccagaacattgctacgaagttatgaatgtttgtcgctcacataggattccagaacactgttgctgtattctgtgtgtttgtctctcacataggattccagaacactgctgataggttctgagagtttttccatcacataggattccagaacattgctacgagtgtctgaatgtttttcccacacaaatgattgcacaacactgcggctggttctgtttgtttttccgctgaaatgattccagagcacagctgctggcttctgcgtgtttttcaatcacgtaggattccagaacaattctatgagtgtctgaatgtttgtctctcacataggattccagaacactgctgctggtttctgattgtttgtccctcacataggattccagaacactgcggctgggttctgagtgtttgtccctcacatgggattccagaacactgctacgaattctgaatctttgtccttcacacaggattatgatacactgctgctgggttctgagggtttttacctcacatagggttccagaacactgctacaaattctgaatctttgtccttcacacaggattatgatacactgctgctgggttctgagggtttttacctcatatagggttccagaacactgctgctgggttctgagtgtttgtccccgacataggattccagaacagagatgctgggttctgagtgtttgtcactcacatggaattccaaaatactgatgttgggttcggagtgtttctccctcacatacgaatccagaacactgctatgagtttctgaatgtttgtcccaaacagaggattccagaacactgctggtgggttatgagtgttgtccctcacatacgatttgagaacactgctgctgggttgtgagtgtttttccctcacataggattccagaacactgctgcagggttctgagtgtttagccctcacatgggattccagaacactgttacgaatttctgaatctttctcgatcacacaggattccaaaacactgctgccattttctgagtgtttgtccctcacataggattccagaacactgctgctgggttctgagagtttgtccctcacatatgattccagaacacttctaggacggtctgaatgtttgtccatcacaaaggattccagaacactgctgctgggttctgagtgtttgtccctcacataggatttcagaacacttctaggacggtctgaatgtttgtccatcacaaaggattccagaacactgctgctgggttctgagtgtttgtccctcacataggatttcagaacacttctaggacggtctgaatgtttgtccatcacaaaggattccagaacactgctgctgggttctgagtgtttgtccctcacataggatttcagaacatagcttcaagggtcccaatgtttgtccctcacaaaggaatctagagctctgctgctggttcctgtgtgtcactcacataggattccagaaaactactgctgggttcggagtgtttatccctcacatgggacttccagaacactgcttctgggttctgagtgtctctcacaaaggattccagaacactgctgctgggttctgagtgtttgtcccgcacataggattccaggagacaactactgtgttctgaatgtttgtccctcacataggattccaaaacacttctacgagtgtctgaaatttgttcctcaggtagtattccagaacacagtggctgggttctgaatgtttgtccctcacacaggattccggaacactactgctgggttttgaggatttgtccctaacattggattcccgaacccagccactgtgttctgagtgattgtccctcacatatgattccagaacactgcttcgagggtctgcaggtttgtccctgacaaaggattctagaacactgctgctgatttctgagtgtttgtccctcacatggtattacaaaacaccgctgctgggttcagggtgtttgttcctcacatatgattccagaacactgctacgagattccgaatttttgtccctcacaaacgattctagaacattgctgttgtgttgtgagtgtttgttcctcatataggattccagaacacagtggctgggtactgagcgtttgtccctcacaaagattctagaacactgctctgggtcctgagtgtttgtcccttaaataagactccagaacacttctgctgggttatgagtgtttgtcactgacataggattccagaacactgctgctgggttctgaggggttgtccctcacatgggattccagaacactgcagctgggttctcagtgttagtccctcacataggattccagaatattgctactggattctgagagtttttcactcacataggatttcagaacactgctaagatgttctgaatgtttgtctctcaaaaatgattctagaaaactgctgctgggttctgagtgtttgtccctcacaaaggattctaggacactgctgctgggatctgagtgtttgtccctcacataggattccagaacactgctgctgcgttctgagtggttttcactcacatgggattccagaacactggtgctgagttctgagggtttgtccctcacacaggattccaaaacacagctgctgggtctgagtgtttgtccgtcacatagcattccagaacactgttgctggtttctgagagtttgtcactcacataggattccaaaagcctgcttctcggttctgtatgtttgtctctcacaaaggattcccgagcactgctgttgggttctgagtttttgtcccacacataggattccagaacacgtctacgattatctgaaagtttgtccctcagatagcattccagaacccacttgctgggttctgagtgtttgtccctcacgtgggattccaaaacactgctgcagggatgggggtgtttgttgctcacaagggattccagaacactgctaggatgttctgaatgttagtccctcacagagtattctaaaacaatgctgctgggttccgagtgcttttccctcacaaaggattgtagaacactgctgctgggatctgagtgtttctccctcacatatgattccagaacacttcttcgagggtctgaaattttgttcctcataaaggaaactagaacactgctgctgggttctgattgtttttcactcacataggattccagaacactgctgctggtttctgagggtttgtccctcacatacgagtccagaacacacctacgagagtctgaatgtttgtctatcacaaaggattccagaacactactgctggattctgagtgtttgtcccgcacatgggataccagaaccctgctgctgggttttgagtgtttgtccctcacataggattccagagcacagctgctgggttctgactgttgtacctcacataggattccagaacactgctgctgggttctgagcacttgtccctcacatgggattccagaacactgatgctggattcagaatgtttgtccctcacatatgattccagagcactgctaggaggttctgaatgttagtccctcaaaaaggattctagaaaactgctgctgggttttgagtgtttctttctcacaaaggattccagaacgctgctgctgggttctgagtgcttgtccctcacaaaggattctagaatactgctgctgggttctgagggtgtgtccctcatataggattccagaacactgctggtgggttctgagtgtttataacacacatagtattctagaacactgctgctggcttctgagtgtttgtccctcacatagaattccagaatactgctacgaagttctgaaagtttgtcgctgacataagattccagaacactgctgctgtgttctgagtggttttccctcatataggatccagatcactgctgctggcttctgagtgtttgtccctcacatagaattccagaatactgctacgaagttctgaaagtttgtcgctgacataagattccagaacactgctgctgtgttctgagtggttttccctcatataggattccagatcactgctgctgggttctgagtgtttgtcccttacatgggattccagaacagtgctacgagggtctgagagtttatccctcacaaaggcttccagaacactgctgctgggttctgagtgtttctccctcatattggattccagaacaatactacgagggtctgaatgtttttccctcgcatgtgattccagaacatggttacgagggtgtgaaatttttcctttccaaatgactccagaacactgcttctaggttctgagtgtttgtccctcatataggatgccagaatcctgctacgagggtctgaatgtttttcccacacgtagtattccaaaacactgctacgaggttctgaatgtctttccctcacaaaggattgtagaacactgctactgggttctgtttgtttatccctcacaaagtattcaagagaactgctgctgatttcttagtgtttctcccttacataggaatccagaaaacttctacaaggtactgaatgtttgccctcagattggattccattacacagtggctggattatgagtttttgtccctcacataggattccagaacactgttacgaggttatgaatgcttgtccctcacaaaggattctagaacactgctgctgggttctgagtgtttgtccctcacattggactccagaacactgctgctggattctgagtgtttgtcggtcacctaggattccagaatactgctgctgggttctgtgcatttgtccctcacatagaattccagaacactgctatgaagttctgaaagtttgtctctcacatgagattccaccaaactgctgttggattctgagtgtctgtcccccatataggattccagagcactgctgctgggttctgagtttttgttcctcaaataggattccagaacactgttatgagcttgtgaatgtttttcccaaccaaaggataccggaacactgctgctaggttgtgagtgtttgttcctcaaaaaggattccagaacactgctacgagagtctgaatgtttttccctcacaaagcattgtagaacactgaacctgggttctgtttgtttgtccctcacaaaggattacagagcgatgctccagatttcttagggtttgtccctcacataggataccagaacaattctccgaggttctgaatgtttgccctcaagtaggattccagtacacagcctctggattctgagtgtttgtccctcacataggattctagaacacttctacgagattctgattgtttttccctcacaaaggattctagaacactgcttctgggttctgagtgtttgttccctcacaaaggattctagaagagtgctgctgtgttctctgggttagtccctcacataggattcgagaacactgttgctgggttctgaatgtttgtccctcacgttggattccagaacactgcagctggcttctgagtgtttattcctcacatagaattccagaacaccgctatgaaattctgaaactgtgtcgcttacataggatttcagaacactgctgcttggttctgagtgtctgtccctcacttaggattccagaacactgctacgagggtcggaatgtttatccctcacaaaggtttccagaacaatgctactgggttctgagtgtttgtccctcatgttggatttgagaacactgcagtgagggtctgaatgtttttccctcacataggattccagaagactgctacaaggtctgaatatttttccctcacaaaggattgtacaatgctcctactgagttctgttagtttgtcctcagaaaagattccagaacactgccacagatttcttagtgtgtgtccctcacttaggattccagaacacttctccgaggttctgaatgtttagcctcagatagcattccagtacacagtggttggattttgagtgtttgcccctcacataggattccagaacagtgttacgaggttctgaatgtttgtccctcacaaagtattctagaacacttctgctgagttctgagtgtttgtccctcacaaaggattctagaacactgctgctggattctgtgtgtttgtccatcacataggattccagaacactgctgttggtttctgagtgtttgtccctcactgccatctgagtgtttgtccatgacatagaaatccacaacactgctacgatgttctgaaagtttgtcacacacataggattccagaacactgctgcagcgttctgagtgtttgtccctcacataagattccagaacagtgctacaagggtctgaatgtttatcagtcacaaagtgtttcagatcactgctactgagttgttagcatttgtccctcatattggattccagaacaataccaagagggcccgaatgtctttccaacacataggtttccagaacactgtttctatagtttgaatgtttttccctaccaaaggattccagaagattactgctggattctgagtgtttgtcccacatataggattccaaatcactgcaacgagggtctgaatgcttttccctcacataggattcaagaacactgctaagatggtctgaatgtctttccctcagaaaggattgtagaacactgctactgggttatgtttgtttgcccctcacaatggattccagagcactgctgcagatttcttagagtttgtcccacacataggattccagaacacttctatggggttctgaatgtttgccctcagctagaattcaagtacacaatggctggattctgagtgtttgtccctcacataggattccagaacactgttaccaggttctgaatgtttgactctcacaaaggattctagaacaatgatgctgggttctgagtgtttgtccctcacaaaggattctagaacactgctgatgggttctgagtgtttgtcactctcataggattccagaacactgctgctgggttctgagtgtttgtccctcacttaggattcaagaacactgctgctggcttctcagagtttgtccctcatatagaattccagaacactgctaggaagttcagaaagtttgtcgctcgcatgggattccagaacactgctgctgggttgtgagtgtttgtttcactcataggattccagaacactgcttctggattctgagtgtttgttcctcacataggattccaatacactgctgttgggttctgagtgtttatccctcacaaagttttccagaacactgctactgggttctgagtgtttgcccttatattggattccagaacaatgctacgagtgtctgaatgtttttccctcacataggattccagaacactgttatgagggtgtgaatattttccctcctaaaggattccagaacactgctgctgggttctgagtgtttgtccctgagataggattccagatcacagcttcgagggtctgaatgtttttccctcacataggattccagaacactgctacgaggttctgaatgtttttctctcacagaggattgtaggacattgctactgggttctgtttgcttgtcctcacaaaggaatccagagcactgctgcagatgtcttagtgtttatccctcacatacgattccagaacacttctatgaggttctgaatgtttgcactaatatattattccagtacacagtggctggattctgagtagttgtccctcagataggatcccagaacactgctacgaggatctgaatgtttttacctcacaaaggattttagaacactgcaactgggttatgttttttggtcccacacaaagaattccagggcactgctgcagacttcttggtgtttgtccctcacataggattccagaacactgtgacgaggttcggaatgtttgctctcagataggattccagtacactgtggctggatactgagtgtttgtccctcacatagaattccagaacactgctacgaggttctgcatgtttgtccttcacaaaggattctagaacacttcggttggtttctgtttgtccctcacaaaggattctagaacattgctgctaggttctgaggatttgtacctcacataggattccagaacactgttaggagggtctgaatttttgtccctcacatagaattccagaacactgctgctgatttctcagtgactgtccctcacagagaattccagagcactgctacgaaattcagaaagtttgtcactcacataggattccagaacactgctgctgggttctgagtgtttctccctctcataggattccagaacactgctgctgggttctagtgtttgtctctcacataagattgcaaaacactgctacgaggttctgaatgtttatccctcataaaggtttccaggaaactgctgctgggttctgagtggttgccctcatattgtcttccaaaacaatggtaggagtgtctgaatgtttttccctcacctaggattccagaacactgttaggagggtgtgaaagtttttccctcctaaaggattacagaacactgctgcggggttctgagtgtttgtccctcacaaaagattctagaatactgctcctgggttctgtgtctttgtccatcacataggattccagaacactgctgctgggttctgagtgtttgtccataacataggataccagaacactgctgctgggttctgagtgtttgaccctctcataggattccagaacactgctgttgggttctcagtgtttctccctcacataggattccagaacactgctacaagtttctgaaggtttttccttcacaaaggattccagaacactgctgcggggttctgtgtgtttgtcaatcaaatatgattccggaacacttctgctcggttcttagtgtttgccactcacatatgattcctgaacacttctacaagggtctcaaagtttgtcactcacataggattccagaacacttctaggagggtctgaatgtgtgtccttcacaatggattccaaaacacactggtggattctgaggatttctccctcacataggattccagaactctgctgctggttttccagaacactgctgatgggttctgtgtctttgccaatcaaataggattccagaacactgctgctgggttctgagtgtttgtcctacatataggtttccagaacactgctacgagtgtctgaatgtttgtcactcacataggattagagaatactgctaagagggtctgaatctatgtccctcacaaaggattccagaacactgctgctgggttctgagtaattgtccctcacttaggattacagaacactgctacaaggttctgaatatttgtccctcacatcggattccagaacactggtacaaaggtctgaaagcttttccctcacatcattttcgagaaactgctcctgggttcttggtgtttaccctcacatagtattccagaaaacttctccgtggttctgaatgtttgtccctcacaaaggattccagaacactgctgctgggttctgagtttctgtcactcacataggattctaggacaatttttctgggttctgagtgagcctcacatcttattccagaacactgctatgagggtctgaaactttgttcctcacaaaggattccagaactctgctgccgtgttctgagtgtttgtcccttacatagcaatctggaacactgctgctgggatatgagagtttgtcccacacataggattccagaacactgctgctgggttccgagtgtttgtccctcaaaaagtattccggaatactgctactgggttctgattgtttgtccctctcataggattccagaacactggtacgacggtcttaaggattctccgcaacatagcattccagaacattgctacgatggtctgaatgctagtccctcacatgggattccagaacactgttgctgggttctgagtgtttgtccttcacataggattccagaacactgctgctagtttctgagtgtttgtccctcacataggatcccagaactctgatgcaagggtctgaatgttactccctcagataggattccagaacactgctgctgggttctgagtgtatgaccctcacatagaaatccagaacactgatatgaaggtttgaatatttgtctctcacataggattccagaacactgctacaagggtctgaatgcttgtccgtcacaaaggactccagaacactgctgctgggttctgaatgtttttccctctcataggattgcagaacacagctacgagggtctgaatgtttgtctctcacatatgattccagaacactgctatgatggtctgaatgcttgcccctcatgtaggataccagaacacggctgctgggttttgagtgtttctctgtcacataggattccagaacactgctttgagggtcagaaagtttttctctcacaaaggattccaaaacaccgctgctgggttcggggtgtttgtccctcatataggattcgagaacactgctacgaggctctgaatgtttgtgcctcagaaaggaatccagcacactgctgctgggttctgagggttggtccctcacataggattccataacactgataagaaggcctgaatgtaagtccctcacaaaagattccagaccactgctgcagggttctcagtgtttgtccctcacatagtactacagaacacgactgctgggttctgattgtttgtccgtcacatagcattcgagaacactgctacgggggtctgaaggtttgtatcgcacataggactccagaacactccttcgaggttctgaatgtttgtccatcaccaaggattccagaacactgctactgggatgtgagtgtttgtccctcacttgggataccagaacaaagctccgaggttctgaatgtttgtccctcactaaggattctagaacactgctgttgggttctgagtgttgtccctaaaataggattccagaacaccgctgctgtattctgtatgtttgtccctcacaaaggatggcagaacactgctgctggtttctgagtgtctgtccctcatataggattccagaacacttctatgagtgtctgaatatttgtcccccacctaggatttcagaacacagtggctgggttctgattgtttgtccctcacataggattccagaatactgctgttgggttctgagtgtttgtccctcacaaaggattctagaacactgctgctgagttctgagtgtttgtccctcacaaaggattctagaacactgctgctgggttctgagtgtttctccctcacataggattccagaacgctgatgttgggttctgagtgtttgtccctcacaaaggattttagaacactgctgctgggttctgagtgtttgtcactcacataggattccagggcactgctgctgggttctgagtgtttgtccctcacataggattccaaaacactgctgctgggtcttggtgtttgtccctcacataggattccagaaacctgcttctgggttctgagtgtttgtcactcagatcggattccaaaacactcctgctgtgttctgaatgtttgtccctcacaaaggattgctgagcactgctgctggtttctgagtgtttgtcctcacgtaggattccagagcacttctacaagtgtctgaatgtttgtccctcagataggattccagaacacagtggctgggttctgagtgtttgtcccttacttaggatttcaaaacacacctgctgggttctgagtgtttgtccctcacatgggattccagaagactgctcctcgtttctcagtgtgtgtccctcacttaggattccagaacactgcttcgagggtacgaatgtttgtccctcaaaaaaggattctagaacactactgctgtgttccaaatgcttgtcactcacataggtttccagaacactgctgctgggttctgagtgttgtccctcacatacgattccgcaacacttctacgagtgtctgaatgtttgtccctcagataggattccagaacacaatggctgggttctgattttttgtccctcacataggattccagaacactgctgcggacttctgagtgtttgtccctcaaaaagtattctaggacactgctgctggattctgagagtttttccctcacgaaggattctagaacactgctcctacgttctgagtgtttgtcccttacccagggttccagaacactgctgctggtttctgtgtgtttgttcctcacaaaggattctggaacactgctgctgggtcctgagtgtttgtccgtcacatgggtttccagaacactgctgcagggttctgagtgtttgtccctcacacaggattccaaaacactgttgctgggtcttagtgtttttccctcgcaaaggattccagaacacagctgctgggttctgagtgtttgtcactcagataggattccaaaacactgctgctgtgttctgtatgtttgtccctcacaaaagattgctgagcactgctgctagtttctgagtgtttgtcctcacgtaggattccagagcacttctacaagtgtctgaatgtttgtccctcatataggtttccagaacagagttgctgggtgctgagtgtttgtccctcacatagcattgcagaacaacgctgctagtttctgagtgcttgtccctcactaggattccagaaccttgcttctgggtcttagtgtttgtccctcacttaggattccagaacactgctgcttggttctgagtgtgtgtccctcacttaggattccagagcactgcttcgagggtatgaatgttggtccctcacaaaggattctagaacactactgctgtgttccaaattcttgtcactcacataggtttccagaacactgctgctgggttctgaatgtttttccctcacagaggattccggaacactattcctgggttctgagtgtttgtccctcacataggattccagaaccctgctgttgggttctgagtatttctccctcccatatgattccagaacacttcttcaagggtctgaagttttgtccctcataaaagattctggaacactgctactgggatctgattgtttttcacccacataagattccagaactctgctgctgggttctgagtgtttgtccctcacatgagattccaaaacactgctgctgggttcagagtgtttgtccctcacaaaggattctagaacactgctgatggcttctgtgtgtttgtctctcacaaaggattctagaacactgctgctgggttctgagcgtttgtccctcacaaaggattctagaacactgctgctgggttctgagcatttgtccctcacaaagtattctagaacactactgctgggttctgagtgtttgttcctcacataggattctagaacagagctgctggggtctgagtgtatgtcactcacataggattccagaaaactgttgctgggttgcgagtgtttgtccctcacatacgatttcagaatactcttaagatgtactgaatgtttgtccctcacgtaggattccaaaacactgctgctcagttctgtatgtttgttcctcacaaaggattcctgagcactgctgctggtttctgagtgtttatccctcacataggagtccggaacactgctgctgggtcctgagtttttgtccctcacgtaggattccagaacactgctaggagggtcgcaatgtttttccctcacaaaggattccagaatactgctgctgaggtctgtgtgtttgtccctcacaaaggtttccagagcacagctattggtttctgagtctttgtccctcacataggattccagaacacctctacgagtgtctgaatgtttgtccctcatataggaaccagaacacagtggctggtttctgagtgtttgtccctcacatagatttccagatcactgccactgggttctgaatgtttgtcctcacataggactccacaacactgctcctgggttgtgagtgttctccctcatataggattccagaacactgctgctgggttctgagtgtttgtccctcacataggattccagaacagtgctactgggtactgattgtttgtccctcacataggaatccagaactctgctacgagggtctgaatgtctgcccatcacaagggattccagaacactgttgctggattctgagtgcttttccatgacatagtattcgagaacacttttggtgagtttgagtatttgtccctcatataggcttccagaacactgttgctgggttgtgagtgtttttctctcacgtgggattccagaacactgctgctgggttctgaggttttgtccctcacttaggattccagaacactgctgctaagttcggagtttttcttgctcacataggattccagaacactgttgctggtttctgagtgcttctccttcaaataggattccagaacattgctaggcggtctaaatgtttgcccataacaacggattccagaacactgatgctgggttctgagtgtttgtccctcacatgggattccaaaacactgctgctgggttcagagtatttgtccctcatgtacgattccagaacactgctacgaggttctgaatgtttgtccctcacaaaggattccagaacagtgctgctgggttctgagtgtttgtccctcacaaaggattccagaactctgctgctggattctgagtgtttttccctcacaggattccagaacactgctacgagggtctgaatgtttatccctcagataggattccagaaacaccgtggctgagttctgagtattattccttcacataggattccagaacactgctgctgggttctgaatttttgtctctcacataagtttccagaatcctgctactgggttcggagtgttttgcccacacatacgattccagatcacttcttcgagggtcagaaggtttgtccctctcaaaggattctagaaaactgcttctgggttctgattgtttttcactcacataggatttgagaaccctgctgctgggttctgcgtgtttgtccctcacatgggattccagaagactgctactgtgttctgtatgtttgtccctcacgtagtattcgagaacacttctacgagtgtctgaatgcttgtccctcagatgggattccagaacacagtggctgggttctgagtgtttgtcccgcacacaggattccagaacactgctgatgggttctgagtctttgtccctcacaaaggattctaaaactctcctactgggttctgagtgtttgtccctcacataggattacagaacacagctacgacggtctgaatgtttctccatcacaatgcattgcagaaccctgcgactgggttcgaagtgtttggccctcatatgcgattccagatcacttctttgagggtcagaaggtttgtccctcacaaaggattcgcgaaccctgctgctgggttctgcgtgtttgtacctcacatggtattccaaaacactgctgctgggttctgagtttttgcccctcacaaaggattccagaatactgctttaggactgtgagtgtttgtccctcacaagggattccagagcactcccgctggtttctgagtgtttttccctcacatagtattccagaacagtgctttgagggtctgaaggtttgtccctcacaaaggattctagaacactgcttttggattttgagtgtttgtcactcacataggattccgcaacactgcttctggcttctgagtgtttgtccctcacatgggattccaaaacactgctgctgggttcagagtgtttgttccttacatgggattccaaaacactgctgctgggttcagagtgtttgtccctcacatacgattccagaacactgctactagtttctgaatgtttgtgcctcacaaaggattctagaacactgctgctgggttctgagtgtttgtcactcacataggattccagaacactgcttctggcttctgagtgtttgttcctcacatgggattccaaaacactgctgctgggttcagagtgtttgtccctcacgtacgattccacaacactgctactaatttctgaatgtttgtgcctcagaaaggattctagaacactgctgatgggttctgagtgtttgtccctcacataggattccagaacactgctgctggattgtgaatgtttttccctcacgtgggattccaaaactgtgctgctggtttcagagtgtttgtccttcatatacgattccagatcactgctactagtttctgaatgtttgtgcctcacaaatattctagaacactgctgctgggttctgagtgtttttccctcacatgggattggagaacactgctgccacattctgtctgtccctcacatacgattccacaacactgctacgagtctctgaatgtttgtctatcacaaaggattctagaacactgctgctgggttctgagtgtttgtcccgcacagaggattccataacactgctgctattttctgagtgtcactcacataggcttccagtacactgctgctgtgttctgagtgtttgtctctcacctagtattccagaacgctgctgctgatttctgagtgtttgtccctcacatcggattccagaacacggctgctgagttctgagtgtttgtccctcacataggattccataaaactgctgcagatttcttagtgtttgtcactcacataggattccagaaccctgctgctgggttctgagtgtttctccctcacatgggattccaaaacactgctgctggtttcagaaagtttgtcccttacacacgattccagaacactgctacgaggttctgaatgttagtaactcacaaaggattctgtaagactgctg

SEQ ID NO: 630 - DNA, 18343 bp, Homo sapiens
  source 1..18343: mol_type = other DNA
ttgtccctctcaaaggattccagagcactgctgctggtttcttagtgtttgtccctcacataggattccagaacacttctacgagggtctgaatatttgcccctcaggtagttttccaaaacacagtggttgggatctgagtgtttgtccctcacataggattccagtacaatgcttcgaagttgtgaatgtgtgtcactcacataggattccagaacactgctgctgtgtcctgagtgtttgtccctcacacaggattcgggaacactgctatgagggtttgaatgttttccctcaaaaagaattacagagcactgctgcttggttctgtttttttgtccctcacaaagtataccagaacaacactgctggtttctgagtgtttgtcactcacgtaggattccagaacacttctacacgtgtttgaatatttatcccgcagataggattgcagaacacagtggcggggttctgactgtttgtccctcacataggattccagaacaatgctggtgggttctgtgtgtttgtccctcacttaggtttccagaacactgttgctgggttttgagtgtttgtccctcaaatagaattctagaacattgctgttatgttctgagtgtttgtccctcactgaggattccagaaaactgctgctgggttctgagtgttagtcccacacgtaggatgccagaacactgcgactgagttcttagtgtttgtcccttacataggattccagaacagtgcttcgagtgtctgaaagtttgtccctcacaaaggattcttgtacactgttgctgggttctgagtgtttgtccctcacatgggattccagaacaatgctcttaggttctgagtgcttgttcctcacataggataccagaacactcctacgagggtcagaatgtttttccctcacaaaggattccaggacactgctgctgggttctgttggtttgtccctcagaaaagattccagagcacttctgctggtttctcaatgtttctcacataggattccagaacacttctaagagtgtctgaatgtgtgtccctcaggtagtattccagaacacagtggttgggttctgattgtttctccctcacataggaatccagaacactgctgctgggttttgagtgtttgaccctcacgtaggattccagaacactgattcaagggtctgaatgtttgtccctcaggaaggattctagaaaactgctgctgggttgtgaatgttggtcactcacataggattccagaacatggctgctgagttccaaaagtttgtccatcacatgggattctataacactgctgctgggctaagagtgtttgtacctcacacaggatttcagaacactactactaggttctgaatgtttgtcccttacaaagcattccagaacactgttactgttttctgagtgtttgtcctctcagaggactccagaacactgctgctgagttctgtttgtttgtctctcaagaaggattacagagaactactgctgggctctcagtgtttatccctcacttaggtttccagaacactgcttcaagtgtctgaagttttgtccctaacaaaggattctagagcactgctgctgggttctaattgtttgtccctcaagtgggattccagaacatcgctgctaggttcttagtgtttgtccctcacatgggtttccagaacactgccacgagaatctgaatgtttttccctcacaaaagattccagaacactgctgcttggttctgtttgtttgtccctcacaaaggattccagagcaccgctgctggtttttgagtgtttgtccctcacatagaattccagagcacttctaagagtgcctgaatgtgtgtccctcagataggattccagaacacagtggctgggttctgactgtttctccctcacataggaatccagaacactgctgctgggatctgagtgtttgtccctcacatagggttccagaacactgcttcaaaggtctgaatttttgtccctcacaaaggattctagaacactgctgctggtttctgagtgtttgtcactcacataggattccagaacaccgctgccaggttttgagagtttgttcttcacataggattccagaacactgcagctgggttaagagtgtttgtctctcacataggattccagaacactgttacgaggttgtgaatgtttgtccctcacaaaggattccagaacactgctgctggtttctaagtcttagtcactcacgtaggattccagaacactgctgttgggttctgtttgtttgtccctcaagaaggattacagagaactgctgctgggttctgagtgtatctccctcacataggtttccagaacactgcttcgagtgtctgaaaatttctccttcacaaaggattctagaacactgctgctgggatctgagtgtttgcccttatattggattccagaacactgcttcaaagatatgaatgtttgtccctcacaaaggattccagaacgccgctgctgggttctgagtgtttgtcactcacataggattccaggacaccgctgtggggttttgagagcttgttcctcacatgggattccagaacactgctgctgggttaagagtgtttgtccctcacataggattccagaacactgctatgagattctgaatgtttgtccctcacaaagctttccagaacactgctgctggtttctaagtgttagttcgtcacgtaggattccagaacactgcttctgggttctgagtgtttgtccctcacatgggattccagaacactgctgctgggttaagagtgtttgtccctcacataggattccagaacactgctaggagattctgaatgtttgtccctcacaaagctttccagaacactgctgctggtttttaagtgttagtccgtcacgtaggattccagaacactgcttctgcgttctgtttgtttgtccctcaagaaacattacagagaactgctgctgggttctgagtgtttctccctcacatatgtttccagaacactgcttccagtgtctgaaggtttctccctcacaaaggattctagaacactgctgctggattctgagtgtttgtccctcaggtgggattccagaacattgctgctgtgttctgagtgtttgtcccaaacatgggattccagaacactgctacgagagtctgaatgtttttctctcacaaaagtttccagaacacagcagcttggttccctttgcttgtccctcacaaagaattccagagcactgctgctggtttctgagtgtttgtccctcacatagcattacagaacacttctaagagtgtctgaatgtttatccgtcagataagattccagaacacagtgacacttttctgagtgtttctccctcagataggaatccagaacagtgctgctgggacctgagtatttgtccctcacataggattcaagaacactgcttccgaagtctgaatgtttgtctctcaaaagggattctggaacactgctgctgggttctgagtgtttgtcactcacataggattccagaacaccgatgaggggttttgagagtttgtctgtcacaggggattgcagaacactgctgctgggttaagagtgtttgtccctcacataagactccagaacactgctacgaggttctgaatgtttgtccctcacaaagcattccagaacactgctgctggtttctgagtgttagtccctcacataggattgcagaacactgctgctgggtacagtttgtttgtccctcacgaaggattacagagaactgctgctggattctgagtctttgtccctcacataggtttccagaaccctgcttcgagtgtctgaaggtttgtccctgacaaaggattctagaacactgcttatgggtctgagtgtttgtccctcaggtgggattccagaacattgctgctgtgttctgagtgtttgtcccaaacataggattccagaacactgctacgagagtctgaatgtttttccctcacaaaagattccagaacactctagctgtgttctgtttgtttgtccctcacaaaggattccagagctccgctgctagtttctgagtgtttgtccttcacatagtattctagaacacttctacgatcatctgaatgtttgtccctcagaaaggattccagaacccagtggctgggttttgagcgtttgttcttcacataggattccagaacacttcttctgggttccgagtgtttgtccctcacataggattccagaacacttctgttgggatctgaatgtttttccttcacataggataccagaacactgctggtgggttctgagtgattgtccctcacttaggattccaaaacagtgctacgagggtctgaatggttgtccgtcacaaaggattctagaacactggtgctgggttccgagtgtttgtctctcacgtaggattccaaaacactgctttgagcatctgaatgtttttccctcacaaaggtttctagaacactgctgctgggttctgagtgtttgtcactcacataagtttccagaacactgctgctgggttctgagtgtttgtcacacactaacgattccagaacactgctaggatgttctaaatgattgcccctcacttagtattccagaacacagtgtaaggattctgagtgtttgtcccccacatagtattccagaactctgttacgaagttctgaatgtttgtcgctcacataggattccagaacactgctgctgggttctgaatgtttgtccctcacgtagaattccagaacactgcagctgggctctgagtgattgtccctcacataggattccaaaacacacctacgtgggtctgaaagttttaccctcacaaagaattaaagaacacttctgctgggttctgtttgtttgtccctcagaaaggattccagagcaccgctgctagtttctgagtgtttgggcctcacaaaggattccagaagccttctatgagtgtctgaatatttatccctaagataggattccagaacacagtggctgggttctgagtatttgtcccttatatgggattccagaagactgctactgagttatgagtgtttgtccctcacataggattccagaacactgcagctgggttctgagtgtttgtccgtcacatagatttccagaacaatgctgttgggttctgagtgtttgtccctcattgaggatttcagaacagtcctgctgggttctgagtgtttgtccctcacataggattgcagaacacagctgctgggttctgagtgtttgtccctcacataggattccagaatactgcttcaggggtctgaattttcatccctcacaaaggtgtctagaacactgctgctgggttctgagtgtttgtcactcacacaggattccagaacatagctcctgtgttctgagtgtttgtacctcacatgggattccagagcactgttgcagggttctgcgtgtttgtccctcactgaggattccagaatactgctactgcttctgagtgtttgtccctcacataagattccagagcactgctacgagggcctgaatgtttgtccatcacataggattccagaacaattctacgagtgtatgaatgtttgtcccttagataggaatacagaacacagtggctggtttctgagtgtttgtccctctcaaaggattccagaactctgctgctgggttctgagagtttgtgcctcacataggattccacaacactgctgctggattcggagtgtttgtcccttacatagaattccagaacactgctggtgggtactgagtgtttgtccctcacataggattccagaacactgctgctgggttctgagtgtttgtcccacacaaaggattccaggatactgctactgtgttatgagtgcttgtccctcaaatagggttgcagagcactgttacgaaggtctgaatgtttgtccatcagcaaaaattacagaacactgctgctgggttctgagtgtttgtccctcacataggattccagaacactgcttcgagtgtctgaatgtttgttcctcacaaaggattctagacaactcctgctggtttctgagtgtttgccactcacataggattccgaagcactcctgctggatactgtttgtttttccttcacaacggaatccagaaaaatattgctgctttcggagtgtttgtccctcagattggattccagaacacttctttgtgtgtctgaatgtttctccctcagataggactccagaacacagaggctgggttctgattatttgtcccccacgtaggattccataacactgctaagaaattctgaacgtttattgctctcataggataccagaacaattctgctgggttctgagtgtttgtccctcacatatgattccagaacacttctatgagtgtctgaatatttgtccttcaaataggattccagaagacagtgcctaggttttgagtgtctgtccctcacataggattctagaacactgctgctgggttctgagtgtttattcctcacataggattccagaacactgcggctgggttctgagtgtttgtccctcacatagaattccagaacactgctgttgagttttgagtgtttgtccctcattgaggattccagaacactgctgctgggttctgagtgtttgtccctcatgtagtattcctgaacactgatactgaggtctgagtgtttgtcccttacataggattgcagaacactcctactatggtctaaatgtttgtccatcacaaaggtttccagaacactgcggctgggttctgagtgtttgtccctcagataggattccagaacactgcttcacgggtctgaatgtttgtccctcacaaaggattctagaacacttctactgggttctgagtgtttgtcactcatgtaggattccagaatatggctgctgggttctgagtgtttgacccttacatgggattccagagcactgctgctgggttcagactgtttgtccctcacacaggtttccagaacactgctatgaggttctgaatctttctctttcacaaacgattcaacaacactgctgctggattctgagtgtttgtccctcacataggattccagaacactgctgctggggtatgtttgtttgcccctccgaaaggattacagagcactgctacaaagttctgaatgtttttccctcacaaaggattccagaacactcctgttgagttctgagtgcttgtccctcacacaggattacagaacactgcttcgagggtctgaaggtttgtccctcacaatgcattctagaacactgttgatgggttctgagtgtttgtccctcacactggatttcagaacactgttggtcggttctgagagtttttccctcacatagaattccagaacactgctgggagcctctgaatgttttccctcacaaaggattcgagaaaacccctgctaagttctgtgtgtttgtccctcacaaaggattccagagcaccgctgctgctttctgggtgtttttccctcacgtatgattctaaagcacttcctcgagtgtcttaaagtttttccctcacataggatttcataacacagtgtctgtgttctgagtggggtacctcacaggtgattccagaccactgctgctgggttctgagaatttgtccctgacataggattccagaacactgccagtttgttctgagtgtttttcccttacttaggattccacaacactgctatgagggtctgaatgtttgtctaacactaaggattccagaacactgctgctgggttctgagtttttgtccctcacataggattccagaacatttttttgaatgtctgaaagtttttccctcaaaatggattctagaacactgttgctgtcttctgagtgtttgtcactcacttagtattccagaacacggctgctgagttctgagtgtttttccctcacaagggattccagaacactgctgctggcttaagagtgtttttccctcacataggatgccagagcactgctatgaggttctaaatatttgtccctcacaaaggattccagaacacctctgaaaatttctgagtgtctgcccctcacataggattccagaacactgctgctgctttctttgtgtttgttcctcatataagattccagcccactgctgctgtgttctgagggtttgtccctcacataagatcccagaatactgctacgaggatctgaatgtttgtccttcacttaggattcctgaacactgcaaacagtgtctgaatgtttgtccctcacgaaggtttccacaacactgctgctgggatctgagtgtttgaccctcacataggattccagaacactgctatgagggtctgagtgtttgtctctcccataggattccagaacactgctatgagggtctgagtgtttgtctctcccataggattccagagcactgctttgagagtctgaatgtctgtccctcacttaggattccagaacacctctgaaagtttctgagtgtctgtccctcacataggattccagaacactgctgctgcgttctttgtgttggttcctcatataggattccagcccactgctgctgtgttctgagggtttgtccctcacataagatcccagaatactgctacgaggatctgaacgtttgtccttcacttagaattcctgaacactgcaaacagtgtctgaatgtttgtctctcacgaaggtttccacaacactgctgctgggatctgtgtgtttgaccctcacataggattccagaacactgctatgagggtctgaatgtttttccctcagataggattctaggacactgctatgagggtctgaatatttgtgcctcacaatagattgcagaacactgctgctgggttctgagtgtttgtccctcaaatatgattctagtacactgcttcgagggtctgaatgtttgtcccttacatagcattccagaacactgtttctgggttctgattgtttgtccgtcacatagtattccagaacactgctgctgggttctgagtgtttgtccctcacataggattccgggacactgctacgaaggtttgaaagtttgtccctcacataagactccagaacattgctacgagggtctgaatgtttctcctttatgtacgattcaggaacactgctaaactggtgtgaatgattgtccctcacgaagaattccagatcagtgctgctggtttctgagtgtctatccctcacatagaattccagaacactgctacaatggtctgaatgtctgtccctcacaaaaaattatggaacactgctgctgggttcagagtgtttgcccctcactttggattccagaacatggcttctgggttctaagtgtctgtcccacacttaggattccagaacactgctggtgggttctgtgtgtttgtccttcacacaggattccagaaaactgctaggtggttctgaatgtctgtccctcagaaaggtttgcagaacactgttgctaggtactgagtgtttgaccctcacataggattccagaacacagctatgaggttgtaaaactgtgtccctcacataggattctggaacactgctgggttctgagtgcttgtccctcacataggattgcagaacactgctgcgagggtctgaatgtctgtccctcacgtaggattccagaacacagcaacgagggtctaaatgtttgtccctcacataggactacagaacactgctaagaaattctgaatgtttgtccttcacaaagctttccacaacactgctgctgggttctgagagtttaaccatctcataggattccagaacactgctacgaggtcatgaatatttgcccctcgcgtaggattccagaacactgctgcaggattcagagtgtttgtccctcacaaagaattccagaataccgctgctggattctgacagtttgtccctcacataggattcgagaacacggatacgagggtctgaatatctgccctgacataggattccagaacactgctgctgcgttctcagtttttgtacctaacgtaggattccagaacactgctgctgggttctgagtgtttgtccctcacataggattacagaacactgctacgaggttctgaatgtttatccctcacaaaaattctggaacattgcagctggactcggagggtttgtccttcacaaaggattccagagcactgctgtgtgtttctgaatgtttgtccttcacataaggttccagaacactgttacgagggtctgaatgtccctcagagaggattccagatcattgctgctgagttctgaatgtttttccctcatataggattacagaacaccgctgctgggttctgagtgtttgtccctcagttaggattccagaacactgcaacaagggtctgaatgtttgtccctcacaaaggattccagaacagtgctgcagggttcttagtgtttgtctctcacatacgattccagaacactgctacgaggggctgaatgtctctccctcacataggattccagaacactgctgctgggttctaagtgtttgtccctcacataggtttccagaacacaactacgaagctctgaatgtttgtccctcacatgggataccagaacactgctgttgggttttgagtgtttgtccctcacattagattccagaacacttctgctggtttctgtgtttgtccatcacacaggattctggaacactgctacaaggatctgaaagtttgtccgtcacaaaggaatccagaacactgctgctggtttctgagtgtttgcccctcacataggattccggaacactgctaaaaggatctgaaagtttgtccgtcacaaaggattccagaacactgctgctggcttctgagtgtttgcccctcacataggattccataacattgctgtagggttctgagtgtttgtccgtcacataggattccagaacagtactatgagggtctttatatttgtacctcacaaacgtttccagagcactgctgctggtttctgaatgttttaccctcacatacgattccagaacacgacaaagagggtctgaatgtttgtcctttacaaaggtttccagaactctcttgctgtgttcttagtctttgaacctcacaaagaattccaggacagtgctacgagtgtctgattgtttgtcccttacatcggattccagaacactgctgctgggttctgagtgtttgtcactcacataggattgcagaacactagtgctgtgttctctgtgtttgtccctcacatgggattccaaaacacagccacgagggtctgaatatcagtccgtcacatggatttcctgaacactactgctttggtctgagtgttagtaactcaagtaggattctagaacactgctgctgggttctgagtgtttgtccctcacataggaatccagaacacagctacgagattctgaatgtctggccctcacaaaggattccagaatactactgctgggttctgagtgtttgtccctcacataggattccagaacactgctgctgggtttgagtatttctccctcacaaaggattccagaacactgctgctgggttctgagtattcgtccctcacatacgattccagaacactgctacgaggttctgaatgtctgcccctcacatagaattccagaacaatactatgaggttcttaatatttgtccctcacactggtttccagaacactactgctaggctctgagggttttaccctcacacaggattccagaacactgctacgaggatctgaatgtttgtccttcacttaagattccagaacactgctgctgggttctgagtgtttgtccctcacataggattacagaacactgctacgaggtttgaagattcctcgctcacttaggattccagaacattgctacaagtgtctgattctttgtccctcagaaggtttccagaacactgttgctgggtctgagtgtttgacccacacacaggattccagtacattgatatgagggtctgaatatttgtccctcacatagagttccagaacactgctgctgctttctgagtttttgtccctcacttaggattcctgaacactgctgctggtttctgagtgtttgtccatcacatagaattccagaacactgttgctgggctctgagtgtttgtccttcacatagcattccagaacactgctacgaggatctgaatgtttgtctctcacttagaattccaggacactactacaagggtcttaatatttttccctcacaaaggtttctggaaccttgctgctgggttctgagtgtttgtctctcacataggattccagaacatggctactgttttctgagtgtttgtgccttatataggattcttgaacacttcttctgggttctgagtgtttggccctcacataggattccacaacactgctgctgggttctgtgtggtcgtccctcacataggagtccagaatattgctacgatgctctgaatgtttgtccctcacacaggattccagagcactgctgttgttttctgagtatttatccctcacttaggattccagaacactgttacgagggtctgaatatctgtctgtcacatgggattcctgagcactgctgctgggttctgagtgtttgactctcctataggattccggaacacggcagttcggttctgagtctttgtcctttacataggattccagaaaactgttgctgtgtacttagtgtttgtccttcacatagggttacagaacactgctacgaggatatgaatatttgtcacttgcataggattctagaacactgctatgagggactgaatatttgtccctcacaaaggtttccagaacactgcttctggtttctgagtgtttgaccctcacataggattccagaacattgctacgagggtctgaatatttgtccctcaaaaaggattccagaatactactgctgcgttctgagtgtttgttccccacatacgattccagaacactgcagtgagggtatgaaggtttgtccctcacataggattccagcacactgctgctgggttctgaatgtttgtccctcacataggattccagaaccctgctacgacggtctgaatgtttgtccttcacagattccagaaatctgctgctgggttttgggtgtttgtccctcacataggtttccacaacatagctgctgggttctgcatgtttgtcccttacataggattccagaacaccactgctggcttctgtgtgtttgtccctcacataggattccagagcactgctatgagggtctaaaagtatttccctcacataggattccagaacactgctatgagggtcagaatatttgtccctcacaaaggattccagaacaatactggtggattcttagggtttgaccctgacataggattccagaacactgctacgagtgtctgaatgtttatccctcacatagtattccagaacactgctactgggttctgagtgtttgtccctcacataggattccagaacactgctgctgggttctgtgtgtttgtgcctcacataggattccagaacactgttatgaggctctgaatgttttttcctcacaaaggattccaggacactgctaggaagttctgaatgtttgtcgcccagataggattccagaacactgctgctgggttctgtgtctttgtacttcacatacgattccatatcactgctgccgggtactgagtgtttgtccctgacttaggattccagtacactcctacgagtgtctgaatgtttgtccctcacataggatttcaggacactaccataagggtcttaatatttgaccctcaaaatgtttccaaaacgctgccgttgggttctgagagtgttaccctcacataggattccaggacactaccataagggtcttaatatttgaccctcaaaatgtttccaaaacgctgccgttgggttctgagagtgttaccctcacataggattccagaacactgctatgagggtctgaatgtttgttcctcacataggtttccagaacactgctacaagggtctcaatgtttgtccctcacaaaggattgcagagcactgctgctgggttctgagtgcttgtccctcacataggattccagaacattgtgtgttggtctgaatgtctgtccctcacatgggattccagaacacacctgctgggttccgagtgtttctccctcacataggattagagaatcctgctaagagggtctgaaagttagtccctcacaaaggtatccagaacactgctgttgggagctgagtgtatttccctcacataggattccagaacactgttgctgggttctcaatgtttgtccctcacataggattccagaacactgctgttgggttctgagtgtttgtccctcacataaggattccataacactgttaccaggatctgaatgtctgtccatcacatgggattcctgaacacgtctgctgggttcagagtgtttcaccctcacataggaatccagaacacagatacgagattctgaatgtttgtcccgcaaaaaggattccagaacacggctgctgggttctgagggtttgtccctcacataggattccagaacagtgctacaaggatctgtatgtttttctgtcagaaaggcttccagaacactgctactgggttctgtttgtttgtaactcacaaaggattccagagaactgctcctggtttctgagagtttgtccctcacataggattccagaacacttctatgagtgtctgaatgtttgtccctcagaaaggattccagaacacagtggctggtttctgagtgtttgtcgctctcataggattgcagaacactactgcgtttttctgagtgtttgttcctcacataggattccacaagactgctgctgggttctgtgtatttgtccctcacataggattccagaacactgctgctgtgttctgagtatatgtccctcacgtaagataccagaacactgctacgacggtctgaatgtttgtctgtcacaaatgattccagaacaccgctactgggttcttagtgtttgtccctcaaaaaggactctagaacactgctgctgggttctgagtgtttgccccttacataggattccagaacactgctgctgggttctgagtgtttttccctcacataagattccagaacactgctgctgggttctgagtgtttgtccctcacattggattccagaacactgctgctgggttctgagtgttggtccgtcacataggattccagaaaactggcacgagggtctgaatgtttgtccatcacaaaggattccagagcactgttgctgggtatctgagtgttggtccctcacataggattccagaactgtgcttcgagggtctcaatgtttgtgcctcacaaaggattctagaacactgctgctggtttctgtttgtcagtcacatgggattcagaacacttctgctgggttctgagagtttgtgcctcacttacgattccagaacactgctacgaggttctgaatgtttttccctcaccaaggattccagaacgctgctgctgggttctgagagtttttctctcacataggattcaaaaacactgctggtggtttctgagtgtttgtccctcacataggattccagaacactgatgctgggttctgattgtttgtccctcacatgggactccagaacactgctacgaagttctgcatctttgtcgctcacacaggattctagaacactgctgctgagttctgagtgtttgtctctcacataggattccagaacactgctgctgggttcagagtgtttattccacacacaggattccagaacactgctacgagggtcagaatgtttttccgtcacaaaagattccagattactgctgctggattctgtttgtttgtccctcacaaaggattccagaacgccactgctggtttctaagtgtttgtcccacacataggatttcagaacacttctacgaagttctgaatgtttgttcctcacaaaggattccagaatactgctgatggtttctcaatgtttgtccctaacataggactccagaacactgctgcttcattcttcttgtttgtccctcacaaaggattccagagcactgctgctagtttctgagtgtctgtccctcacataggattccagaacacttctatgggtttctgaatgtttgaccctcagataggatttcagaacacagtggctgggttctgagtgtttgtccctcacgtagtattctggaacacttctacgaagttctgaatgtttgtcacttaaaaaggattctagaacactgctgctgggttctgagtgtttgtccctcacatgggattcccaaacactgctgctgggttcagagggtttgtccctcacatagcattacagaacactgctacgttcgtctgaatggttttccctcacaaaggattccagagcaccactgctgctttctgggtgtttgtccctcacataggattccagaacacttctatgggtgtctgaatatttgtcactcagataggattccagaacacagtggctgggttctgagtgtttttccgtcacatacaaatccagaacacagctgccgggttctgcgtgtttgtccctcacatgggattcccgaacactgctgccgcattctgagtgtttgctcctctcatagtattccagaacactgctgcttagttttgagtgtttgtctctcacataggattccagaacattgctacgagggtctgaatgtttgtccatcacaaaggattccagaacactgctgctgggttctgagtgtttgtccctcacataggattccagaacactgcttcatgtgtctcaatgtttgtcccctacaaagtattctagagcactgatgctgacttctgagtgtttgtcactcatataggaatccagaaaactgctgctgggttctgagtgtttgccactcacagatgattccagaacacagctaggagtttctgaatgtttgtccctcacataggattccaaaacactgctgctggcttctgtatgtttgtccctcaaataggattccagagcactgctgctggtttctgagtgtttgtccctcacataggattccagaacacttctatgaagttctggatctttggcgatcgcacaggattccaaagcactgctgccaggttctgagtgtttgtccctcacataggattccagaacactgctgctgggttctgagtgtctgtcccttaaataggattccagaacactgctacaagggtctgaatgtttttccttcagaaaggagtccggaaccctgctactgggttctgtttgtttgtcctttacaaaggatttcagagcactactcttggttgcttagtgtttgtccctcacataggatttcagaacacttctatgagtgtctgaaagtttgtccctcacataggattccagaagatagtggatgggttctgagtgtttgtctatcacataagattccatcacactgctgctgggttctcaatgtttgtccctcacataaggttccagaacactgctgctctgttctgagtgtttctccctcacagaggattccagaacacttctcctgggttctgagtggttgtccctcacataggattccagtgcactgctacaagggtttgaatgtttgcgcatcacaaaggattccaggaccctgctgctgggttctgagtgtttgtccctcacttaggattccagaacactgcttcaagagtgtgaatgtttgtccctcacaaaggattctagaacactgctcctgggttctgagtgtttgtccctaatatactattccagaacactgctgctgggttctgaatatttgtccctctcatgggattccggaaaactgctgctgggttctgaatgtttgtccctcacattggattccagaacactgctgctgggtcctgagtgtttgtccctcacatagaattccagaacactgctacgaatctctgaatgtttgtcactcacacaggattccaggatgctgctggattctcagtttttgtccctcacataggattccagaacactgctacgagggtctgaatttttatccattacaatggattacaaaacagttctggaatcctatgtgagggacaaatactctgaacccagcagtgttctggaatcctatgtgagg

SEQ ID NO: 631 - DNA, 6127 bp, Homo sapiens
  source 1..6127: mol_type = other DNA
ttccaagattaccaaataggaacaactccagtctacagcccccagtgtgagtgacacagatgggtgatttctgcatttccaactgaggtaccaggttcatctcactggggcttgtcagacagtgggtgcagcccacagagtgtgagccgaagcagggcagggcatcgcctcacccgggaagcgcaaggggttggagaattccctttcctagccaagggaagccatgacagaccgtacctggaaaatcgggacactcccaccctaatactgtgcttttccaatggtcttagcaaatggcacaccagattatatcccatgcatgactcagatggtcccacgcccacggagcctcgctcactgctagcacagcagtctgagatcgaactgcaaggcagcagcgaggctgggggacgggcgcccaccattgctgaggcttgggtaggtaaacaaagtggcctggaagctcaaactgggtggagtccaccacagctcaaagaggcctgcttgcctctgtagactccacctttgagggcagggcatagctgaacaaaaggcagcagaaacttctgcagacttaaacgtccctgtctgacagctttgaagagtgtagtggttctcccagcatggagtttgagatctgagaacagacagactgcctcaagtgggttcctaacccctgagtagcctaactgggagacacctcccagtaggggccaactgacacctcatacagccaggtgcccctacgagacgaagcttccagaggaaggatcaggcagcaacatttgccattctgcaatatttgctgttctgcagcctctcctggtgacactcaggcaaacagggtctggagtggactccagcaaactccagcagaccttcagctgagggtcctgactgttagaaggaaaactaacacacagaaaggacatccacaccaaaaccccatctgcacatcaccatcatcaaagactaaaggtagataaaaccacaaaaatggggaaaaaccagagcagaaaagcttcaaattctaaaaataagagcacctcttctcctccaaaggaacgaagctcctcgccagcaacggaacaaagctgaacagagaatgacttcgacggttgagagaagaaggcttcagatgatcggtagtaacaaacttctccgagctaaaggaggatgttcgaaaccactgcaaagaagctaaaaaccttgaaaaaagattggatgaatggctaactagaataaacagcgtagagaagatgttaaatgacctgatggagctgaaaaccatggcatgagaactacgtgacacatgcacaagcttcagcagccgattcgatcaagtggaagaaagggtatcagtgattgaagatcaaatgaatgaaatgaagcgagaagacaagtttagagaaaaaagagtgaaaagaaatgaacagagcctccaagaaatatgggactatgtgaaaagaccaaatctacgtctgattggtgtacttgaaagtcatggggagaatggaaccaagttggaaaacactctcaggatattatccaggagaacttccccaacctagcaaggcaggccaacattcaaattcaggaaatacagagaacgccacaaagatactcctccagaagagcaactctaagacacgtaattgtcagattcaccaaagttgaaatgaaggaaaaaatattaagggcagccagagagaaaggtcgggttgcccacaaagggaagcccatcagactaacagcagatgtctcggcagaaactctacaagccagaagagagtgggggccaatattcaacattcttaaagaaaagaattttcaaccaagaatttcatacccagccaaactaagcttcataagtgaaggagaaataaaatcctttacagacaagcaaatgctgagagattttgtcaccaccaggcctgccttacaaagctcctggaggaagcactaaacatggaaaggaacaaccggtaccagccactgcaaaaacatgccaaactgtaaagaccattgatgctaggaagaaactgcatcaactaatgagcaaaataaccagctgacatcataatgacaggatcaaattcacacataacaatattaaccttaaatgtaaatggactaaatgctccaattaaaagacacagactggcaaactggatgaagagtcaagacccatcagtgtgctatattcaggagacccagctcacctgcagagacacacataggctcaaaataaaggaatggaggaagatctaccaagcaaatggaaaacaacaaaaagcaggagttgcaatcctagcctctgataaaacagactttaaataaacaaagatcaaaagacacaaagaaggccattacataatggtaaagggatcaattcaacaagaagagctaactatcctaaatatatatgcactcaatacaggagtacccaaattcataaagcaagtccttagagacctacaaagagacttagactcccacacaataataatgggagattttaacaccccactgtcaacattaaacagatcaatgagacagaaagttaaaaaggacatccaggaattgaactcagctcagcaccaagcggatctaatagacatctacagaactctccaccccaaatcaacagaatatacattcttctcagcaccacatcacacttattccaaaattgaccacatagttggaagtaaagcactccccagcaaatgtaaaagaacagaaattataacaaattgtctctcagaccacagtgcaatcaaactagaactcaggattaagaaactcactcgaaaccactcaactacatggaaactgaacaacctgctcctgaatgactactgggtacataacgaaatgaaggcagaagtaaagatgttctttgaaaccaatgagaacaaagacacaacatgccagaatctctgggacacatttaaagcagtgtgtagagggaaatttatagcactaaatgcccacaagagaaagcaggaaagatctaaaattgacaccctaacatcacaattaaaagaacttgagaagcaagagcaaacacgtgcaaaagctagcagaaggcaagaaataactaagatcagagcagaactgaaggagacagagacacaaaaaacccttcaaaaaatcaaatggaggaggtggttttctgaaaagatcaacaaaattgatagaccactagcaagactaatagagaagaaaagagagaagaatcaaatagacacaataaaaaatgataaaggggataccaccaccgatcccacggaaatacaaactaccatcagagaatattataaacacctctatgcaaataaactaaaaagtctagaagaaatagataaattcctggacacatacaccctcccaagactaaaccaggaagaaggtgaatccctgaatacaccaataacatgctctgaaattgaggcaataattaatagcttaccaaccaaaaaaagtccaggaccagacagattcacagccgaattctaccagtggtacaaagaggagctggtaccattccttctgaaactattccaatcaaaagaaaaagaggcaatcctccctaactcattttatgaggccagcatcaccctgataccaaagcctggcagagacacaacaaaaaaagagaattttagaccattatccgtgatgaacatcgatgcaaaaatcctcaataaaatattggcaaaccaaatccagcagcatatcaaaaggcttatccatcacaatcaagttggcttcatccctgggatgcaaggctggttcaacatacacaaatcaataaatgtaatccagcatataaacagaatcaaagacaaaagccacatgattatctcaatagatgcagtaaaggtctttgacaaaattcaagagtgcttcatgctaaaaactctcaataaactaggtattgatgggacgtatctcaaaatcataagagctatttatgacaacccacagccaatgtcatactgaatgggcaaaaactggaagcattccttttgaaaactggcacaagacagggatgccctctctcacaactcctattcgacatagtgttggaagttctggccagggcaatcaggcaggagaaagaaataaagggtattcgattaggaaaagaagaagtcaaattgtccctgtttgtagatgacatggttgtatatctagaaaaccccatcatctcagcccaaaatctccttaagccgataagcagcttcagcaaagtctcaggataaaaaaatcaatgtgcaaaaatcacaagcattcctatacaccaataacagacaaacagagagccaaatcatgagcgaactcccattcacaattgcttcaaagagaataaaatacctaggaatccagcttacaagggatgtgaagggcctcttcaaggagaactacaaatgaccactcaatgaaataaaagaggacacaaacaaatggaagaacattccatgctcatggatacgaagaatcaatatcatgaaaatagccatactgctcaaggtaatttatagattcaatgccatccccatcaagctaccaatgactttcttcacagaattggaaaaaaacttctttaaagctcatatggaaccaaaacagagcctgcattgccaagacaatcctaagccaaaagaataaagctggaggcatcaagctacctgacttcaaactatactacaaggctacagtaaccaaaacagcatggtgctggtaccaaaacagagatatagatcaatggaacaaaacagagccctctgaaataataccacacatctacaaccatctgatctttgacaaacctgacaaaaacaagaaatggggaaaggattccctatttaataaatggtgctgggaaaacggactagccatatgtagaaagctgaaactggatcccctccttaccccttgtacaaaaattaattcaagatggattaaagacttaaatgttagacctaaaaccataaaaaccctagaagaaaacctaggcaataccattcaggacataggtatgggcaaggacttcatgactaaaacaccaaaagcaatggcaacaaaagccaaaattgacaaatgggatctaactaaagtaaagagcttctgcacagcaaaagaaagtaccatcagagtaaacaggcaacctacagaatgggagaaaatttttgcaatctatccatctgacacagggctaatatccagaatctacaaagaacttaaaacaaatttacaagaaaaacatcaaacaaccccatcaaaaagtgggtgaaggatatgaacagacacttctcaaaagaagacatttatgcagccaaaagacacatgaaaaaatgcttatcatcactggccatcagagaaatgcaaataaaaaccacaatgagataccatctcacaccagttagaatggcgatcattaaaaagtcaggaaacaacaggtgctggacaggatgtggagaaataggaacacttttacactgttggtgggactgtaaactagttcaaccattgtggaagacagtgtggcgattcctcaaggatttagaactagaaatacgatttgaaccagccatcccattactgagtatatacccaaaggattataaatcatgctgctataatgacacatgcacacgtatgtttactgtggcactattcacaatagcaaagacttggaaccaacccaaatgtccatcaatgatagacttgattaagaaaatgtggcacatatacagcatggaatgctaggcagccataaaaaagatgagttcatgtcctttgtagggacatggatgaagctggaaaccatcattctgagcaaactatcgcaaggaaagaaaaccaaacaccacatgttctcactaataggtgggaattgaacaatgagaacacttggacacaggatgaggaacatcacacaccgggacgtgttgtggggttgggggagggggcaggggtagtatgaggagatatacctaatgtaaatgagttaatgggtgcagcacaccaacatggcacatgtatacatatgtaacaaacctgcacattgtacacatgtgtacaccctagaacttcaagtataataataataaaaaaa

SEQ ID NO: 632 - DNA, 6031 bp, Homo sapiens
  source 1..6031: mol_type = other DNA
agggaggagccaagatggccgaataggaacagctccggtctacagctcccagcgtgagcgacacagaagacgggtgatttctgcatttccatctgaggtaccgggttcatctcactagggagtgccagacagtgggcgcaggccagtgtgtgtgcgcaccgtgcgcgagccgaagcagggcgaggcattgcctcacctgggaagcgcaaggggtcagggagttccctttccgagtcaaagaaaggggtgacggacgcacctggaaaatcgggtcactcccacccgaatattgcgcttttcagaccggcttaagaaacggcgcaccacgagactatatcccacacctggctcagagggtcctacgcccacggaatctcgctgattgctagcacagcagtctgagatcaaactgcaaggcggcagccaggctgggggaggggcgcccgccattgcccaggcttgcttaggtaaacaaagcagccgggaagctccaactgggtggagcccaccacagctcaaggaggcctgcctgcctctgtaggctccacctctgggggcagggcacagacaaacaaaaagacagcagtaacctctgcagacttaagtgtccctgtctgacagctttgaagagagcagtggttctcccagcacgcagctggagatctgagaacgggcagactgcctcctcaagtgggtccctgacccctgacccccgagcagcctaactgggaggcaccccccagcaggggcacactgacacctcacacggcagggtattccaacagacctgcagctgagggtcctgtctgttagaaggaaaactaacaaccagaaaggacatctacaccgaaaacccatctgtacatcaccatcatcaaagaccaaaagtagataaaaccacaaagatggggaaaaaacagaacagaaaaactggaaactctaaaacgcagagcgcctctcctcctccaaaggaacgcagttcctcaccagcaacagaacaaagctggatggagaatgattttgacgagctgagagaagaaggcttcagacgatcaaattactctgagctacgggaggacattcaaaccaaaggcaaagaaattgaaaactttgaaaaaaatttagaagaatgtataactagaataaccaatacagagaagtgcttaaaggagctgatggagctgaaaaccaaggctcgagaactacgtgaagaatgcagaagcctcaggagccgatgcgatcaactggaagaaagggtatcagcaatggaagatgaaatgaatgaaatgaagcgagaagggaagtttagagaaaaaagaataaaaagaaatgagcaaagcctccaagaaatatgggactatgtgaaaagaccaaatctacgtctgattggtgtacctgaaagtgatgtggagaatggaaccaagttggaaaacactctgcaggatattatccaggagaacttccccaatctagcaaggcaggccaacgttcagattcaggaagtacagagaacaccacaaagatactcctcgagaagagcaactccaagacacataattgtcagattcaccaaagttgaaatgaaggaaaaaatgttaagggcagccagagagaaaggtcgggttaccctcaaaggaaagcccatcagactaacagcggatctctcggcagaaaccctacaagccagaagagagtgggggccaatattcaacattcttaaagaaaagaattttcaacccagaatttcatatccagccaaactaagcttcataagtgaaggagaaataaaatactttatagacaagcaaatgctgagagattttgtcaccaccaggcctgccctaaaagagctcctgaaggaagcgctaaacatggaaaggaacaaccggtaccagccgctgcaaaatcatgccaaaatgtaaagaccatcgagactaggaagaaactgcatcaactaatgagcaaaatcaccagctaacatcacaatgacaggatcaaattcacacataacaatattaactttaaatataaatggactaaattctgcaattaaaagacacagactggcaagttggataaagagtcaagacccatcagtgtgctgtattcaggaaacccatctcacgtgcagagacacacataggctcaaaataaaaggatggaggaagatctaccaagccaatggaaaacaaaaaaaggcaggggttgcaatcctagtctctgataaaacagactttaaaccagcaaagatcaaaagagacaaagaaggccattacataatggtaaagggatcaattcaacaagaggagctaactatcctaaatatttatgcacccaatacaggagcacccagattcataaagcaagtcctcagtgacctacaaagagacttagactcccacacattaataatgggagactttaacaccccactgtcaacattagacagatcaacgagacagaaagtcaacaaggatacccaggaattgaactcagctctgcaccaagcagacctaatagacatctacagaactctccaccccaaatcaacaaaatatacatttttttcagcaccacaccacacctattccaaaattgaccacatagttggaagtaaagctctcctcagcaaatgtaaaagaacagaaattataacaaactatctctcagaccacagtgcaatcaaactagaactcaggattaagaatctcactcaaagccgctcaactacatggaaactgaacaacctgctcctgaatgactactgggtacataacgaaatgaaggcagaaataaagatgttctttgaaaccaacgagaacaaagacaccacataccagaatctctgggacgcattcaaagcagtgtgtagagggaaatttatagcactaaatgcctacaagagaaagcaggaaagatccaaaattgacaccctaacatcacaattaaaagaactagaaaagcaagagcaaacacattcaaaagctagcagaaggcaagaaataactaaaatcagagcagaactgaaggaaatagagacacaaaaaacccttcaaaaaatcaatgaatccaggagctggttttttgaaaggatcaacaaaattgatagaccgctagcaagactaataaagaaaaaaagagagaagaatcaaatagacacaataaaaaatgataaaggggatatcaccaccgatcccacagaaatacaaactaccatcagagaatactacaaacacctctacgcaaataaactagaaaatctagaagaaatggatacattcctcaacacatacactctcccaagactaaaccaggaagaagttgaatctctgaatagaccaataacaggctctgaaattgtggcaataatcaatagtttaccaaccaaaaagagtccaggaccagatggattcactgccgaattctaccagaggtacaaggaggaactggtaccattccttctgaaactattccaatcaatagaaaaagagggaatcctccctaactcattttatgaggccagcatcattctgataccaaagccgggcagagacacaaccaaaaaagagaattttagaccaatatccttgatgaacattgacgcaaaaatcctcaataaaatactggcaaaccgaatccagcagcacatcaaaaagcttatccaccatgatcaagtgggcttcatccctgggatgcaaggctggttcaatatacacaaatcaataaatgtaatccagcatataaacagagccaaagacaaaaaccacatgattatctcaatagatgcagaaaaagcctttgacaaaattcaacaacccttcatgctaaaaactctcaataaattaggtattgatgggacgtatttcaaaataataagagctatctatgacaaacccacagccaatatcatactgaatgggcaaaaactggaagcattccctttgaaaactggcacaagacagggatgccctatctcaccactcctattcaacatagtgttggaagttctggccagggcaatcaggcaggagaaggaaataaagggtattcaattaggaaaagaggaagtcaaattgtccctgtttgcagacgacatgattgtttatctagaaaaccccatcgtctcagcccaaaatctccttaagctgataagcaacttcagcaaagtctcaggatacaaaatcaatgtacaaaaatcacaagcattcttatacaccaacaacagacaaacagagagccaaatcatgggtgaactcccattcacaattgcttcaaagagaataaaatacctaggaatccaacttacaagggatgtgaaggacctcttcaaggagaactacaaaccactgctcaaggaaataaaagaggacacaaacaaatggaagaacattccatgctcatgggtaggaagaatcaatatcgtgaaaatggccatactgcccaaggtaatttacagattcaatgccatccccatcaagctaccaatgactttcttcacagaattggaaaaaactactttaaagttcatatggaaccaaaaaagagcccgcattgccaagtcaatcctaagccaaaagaacaaagctggaggcatcacactacctgacttcaaactatactacaaggctacagtaaccaaaacagcatggtactggtaccaaaacagagatatagatcaatggaacagaacagagccctcagaaataatgccgcatatctacaactatctgatctttgacaaacctgagaaaaacaagcaatggggaaaggattccctatttaataaatggtgctgggaaaactggctagccatatgtagaaagctgaaactggatcccttccttacaccttatacaaaaatcaattcaagatggattaaagatttaaacgttaaacctaaaaccataaaaaccctagaagaaaacctaggcattaccattcaggacataggcgtgggcaaggacttcatgtccaaaacaccaaaagcaatggcaacaaaagacaaaattgacaaatgggatctaattaaactaaagagcttctgcacagcaaaagaaactaccatcagagtgaacaggcaacctacaacatgggagaaaattttcgcaacctactcatctgacaaagggctaatatccagaatctacaatgaactcaaacaaatttacaagaaaaaaacaaacaaccccatcaaaaagtgggcgaaggacatgaacagacacttctcaaaagaagacatttatgcagccaaaaaacacatgaagaaatgctcatcatcactggccatcagagaaatgcaaatcaaaaccactatgagatatcatctcacaccagttagaatggcaatcattaaaaagtcaggaaacaacaggtgctggagaggatgcggagaaataggaacacttttacactgttggtgggactgtaaactagttcaaccattgtggaagtcagtgtggcgattcctcagggatctagaactagaaataccatttgacccagccatcccattactgggtatatacccaaatgagtataaatcatgctgctataaagacacatgcacacgtatgtttattgcggcactattcacaatagcaaagacttggaaccaacccaaatgtccaacaatgatagactggattaagaaaatgtggcacatatacaccatggaatactatgcagccataaaaaatgatgagttcatatcctttgtagggacatggatgaaattggaaaccatcattctcagtaaactatcgcaagaacaaaaaaccaaacaccgcatattctcactcataggtgggaattgaacaatgagatcacatggacacaggaaggggaatatcacactctggggactgtggtggggtaggaggaggggggagggatagcattgggagatatacctaatgctagatgacacattagtgggtgcagcgcaccagcatggcacatgtatacatatgtaactaacctgcacaatgtgcacatgtaccctaaaacttagagtataataaaaaaaaaaaaa

SEQ ID NO: 633 - DNA, 4109 bp, Homo sapiens
  source 1..4109: mol_type = other DNA
agcaagatgggtgactagagatgcctggtgctcatctcccctacaagaaagaattgaggcaagaaatacacatctaagatttgattagaatatcaaagggatagtcctggagtgcagcaaaggagtggagacacacctgtggtgactggaagttgccacagcatggaagcactcagcctgtgcagccccttctgccccatctggattgaattggcccagagacaggagagacttctcattgcagggtgaaggtaggcagaagatccctgtcaccccactgccatcacaaacacaaagtctttacaacaggagaatctcacagtctttgcaagccctcaggccagtttggagtattgccaagaattgacacagctgcatgtcctggactaggagtacaaggtgaagacttcccacccccagagacttaagctgcagcagcacagcaccatcttgagaccagagtcatctcttgagtgtgccctcctctgggggcagtagccactgtgcctctccagcactggagctttatcttcagtacaccaagcccacatgggtgggttaaagccacaatcccagctgtgtggaggttggtcccaggactggctgtaactcaagtaatgcatgcagggaaatcaacccccaccaccacacttccagacagaggaataatctgcagtcccatccagggtaaattcactcttaagacagccaaaccactacatgccctctcccaagtgggagaggcccctaagcctctgagcagctgatacacccccaggtcaacagagtgactatgagcccatgctcaggacctgagaaacagccttgcaggccccatccaccacagacatgctcctggcctgcccaggagccctctgcctttaataagggcctgagaaacagtcccacaggctgcccccagcaggcacaccaccgagtgggccttgcacctgtctctcagacctgagagacaagcagctgtgtatgcccaagtctcagggccaagaaacaaccctgggagcttactctggccagcagactgtcaggccagctaagcagccacatacctatgtcccagcttgaggaacagccctttaggccacccccgacagaaacactcccaggccaactaagcagctgtgcgaccttgcatgagcctgagaaatagtcctgtatccattcccagcagatgcacctccagaccagccaatcagccatgaatgtccatgtcctggacctaagaaagagctccatgggctactcccagaagacatgcccttaggccagccgagcagcctcgtgtccacatcctggctcatagaagcagtcccctgggcttcccctggcaggcaccacccaggccagctgagcagcagtgtgcccacatcctgagctagaatagctctatggactacccccagcagacacacatccgggacagctgagaagtcatttgactgtatcccaggcctgagaaacccccttcttggccagccctggcaaagatattttcagtccagcttagcagctatgcagctatatatttggcccatgagtttccccccagcagactggccacaggccagatgagcagctgtgtacccacataccaggtatgggaaacagcccttcaggccactcctggagtgcattcttccaggccaggcaaacagctgtgtgcctgcatcctgggcctgagaaactgtcctgcaaagcacatctggcagtcatgccctggttgagcagctgcatccccatgctcctggctagagtgacagcaccatggccagccgcataaagccatactccaagttttctgacccactgtgtgcctgcacacacccctaccctgcgaaacagcccagtgagcccacccctggcaaggctgcaccaccatcactacaaacttccttaacctaggccactgagtaacttgcaaatgttactagtgtggatcacagctgaataaactacatggagactacacttactgcatccatgtagaaccaaggccagtataccccaatgaacagacatccaagacccattcatacaaataaattcatacaagtaaacctactccataaaattggaaaaggtgactttttcaccagatgcatagaaatcaatttagaaacacagcaaccgtgaaaatgcaagaaaacatgtcacctacaaagggaaatagtaattatccagtaatagaacccaatcataaacatatgaaatggcagaaaaaagaataatcttaaggaaactcagtgagatgtaaggtaatacagatagacaagtcaatgaaatcaggaaaacatgatttgaaagagaaatttactaaagatacagatatcataaaaataaccaaacagaagccctaagagctaaacagttcaatggatgaaatgaaaaaatacaatcaatggctttacagacaagaataagcagaagaaataatttctgaacttgaagacaagtcttttgaaataacaggcaggcaaaaaaggataaaaaagaatgaaaaaagcctacaggatttatgggacaccattaatttgatcaaatattcatattatgggcattccagaaggaaaagtgtagagaaaatatgaggaaaacatatttaataaaatagcatgaaacttcctaactcttgagagaaagctagacatctagttccaggaagatcaaagaaccccagatacattcaacccagacattatagtcaaattgtgaaaaatcaaagacaaagatattttaaaatagcaagagaaaagtaacacacttataatggaatccccattagactaacagctgatttcccagcagaaaccttaggctagaagagaatgggatgatatattcgaagttctgaaagaaaaaaaatctttcggccaagaatattatacccagcacagctatccgttacaaatgaagacataaaatctgtcacagataaacaaaaaccaagataattcatcaccactagaccagcgttacaagaaatgcccaagggagttttacatctggaagtaaaaagatgataaccaccatcatgaaaacatgcaaaactttaaaagtcactgttagagtcaatacataaaggagaaagagaaaggaatgaaaccttatcactacagaaaactacccaacttcaaaagtaaacaggaagaaaggaataaaacatatacaaaacaaccagaaaacaataaaacgttggaagtaactcctcacctaccaataataactttgaatgttaatagattaaataccccatgaaggatatagacttactgagtggattaaaaaataagatccaactatattttatctaaaagaaactcactttactggtaaagaaacacatagactgataatgaagggatggaaaaagatattctgtgcaaatggaagccaaaagtgagcaggaatagctatacttgtatcagacaaaacagagttcaagttaaaaaccataaaaattgacaaacaagattattatgtaataataaaggattcagttcagcaagaaatataattgtaatatgtgtataattgtaaatatgtatgcactcaaacaccagatcacctagatatataaagcgaatattactggatctaaagagggagatagaccccattacaataagagttgggcacttcgtatcccactctcagcattggacaaatcatctagacagaaaatcaacaaagaaacatcagacttaaactccaccatagaccaaatggacataaataacaaacatatacagaacatctcacctaacagctgcagaatacacattcttttcttcagcacatgaaacattatccaagatagaccgtatgttaggctacaaaacaagtctcaacaaattctatcaggtatctcatcttaccacgatgaaataaaactagacattcataacaagaggaacattcaaaactatacagacatatggaaattaaacaacatgcccttgagttacaatgagtgaagaaagaaattaagaatgaaatttaagaattccttgaaacaaatgtaactagaaacacaatataccaaaacgggacagagcagaagcagttattaagaagtatgtttttagcttcaa

SEQ ID NO: 634 - DNA, 6030 bp, Homo sapiens
  source 1..6030: mol_type = other DNA
gggggaggagccaagatggccgaataggaacagctccggtctacagctcccagcgtgagcgacgcagaagacgggtgatttctgcatttccatctgaggtaccgggttcatctcactagggagtgccagacagtgggcgcaggccagtgtgtgcgcgcaccgtgcgcgagccgaagcagggcgaggcattgcctcacctgggaagcgcaaggggtcagggagttccctttccgagtcaaagaaaggcgtgacggacgcacctggaaaatcgggtcactcccacccgaatattgcgcttttcagacaggcttaagaaacggcgcaccacgagactatatcccacacctggctcagagggtcctacgcccacggaatctcgctgattgctagcacagcagtctgagatcaaattgcaaggcggcaacgaggctgggggaggggcgcccgccattgcccaggcttgcttaggtaaacaaagcagccgggaagctcgaactgggtggagcccaccacagctcaaggaggcctgcctgcctctgtaggctctacctctgggggcagggcacagacaaacaaaaagacagcagtaacctctgcagacttaagtgtccctgtctgacagctttgaagagagcagtggttctcccagcacgcagctggagatctgagacgggcagactgcctcctcaagtgggtccctgacccctgacccccgagcagcctaactgggaggcaccccccagcaggggcacactgacacctcacacggcagggtattccaacagacctgcagctgagggtcctgtctgttagaaggaaaactaacaaccagaaaggacatctacaccgaaaacccatctgtacatcaccatcatcaaagaccaaaagtagataaaaccacaaagatggggaaaaaacagaacagaaaaactggaaactctaaaacgcagagcgcctctcctcctccaaaggaacgcagttcctcaccagcaacagaacaaagctggatggagaatgattttgacgagctgagagaagaaggcttcagacgatcaaattactctgagctacgggaggacattcaaaccaaaggcaaagaagttgaaaactttgaaaaaaatttagaagaatgtataactagaataaccaatacagagaagtgcttaaaagagctgatggagctgaaaaccaagactcgagaactacgtgaagaatgcagaagcctcaggagccgatgcgatcaactggaagaaagggtatcagcaatggaagatgaaatgaatgaaatgaagcgagaagggaagtttagagaaaaaagaataaaaagaaatgagcaaagcctccaagaaatatgggactatgtgaaaagaccaaatctacgtctgattggtgtacctgaaagtgatgtggagaatggaaccaagttggaaaacactctgcaggatattatccaggagaacttccccaatctagcaaggcaggccaacgttcagattcaggaaatacagagaacgccacaaagatactcctcgagaagagcaactccaagacacataattgtcagattcaccaaagttgaaatgaaggaaaaaatgttaagggcagccagagagaaaggtcgggttaccctcaaaggaaagcccatcagactaacagcggatctctcggcagaaaccctacaagccagaagagagtgggggccaatattcaacattcttaaagaaaagaattttcaacccagaatttcatatccagccaaactaagcttcataagtgaaggagaaataaaatactttatagacaagcaaatgctgagagattttgtcaccaccaggcctgccctaaaagagctcctgaaggaagcgctaaacatggaaaggaacaaccggtaccagccgctgcaaaatcatgccaaaatgtaaagaccatcgagactaggaagaaactgcatcaactaatgagcaaaatcaccagctaacatcataatgacaggatcaaattcacacataacaatattaactttaaatataaatggactaaattctgcaattaaaagacacagactggcaagttggataaagagtcaagacccatcagtgtgctgtattcaggaaacccatctcacgtgcagagacacacatagtctcaaaataaaaggatggaggaagatctaccaagccaatggaaaacaaaaaaaggcaggggttgcaatcctagtctctgataaaacagactttaaaccaacaaagatcaaaagagacaaagaaggccattacataatggtaaagggatcaattcaacaagaggagctaacgatcctaaatatttatgcacccaatacaggagcacccagattcataaagcaagtcctcagtgacctacaaagagacttagactcccacacattaataatgggagactttaacaccccactgtcaacattagacagatcaacgagacagaaagtcaacaaggatacccaggaattgaactcagctctgcaccaagcagacctaatagacatctacagaactctccaccccaaatcaacagaatatacatttttttcagcaccacaccacacctattccaaaattgaccacatagttggaagtaaagctctcctcagcaaatgtaaaagaacagaaattataacaaactatctctcagaccacagtgcaatcaaactagaactcaggattaagaatctcactcaaagccgctcaactacatggaaactgaacaacctgctcctgaatgactactgggtacataacgaaatgaaggcagaaataaagatgttctttgaaaccaacgagaacaaagacaccacataccagaatctctgggatgcattcaaagcagtgtgtagagggaaatttatagcactaaatgcccacaagagaaagcaggaaagatccaaaattgacaccctaacatcacaattaaaagaactagaaaagcaagagcaaacacattcaaaagctagcagaaggcaagaaataactaaaatcagagcagaactgaaggaaatagagacacaaaaaacccttcaaaaaatcaatgaatccaggagctggttttttgaaagaatcaacaaaattgatagaccgctagcaagactaataaagaaaaaaagagagaagaatcaaatagacacaataaaaaatgataaaggggatatcaccaccgatgccacagaaatacaaactaccatcagagaatactacaaacacctctacgcaaataaactagaaaatctagaagaaatggatacattcctcgacacatgcactctcccaagactaaaccaggaagaagttgaatctctgaatagaccaataacaggctctgaaattgtggcaataatcaatagtttaccaaccaaaaagagtccaggaccagatggattcacagccgaattctaccagaggtacaaggaggaactggtaccattccttctgaaactattccaatcaatagaaaaagagggaatcctccctaactcattttatgaggccagcatcattctgataccaaagccgggcagagacacaaccaaaaaagagaattttagaccaatatccttgatgaacattgatgcaaaaatcctcaataaaatactggcaaaccgaatccagcagcacatcaaaaagcttatccaccatgatcaagtgggcttcatccctgggatgcaaggctggttcaatatacgcaaatcaataaatgtaatccagcatataaacagagccaaagacaaaaaccacatgattatctcaatagatgcagaaaaagcctttgacaaaattcaacaacccttcatgctaaaaactctcaataaattaggtattgatgggacgtatttcaaaataataagagctatctatgacaaacccacagccaatatcatactgaatgggcaaaaactggaagcattccctttgaaaactggcacaagacagggatgccctctctcaccgctcctattcaacatagtgttggaagttctggccagggcaatcaggcaggagaaggaaataaagggtattcaattaggaaaagaggaagtcaaattgtccctgtttgcagacgacatgattgtttatctagaaaaccccatcgtctcagcccaaaatctccttaagctgataagcaacttcagcaaagtctcaggatacaaaatcaatgtacaaaaatcacaagcattcttatacaccaacaacagacaaacagagagccaaatcatgggtgaactcccattcacaattgcttcaaagagaataaaatacctaggaatccaacttacaagggatgtgaaggacctcttcaaggagaactacaaaccactgctcaacgaaataaaggaggatacaaacaaatggaagaacattccatgctcatgggtaggaagaatcaatatcgtgaaaatggccatactgcccaaggtaatttacagattcaatgccatccccatcaagctaccaatgactttcttcacagaattggaaaaaactactttaaagttcatatggaaccaaaaaagagcccgcattgccaagtcaatcctaagccaaaagaacaaagctggaggcatcacactacctgacttcaaactatactacctagctacagtaaccaaaacagcatggtactggtaccaaaacagagatatagatcaatggaacagaacagagccctcagaaataatgccgcatatctacaactatctgatctttgacaaacctgagaaaaacaagcaatggggaaaggattccctatttaataaatggtgctgggaaaactggctagccatatgtagaaagctgaaactggatcccttccttacaccttatacaaaaatcaattcaagatggattaaagatttaaacgttaaacctaaaaccataaaaaccctagaagaaaacctaggcattaccattcaggacataggcgtgggcaaggacttcatgtccaaaacaccaaaagcaatggcaacaaaagacaaaattgacaaatgggatctaattaaactaaagagtttctgcacagcaaaagaaactaccatcagagtgaacaggcaacctacaacatgggagaaaattttcgcaacctactcatctgacaaagggctaatatccagaatctacaatgaactcaaacaaatttacaagaaaaaaacaaacaaccccatcaaaaagtgggcgaaggacatgaacagacacttctcaaaagaagacatttatgcagccaaaaaacacatgaagaaatgctcatcatcactggccatcagagaaatgcaaatcaaaaccactatgagatatcatctcacaccagttagaatggcaatcattaaaaagtcaggaaacaacaggtgctggagaggatgcggagaaataggaacacttttacactgttggtgggactgtaaactagttcaaccattgtggaagtcagtgtggcgattcctcagggatctagaactagaaataccatttgacccagccatcccattactgggtatatacccaaatgagtataaatcatgctgctataaagacacatccacacgtatgtttattgcagcactattcacaatagcaaagacttggaaccaacccaaatgtccaacaatgatagactggattaagaaaatgtggcacatatacaccatggaatactatgcagccataaaaaatgatgagttcatatcctttgtagggacatggatgaaattggaaaccatcattctcagtaaactatcgcaagaacaaaaaaccaaacaccgcatattctcactcataggtgggaattgaacaatgagatcacatggacacaggaaggggaatatcacactctggggactgtggtggggtcgggggaggggggagggatagcattgggagatatacctaatgctagatgacacattagtgggtgcagcgcaccagcatggcacatgtatacatatgtaactaacctgcacaatgtgcacatgtaccctaaaacttagagtataataaaaaaaaaaaa

SEQ ID NO: 635 - DNA, 164 bp, Homo sapiens
  source 1..164: mol_type = other DNA
aacctaagagcattatctgctagacacccctcctcctccaccctccatgtccaagctatcaccaaggtcctagcaatcttacctcctaaatgtctcccaaatccacttctctcccttcactgtccaggccaccagcatgacttctgcatgtgtgtagcagcctc

SEQ ID NO: 636 - DNA, 6024 bp, Homo sapiens
  source 1..6024: mol_type = other DNA
agccaagatggccgaataggaacagctccggtctacagctcccagcgtgagcgacgcagaagacgggtgatttctgcatttccatctgaggtaccgggttcatctcactagggagtgccagacagtgggcgcaggccagtgtgtgtgcgcaccgtgcgcgagccgaagcagggcgaggcattgcctcacctgggaagcgcaagggatcagggagttccctttccgagtcaaagaaaggggtgacggacgcacctggaaaatcgggtcactcccacccgaatattgcgcttttcagaccggcttaagaaacggcgcaccacgagactatatcccacacctggctcagagggtcctacgcccacggaatctcgctgattgctagcacagcagtctgagatcaaactgcaaggcggcaacgaggctgggggaggggcgcccgccattgcccaggcttgcttaggtaaacaaagcagccgggaagctcgaactgggtggagcccaccacagctcaaggaggcctgcctgcctttgtaggctccacctctgggggcagggcacagacaaacaaaaagacagcagtaacctctgcagacttaactgtccctgtctgacagctttgaagaaagcagtggttctcccagcacgcagctggagatctgagaacgggcagactgcctcctcaagtgggttcctgacccctgacccgcgagcagcctaactgggaggcaccccccagcaggggcacactgacacctcacacagcagggtattccaacagacctgcagctgagggtcctgtctgttagaaggaaaactaacaaccagaaaggacatctacaccgaaaacccatctgtacatcaccatcatcaaagaccaaaagtagataaaaccacaaagatggggaaaaaacagaacagaaaaactggaaactctaaaacgcagagcgcctctcctcctccaaaggaacgcagttcctcaccagcaacagaacaaagctggatggagaatgattctgacgagctgagagaagaaggcttcagacgatcaaattactctgagctacgggaggacattcaaaccaaaggcaaagaagttgaaaactttgaaaaaaatttagaagaatgtataactagaataaccaatacagagaagtgcttaaaggagctgatggagctgaaaaccaaggctcgagaactacgtgaagaatgcagaagcctcaggagccgatgcgatcaactggaagaaagggtatcagcaatagaagatgaaatgaatgaaatgaagcgagaagggaagtttagagaaaaaagaataaaaagaaatgagcaaagcctccaagaaatatgggactatgtgaaaagaccaaatctacgtctgattggtgtacctgaaagtgatgtggagaatggaaccaagttggaaaacactctgcaggatattatccaggagaacttccccaatctagcaaggcaggccaacgttcagattcaggaaatacagagaacgccacaaagatactcctcgagaagagcaactccaagacacataattgtcagattcaccaaagttgaaatgaaggaaaaaatgttaagggcagccagagaggaaggttgggttaccctcaaaggaaagcccatcagactaacagcggatctctcagcagaaaccctacaagccagaagagagtgggggccaatattcaacattcttaaagaaaagaattttcaacccagaatttcatatccagccaaactaagcttcataagtgaaggagaaataaaatactttatagacaagcaaatgctgagagattttgtcaccaccaggcctgccctaaaagagctcctgaaggaagcgctaaacatggaaaggaacaaccggtaccagccgctgcaaaatcatgccaaaatgtaaagaccatcgagactaggaagaaactgcatcaactaatgagcaaaatcaccaggtaacatcataatgacaggatcaaattcacacataacaatattaactttaaatataaatggactaaattctgcaattaaaagacacagactggcaagttggataaagagtcaagacccatcagtgtgctgtattcaggaaacccatctcacgtgcagagacacacataggctcaaaataaaaggatggaggaagatctaccaagccaatggaaaacaaaaaaaggcaggggttgcaatcctagtctctgataaaacagactttaaaccaacaaagatcaaaagagacaaagaaggccattacataatggtaaagggatcaattcaacaagaggagctaactatcctaaatatttatgcacccaatacaggagcacccagattcataaagcaagtcctgagtgacctacaaagagacttagactcccacacattaataatgggagactttaacaccccactgtcaacattagacagatcaacgagacagaaagtcaacaaggatacccaggaattgaactcagctctgcaccaagcagacctaatagacatctacagaactctccaccccaaatcaacagaatatacatttttttcagcaccacaccacacctattccaaaattgaccacatagttggaagtaaagctctcctcagcaaatgtaaaagaacagacattataacaaactatctctcagaccacagtgcaatcaaactagaactcaggattaagaatctcactcaaagccgctcaactacatggaaactgaacaacctgctcctgaatgactactgggtacataacgaaatgaaggcagaaataaagatgttctttgaaaccaacgagaacaaagacaccacataccagaatctctgggacgcattcaaagcagtgtgtagagggaaatttatagcactaaatgcctacaagagaaagcaggaaagatccaaaattgacaccctaacatcacaattaaaagaactagaaaagcaagagcaaacacattcaaaagctagcagaaggcaagaaataactaaaatcagagcagaactgaaggaaatagagacacaaaaaacccttcaaaaaatcaatgaatccaggagctggttttttgaaaggatcaacaaaattgatagaccgctagcaagcctaataaagaaaaaaagagagaagaatcaaatagacacaataaaaaatgataaaggggatatcaccaccgatcccacagaaatacaaactaccatcagagaatactacaaacacctctacgcaaataaactagaaaatctagaagaaatggatacattcctcgacacatacactctcccaagactaaaccaggaagaagttgaatctctgaatagaccaataacaggctctgaaattgtggcaataatcaatagtttaccaaccaaaaagagtccaggaccagatggattcacagccgaattctaccagaggtacaaggaggaactggtaccattccttctgaaactattccaatcaatagaaaaagagggaatcctccctaactcattttatgaggccagcatcattctgataccaaagccgggcagagacacaaccaaaaaagagaattttagaccaatatccttgatgaacattgatgcaaaaatcctcaataaaatactggcaagccgaatccagcagcacatcaaaaagcttatccaccatgatcaagtgggcttcatccctgggatgcaaggctggttcaatatacgcaaatcaataaatgtaatccagcatataaacagagccaaagacaaaaaccacatgattatctcaatagatgcagaaaaagcctttgacaaaattcaacaacccttcatgctaaaaactctcaataaattaggtattgatgggacgtatttcaaaataataagagctatctatgacaaacccacagccaatatcatactgaatgggcaaaaactggaagcattccctttgaaaactggcacaagacagggatgccctctctcaccactcctattcaacatagtgttggaagttctggccagggcaattaggcaggagaaggaaataaagggtattcaattaggaaaagaggaagtcaaattgtccctgtttgcagacgacatgattgtgtatctagaaaaccccatcgtctcagcccaaaatctccttaagctgataagcaacttcagcaaagtctcaggatacaaaatcaatgtacaaaaatcacaagcattcttatacaccaacaacagacaaacagagagccaaatcatgagtgaactcccattcacaattgcttcaaagagaataaaatacctaggaatccaacttacaagggatgtgaaggacctcttcaaggagaactacaaaccactgctcaaggaaataaaagaggacacaaacaaatggaagaacattccatgctcatgggtaggaagaatcaatatcgtgaaaatggccatactgcccaaggtaatttacagattcaatgccatccccatcaagctaccaatgactttcttcacagaattggaaaaaactactttaaagttcatatggaaccaaaaaagagcccgcatcgccaagtaaatcctaagccaaaagaacaaagctggaggcatcacactacctgacttcaaactatactacaaggctacagtaaccaaaacagcatggtactggtaccaaaacagagatatagatcaatggaacagaacagagccctcagaaataatgccgcatatctacaactttctgatctttgacaaacctgagaaaaacaagcaatggggaaaggattccctatttaataaatggtgctgggaaaactggctagccatatgtagaaagctgaaactggatcccttccttacaccttatacaaaaatcatttcaagatggattaaagatttaaacgttagacctaaaaccataaaaaccctagaagaaaacctaggcattaccattcaggacataggcgtgggcaaggacttcatgtccaaaacaccaaaagcaatggcaacaaaagccaaaattgacaaatgggatctaattaaactaaagagcttctgcacagcaaaagaaactaccatcagagtgaacaggcaacctacaacatgggagaaaattttcacaacctactcatctgacaaagggctaatatccagaatctacaatgaactcaaacaaatttacaagaaaaaaacaaacaaccccatcaaaaagtgggcaaaggacatgaacagacacttctcaaaagaagacatttatgcagccaaaaaacacatgaagaaatgctcatcatcactggccatcagagaaatgcaactcaaaaccacagtgagatatcatctcacaccagttagaatggcaatcattaaaaagtcaggaaacaacaggtgctggagaggatgtggagaaataggaacacttttacactgttggtgggactgtaaactagttcaaccattgtggaagtcagtgtggcgattcctcagggatctagaactagaaataccatttgacccagccatcccattactgggtatatacccaaaggactataaatcatgctgctataaagacacatgcacacgtatgtttattgcggcactattcacaatagcaaagacttggaaccaacccaaatgtccaacaatgatagactggattaagaaaatgtggcacatatacaccatggaatactatgcagccataaaaaatgatgagttcatgtcctttgtagggacatggatgaaattggaaaccatcattctcagtaaactatcgcaagaacaaaaaaccaaacaccgcatattctcactcataggtgggaattgaacaatgagatcacgtggacacaggaaggggaatatcacactctggggactgtggtggggtcgggggatgggggagggatagcattgggagatatacctaatgctagatgacacgttagtgggtgcagcgcaccagcatggcacatgtatacatatgtaactaacctgcacaatgtgcacatgtaccctaaaacttagagtataataaaaaaaaaaaaa

SEQ ID NO: 637 - DNA, 2187 bp, Homo sapiens
  source 1..2187: mol_type = other DNA
aagatttcagaggcacccttaacccccagcctgactgatgggtgaggatcttccccagtaaaagcaagtctatagagactgggtaagatggctgtcttttcaaatgtgtggacccaaataaaaagttgtaagacacacagagaaacaagaaaacatggcccaaggaaagaaacaatataaatcttcagaaattaataatttaaaaatggaagtatatgaatcacctgacaaagaattcaaaataagcatcatgaaaatgttctatgagttcaaaataataatgatgaacaaaatgagaatgttgacaaagagatagaaatatatatatttgaaaaccaaacaaattttggagctggagaatgctctgaactgaaatattcattagagatagtcaatagtagatttgaccaggcagaagaaagaatccatgaactcaaagacaggttatttgaaaagatctagtcagaagaacaaaaagaaaacaaggaactaaaaaagtaaagaaaacctaaggcacttatgggacttcatcaagcaatataggcattatggaaattccagaaggaggagagaaggaagcaaaaagcttgttaaaagaaataatgaatgaaaactccccaagtctggaggaaaaaatcagcatccagattcaagaagcccaatgaacttcaactaagataaattcaaagaaattcacactgcagtattttacaaacaaaaattcacaccaaggcattttataagcaaattgccaaaagtcagaaacagataaaattttgaaaggagcaagagaaatgcaatatatcacatacaagggagtaatcataagattattagcagatttcttgacaataaccttgcaagctagaagagtgtgagatgacctatgtgaagtactaacagaaaaaaatcctatcagtaaagaatactatattcagcagaaatattccttaaaaattaaacagaaataaggacattgcatataaacaaaaattaagggagttcagcagtgctagacctaccttataagaaagctaaaaacttcaaattagttgaagtttaagtaagagaatgccatatgacaacatcaaagcatatgaaagtataaagctcactggtaagggtaaatatattaataaatacagaatactgtaatactgcaatggcagtacataaatcactttttattctgatagaagttaaaatgtataagaataattataattataaaaatacattaatgaataatgctataaaaggatataatttgtggcatcaataacatgcgtatgtgtggaggggagaaatgaaagtatggagaatttgtatgcaatagaattgtcagcttaaaatagattgttataagatgctttttgtaggcacaaagaaaatatctctagaagatacacaaaggaaaatgagaaaagaatcaatgcatgtcactacaagatcaatgaaacataaaggaaaacaacaagaagaaatgaaggataaaagagctacaaggcagaaaacaatgggcaaaatggtgatagttcattatcaataattacttgaaagttaattaattaaattcaccactcaaaaaatatagaatgactgaatggatagaaaaatgagatctaactatatgctatcaacaaaacatttactttagatttaaggacacatacaggctgaaagtgaaaggatggaaaaagatattccatgaaaatagtaactgaaagagagcaggagtggccatatttatattagtcaaaatagactttaaatcaaaaactgtcaaaagagacaaagaagaacattatataatgataaaactgtcaattcaccaggaagatataacaattaatatatatatatatatgcacccaacatcagagaacccaaaaatatgaagcaaatattgatagaacaaaagggagaaatagacagcaatgcagtaatagtagggcatttcaatactccacttaaaataatggatagaacatccatatacaagatgaataagaaaacagaggatttgaaagacactattgcccaaatggacctaacagacatatacagaataccccacccaacagcaacagaatacacattcttttcaagtgcacatgaaccattgtccaggataaatcccataatatgtcacaaacaagccttcacaaattgaagaatattgaactc

SEQ ID NO: 638 - DNA, 6040 bp, Homo sapiens
  source 1..6040: mol_type = other DNA
gagggaagagccaagatggctgaacaggaacagctccggtctacagctcccagcgtgagcgaagcagaagacggatgatttctgcatttccatctgaggtactgggttcatctcactagggagtgtcagacagtgggcgcaggtcagtgggtgcgcgcaccgtgcgcgagccaaagcagggcgaggcattgcctcacttgggaagtgcaaggggtcagggagttccctttccaagtcaaagaaaggggtgacggactcacctggaaaatcgggtcactcccacccgaatactgcgcttttcggaccggcttaaaaaacggcacaccacgagattatatcccgcacctggctcagagggtcctacccccaaggagtctcgctgattgctagcatagcagtctgagatcaaactgcaaggcggcagcgaggctccgggaggggcgcctgccattgcccaggcttgcttaggtaaacaaagcagccgggaagctccaactgggtggagcccaccacagctcaaggaggcctgcctgcctctgtaggctccacctctgggggcagggcacagacaaacaaaaagacagcagtaaactctgcaaacttaaatgtccctgtctgacagctctgaagagagcagtggttctcccagcacgcagctggagatctgagaacagcagacagcctcctcaagtgggtccctgacccctgacccccgagcagcctaactgggaggcaccccccagcaggggcacactgacacctcacacggcagggtattccaacagacctgcagctgagggtcctgtccgttagaaggaaaactaacaaatagaaaggacatccacacgaaaaacccatctgtacatcaccatcatcaaagaccaaaagtagataaaaccacaaagatggggaaaaaacagaacagaaaaacgggaaactctaaaaagcagagcgcttctcctcctccaaaggaatgcagttcctcaccagcaacggaacaaagctagacggagaatgactttgatgagctgagagaagaaggcttcagacaatcaaattactctgagctacgggaggacattcaaaccaaaggcaaagaagtttaaaactttgaaaaaaatttagaagaatgtataactagaataaccaatacagagaagtgcttaaaggagctgatggagctgaaaaccaaggctcaagaactacgtgaagaatgcagaagcctcaggagctgatgcgatcaactggaagaaagggtatcagtgatggaagatgaaatgaatgaaatgaagcgagaagggaagtttagagaaaaaagaataaaaagaaatgagcaaagcctccaagaaatatgggactatgtgaaaagaccaaatctacgtctgattggtgtacctgaaagtgatggggagaatggaaccaagttggaaaacactctgcaggatattatccaggagaacttccccaatctagcaaggcaggccaacgttcagattcaggaaatacagagaacgccacaaagatactcctcgagaagagcaactccaagacacataattgtcagattcaccaaagttgaaatgaaaaaatgttaagggcagccaaagagaaaggtcgggttaccctcaaagggaagcccatcagactaacagctgatctctcggcagaaaccctacaagccagaagagagtggggaccaatattcaacattcttaaagaaaagaattttcaacccagaatttcatatccagccaaactaagcttcataagtgaaggagaaataaaatcctttacagacaagaaaatgctgagagattttgtcaccaccaggcctgccctaaaagagctcctgaaggaagcgctaaacatggaaaggaacaaccgggaccagccgctgcaaaatcatgccaaaatgtaaagaccatcgagactaggaagaaactgcatcaactaacgagcaaaatcaccagctaacatcataatgacaggatcaaattcacacataaccatattaactttaaatgtaaatggactaaatgctccaattaaaagacacagactggcaaattggataaagagtcaagacccatcagtgtgctgtattcaggaaacccaactcatgtgcagagacacacataggcacaaaataaaaggatggaggaagatctaccaagcaaatggaaaacagaaaaaggcaggggttgcaatcctagtctctgataaaacagactttaaaccaacaaagatcaaaagagacaaagaaggccattacataatggtaaagggatcaattcaacaagaagagctaactattctaaatatatatgcacccaatacagtagcacccagattcataaagcaagtcctgagtgacctacaaagagacttagactcccacacattaataatgggagactttaacaccccactgtcaacattagacagatcaacgagacagaaagtcaacaaggatacccaggaattgaactcagctctgcaccaagcagacctaatagacatctacagaactctccaccccaaatcaacagaatatacatttttttcagcaccacagcacacctattccaaaattgaccacatacttggaagtaaagctctcctcagcaaatgtaaaagaacagagattataacaaactatctctcagaccacagtgcaatcaaactagaactcagaattaagaatctcactcaaaactgctcagctacatggaaactgaacaacctgctcctgaatgactactggatacataacgaaatgaaggcagaaataaagatgttctttgaaaccaacgagaacaaagacacaacataccagaatctctgggacacattcaaagcagtgtgtagagggaaatttatagcactaaatgccgccaagagaaagcaggaaagatccaaaattgacaccctaacatcacaattaaaagaactagaaaagcaagcgcaaacacattcaagagctagcagaaggcaagaaataactaaaatcagagcagaactgaaggaaatagagaccaaaaaaacccttcaaaaaattaatgaatccaggagctggttttttgaaaggatcaacaaaattgatagaccgctagcaagactaataaagaaaaaaagagagaagaatcaaatagacacaataaaaaatgataaaggggatatcaccactgatcccacagaaatacaaactaccatcagagaatactacaaacacctctacgcaaataaactagaaaatctagaagaaatggataaattcctcaacacatacactctcccaagactaaaccaggaagaagttgaatctctgaatagaccaataacaggagctgaaattgtggcaataatcaatagtttaccaaccaaaaagagtccagggccagatgcattcacagccgaattctaccagaggtacaaggaggaactggtaccattccttctgaaactattccaatcaatagaaaaagagggaatcctccctaactcattttatgaggccagcatcattctgataccaaagccaggcagagacacaacaaaaaaagagaattttagaccaatatccttgatgaacattgatgcaaaaatcctcaataaaatactggcaaaacgaatccagcagcacatcaaaaagcttatccaccatgatcaagtgggcttcatccctgggatgcaaggctggttcaatatatgcaaatcaataaatgtaatccagcatataaacagagccaaagacaaaaaccacatgattatctcaatagatgcagaaaaggcctttgacaaaattcaacaacccttcatgctaaaaactctcaataaattaggtattgatgggacgtatttcaaaataataagagctatctatgacaaacccacagccaatatcatactaaatgggcaaaaactggaagcattccctttgaaaactggcacaagacagggatgccctctctcaccactcctattcaacatagtgttggaagttctggccagggcaattaggcaggagaaggaaataaagggtattcaattaggaaaagaggaagtcaaattgtccctgtttgcagacgacatgattgtatatctagaaaaccccatcgtctcagcccaaaatctccttaagctgataagcaacttcagcaaagtctcaggatacaaaatcaacgtacaaaaatcacaagcattcttatacaccaacaacagacaaacagagagccaaatcatgagtgaactcccattcacaattgcttcaaagagaatgaaatacctaggaatccaacttacaagggatgtgaaggacctcttcaaggagaactacaaaccactgctcaacgaaataaaagaggatacaaacaaatggaagaacattccatgctcatgggtaggaagaatcaatatcgtgaaaatggccatactgcccaaggtaatttacagattcaatgccatccccataaagctaccaatgactttcttcacagaattggaaaaaactactttaaagttcatatggaaccaaaaaagagccctcatcgccaaggcaatcctaagccaaaagaacaaagctggaggcatcacactacctgacttcaaactatactacaaggctacagtaaccaaaacagcatggtactggtaccaaaacagagagatagatcaatggaacagaacagagccctcagaaataacgctgcatatctacaactatctgatctttgacaaacctgagaaaaacaagcaatggggaaaggattccctaattaataaatggtgctgggaaaactggctagccatatggagaaagatgaaactggatcccttccttacaccttatacaaaaatcaattcaagatggattaaagacttaaatgttagacctaaaaccataaaaaccctagaagaaaacctaggcaataccattcaggacataggcatgggcaaggacttcatgtctaaaacaccaaaagcaatggcaataaaagacaaaattgacaaatggggtttaattaaactaaagagcttctgcacagcaaaagaaactaccatcagagtgaacaggcaacctacaaaatgggagaaagttttcgcaacctactcatctgacaaagggctaatatccagaatctacaatgaactcaaacaaatttacaagaaaaaaacaaacaaccccatcaaaaagtgggcgaaggacatgaacagacacttctcaaaagaagacatttatgcagccaaaaaacacatgaaaaaatgctcatcatcactggctatcagagaaatgcaaatcaaaaccactatgagatactatctcacaccagttagaatggcaatcattaaaaagtcaggaaacaacaggtggtggagaggatgtggagaaataggaacacttttacactgttggtgggactgtaaactagttcaaccattgttgaagtcagcgtggcgattcctcagggatctagaactagaaataccatttgacccagccatcccattactgggtatatacccaagggagtctaaatcatgctgctataaagacacatgcacacgtatgtttattgcggcattattcacaatagcaaagagttggaaccaacgcaaatgtccaacaataatagactggattaagaaaatgtggcacatatacaccatggaatactatgcagccataaaaaatgatgagttcatgtcctttgtagggacatggatgaaattggaaatcatcattctcagtaaactatcgcaagaacaaaaaaaccaaacaccgcatattctcactcataggtgggaattgaacaatgagatcacatggacacaggaaggggaatatcacactctggggactgtggtggggtggggggtggggggagggatagcattgggagatatacctaatgctagatgacgagttagtgggtgcagcgcaccagcatgtcacatgtatacatatgtaactaacctgcacaatgtgcacatgtaccctaaaacttaaagtataataaaaaaataaaaaataaataaataa

SEQ ID NO: 639 - DNA, 6026 bp, Homo sapiens
  source 1..6026: mol_type = other DNA
gaggagccaagatggccgaataggaacagctccggtctacagctcccagcgtgagcgacgcagaagacggtgatttctgcatttccatctgaggtactgggttcatctcactagggagtgccagacagtgggcgcaggccagtgtgtgtgcgcaccgtgcgcgagccgaagcagggcgaggcattgcctcaactgggaagcgcaaggggtcagggagttccctttccgagtcaaagaaaggggtgacggacgcacctggaaaatcgggtcactcccacccgaatattgcgcttttcagaccggattaagaaacggcgcaccacgagactatatcccacacctggctcggagggtcctacgcccacggaatctcgctgattgctagcacagcagtctgagatcaaactgcaaggcggcaacgaggctgggggaggggcgcccgccattgcccaggcttgcttaggtaaacaaagcagccgggaagctcgaactgggtggagcccaccacagctcaaggaggcctgcctgcctctgtaggctccacctctgggggcagggcacagacaaacaaaaagacagcagtaacctctgcagacttaagtgtccctgtctgacagctttgaagagagcagtggttctcccagcacgcagctggagatctgagaacgggcagactgcctcctcaagtgggtccctgactcctgacccccgagcagcctaactgggaggcaccccccagcaggggcacactgacacctcacacggcagggtattccaacagacctgcagctgagggtcctgtctgttagaaggaaaactaacaaccagaaaggacatctacaccgaaaacccatctgtacatcaccatcatcaaagaccaaaagtagataaaaccacaaagatggggaaaaaacagaacagaaaaactggaaactctaaaacgcagagcgcctctcctcctccaaaggaacgcagttcctcaccagcaacagaacaaagctggatggagaatgattttgacgagctgagagaagaaggcttcagacgatcaaattactctgagctacgggaggacattcaaaccaaaggcaaagaagttgaaaactttgaaaaaaatttagaagaatgtataactagaataaccaatacagagaagtgcttaaaggagctgatggagctgaaaaccaaggctcaagaactacgtgaagaatgcagaagcctcaggagccgatgcgatcaactggaagaaagggtatcagcaatggaagatgaaatgaatgaaatgaagcgagaagggaagtttagagaaaaaagaataaaaagaaatgagcaaagcctccaagaaatatgggactatgtgaaaagaccaaatctacgtctgattggtgtacctgaaagtgatgtggagaatggaaccaagttggaaaacactctgcaggatattatccaggagaacttccccaatctagcaaggcaggccaacgttcagattcaggaaatacagagaacgccacaaagatactcctcgagaagagcaactccaagacacataattgtcagattcaccaaagttgaaatgaaggaaaaaatgttaagggcagccagagagaaaggtcgggttaccctcaaaggaaagcccatcagactaacagcggatctcttggcagaaaccctacaagccagaagagagtgggggccaatattcaacattcttaaagaaaagaattttcaacccagaatttcatatccagccaaactaagcttcataagtgaaggagaaataaaatactttatagacaagcaaatgttgagagattttgtcaccaccaggcctgccctaaaagagctcctgaaggaagcgctaaacatggaaaggaacaaccggtaccagccgctgcaaaatcatgccaaaatgtaaagaccatcgagactaggaagaaactgcatcaactaatgagcaaaatcaccagctaacatcataatgacaggatcaaattcacacataacaatattaactttaaatataaatggactaaattctgcaattaaaagacacagactggcaagttggataaagagtcaagacccatcagtgtgctgtattcaggaaacccatctcacgtgcagagacacacataggctcaaaataaaaggatggaggaagatctaccaagccaatggaaaacaaaaaaaggcaggggttgcaatcctagtctctgataaaacagactttaaaccaacaaagatcaaaagagacaaagaaggccattacataatggtaaagggatcaattcaacaagaggagctaactatcctaaatatttatgcacccaatacaggagcacccagattcataaagcaagtcctgagtgacctacaaagagacttagactcccacacattaataatgggagactttaacaccccactgtcaacattagacagatcaacgagacagaaagtcaacaaggatacccaggaattgaactcagctctgcaccaagcagacctaatagacatctacagaactctccaccccaaatcaacagaatatacatttttttcagcaccacaccacacctattccaaaattgaccacatagttggaagtaaagctctcctcagcaaatgtaaaagaacagaaattataacaaactatctctcagaccacagtgcaatcaaactagaactcaggattaagaatctcactgaaagccgctcaactacctggaaactgaacaacctgctcctgaatgactactgggtacataacgaaatgaaggcagaaataaagatgttctttgaaaccaacgagaacaaagacaccacataccagaatctctgggacgcattcaaagcagtgtgtagagggaaatttatagcactaaatgcctacaagagaaagcaggaaagatccaaaattgacaccctaacatcacaattaaaagaactagaaaagcaagagcaaacacattcaaaagctagcagaaggcaagaaataactaaaatcagagcagaactgaaggaaatagagacacaaaaaacccttcaaaaaatcaatgaatccaggagctggttttttgaaaggatcaacaaaattgatagaccgctagcaagactaataaagaaaaaaagagagaagaatcaaatagacacaataaaaaatgataaaggggatatcaccaccgatcccacagaaatacaaactaccatcagagaatactacaaacacctctacgcaaataaactagaaaatctagaagaaatggatacattcctcgacacatacactctcccaagactaaaccaggaagaagttgaatctctgaatagaccaataacaggctctgaaattgtggcaataatcaatagtttaccaaccaaaaagagtccaggaccagatggattcacagccgaattctaccagaggtacatggaggaactggtaccattccttctgaaactattccaatcaatagaaaaagagggaatcctccctaactcattttatgaggccagcatcattctgataccaaagccgggcagagacacaaccaaaaaagagaattttagaccaatatccttgatgaacattgatgcaaaaatcctcaataaaatactggcaaaccgaatccagcagcacatcaaaaagcttatccaccatgatcaagtgggcttcatccctgggatgcaaggctggttcaatatacgcaaatcaataaatgtaatccagcatataaacagaaccaaagacaaaaaccacatgattatctcaatagatgcagaaaaggcctttgaaaaaattcaacaacccttcatgctaaaaactctcaataaattaggtattgatgggacgtatttcaaaataataagagctatctatgacaaacccacagccaatatcatactgaatgggcaaaaactggaagcattccctttgaaaaccggcacaagacagggatgccctctctcaccgctcctattcaacatagtgttggaagttctggccagggcaatcaggcaggagaaggaaataaagggtattcaattaggaaaagaggaagtcaaattgtccctgtttgcagacgacatgattgtttatctagaaaaccccattgtctcagcccaaaatctccttaagctgataagcaacttcagcaaagtctcaggatacaaaatcagtgtacaaaaatcacaagcattcttatacaccaacaacagacaaacagagagccaaatcatgggtgaactcccattcacaattgcttcaaagagaataaaatacctaggaatccaacttacaagggatgtgaaggacctcttcaaggagaactacaaaccactgctcaaggaaataaaagaggagacaaacaaatggaagaacattccatgctcatgggtaggaagaatcaatatcgtgaaaatggccatactgcccaaggtaatttacagattcactgccatccccatcaagctaccaatgactttcttcacagaattggaaaaaactactttaaagttcatatggaaccaaaaaagagcccgcattgccaagtcaatcctaagccaaaagaacaaagctggaggcatcacactacctgacttcaaactatactacaaggctacagtaaccaaaacagcatggtactggtaccaaaacagagatatagatcaatggaacagaacagagccctcagaaataatgccgcatatctacaactatctgatctttgacaaacctgagaaaaacaagcaatggggaaaggattccctatttaataaatggtgctgggaaaactggctagccatatgtagaaagctgaaactggatcccttccttacaccttatacaaaaatcaattcaagatggattaaagatttaaacgttaaacctaaaaccataaaaaccctagaagaaaacctaggcattaccattcaggacataggcgtgggcaaggacttcatgtccaaaacaccaaaagcaatggcaacaaaagacaaaattgacaaatgggatctaattaaactaaagagcttctgcacagcaaaagaaactaccatcagagtgaacaggcaacctacaacatgggagaaaattttcgcaacctactcatctgacaaagggctaatatccagaatctacaatgaactcaaacaaatttacaagaaaaaaacaaacaaccccatcaaaaagtgggcgaaggacatgaacagacacttctcaaaagaagacatttatgcagccaaaaaacacagaagaaatgctcatcatcactggccatcagagaaatgcaaatcaaaaccactatgagatatcatctcacaccagttagaatggcaatcattaaaaagtcaggaaacaacaggtgctggagaggatgcggagaaataggaacacttttacactgttggtgggactgtaaactagttcaaccattgtggaagtcagtgtggtgattcctcagggatctagaactagaaataccatttgacccagccatcccattactgggtatatacccaaatgagtataaatcatgctgctataaagacacatgcacacgtatgtttattgcggcactattcacaatagcaaagacttggaaccaacccaaatgtccaacaatgatagactggattaagaaaatgtggcacatatacaccatggaatactatgcagccataaaaaatgatgagttcatatcctttgtagggacatgtatgaaattggaaaccatcattctcagtaaactatcgcaagaacaaaaaaccaaacaccgcatattctcactcatacgtgggaattgaacaatgagatcacatggacacaggaaggggaatatcacactctggggactgtggtggggtcgggggaggggggagggatagcattgggagatatacctaatgctagatgacacattagtgggtgcagcgcaccagcatggcacatgtatacatatgtaactaacctgcacaatgtgcacatgtaccctaaaacttagagtataataaaaaaaaaaaaa

SEQ ID NO: 640 - DNA, 1486 bp, Homo sapiens
  source 1..1486: mol_type = other DNA
tccctctccctctccctcctctccctcgtctccctctccccacggtctccctctccctctctttccatggtctccctctgatgcagagccaaagctggactgtactgctgccatctcggctcactgcaacctcactgcctgattctcctgcctcagcctgccgagtgcctgcgattgcaggcgcgcgccgccacgcctgactggttttcgtatttttttggtggagacggggtttcgctgtgttggccgggctggtctccagctcctaaccacgagtgatccgccagcctcggcctcccgaggtgccaggattgcagaccgagtctcgttcactcagtgctcaatggtgcccaggctggagtgcagtggcgtgatctcagctcgctacaacctccacctcccagccgcctgccttggcctcccaaagtgcagagattgcagcctctacccggccgccaccccgtctgggaagtgaggagcgtctctgcctggccgccatcccatctaggaagtgaggagcgtctctgcccggccgcccatcatctgagatgtggggagcgcctctgccctgccgccccgtctgggatgtgaggagcgtctctgcccggccgccccgtctgagaggtgaggagcccctccgcccggcagccgcaccatctgagaagtgaggagtccctccgcccggcagccaccccgtctgggaagtgaggagcgtctccgcccggcagccaccccgtccgggagggaggtgggggtcagccccccgcccggccagccgccccgtccgggagggaggtgggggggtcagccccccgcccggccagccgccccgtccgggagggaggtgggggggtcagccccccgcccggccagccgccccgtctgggaggtgaggggcgcctctgcccagccgcccctactgggaagtgaggagcccctctgcccggcctccaccccgtctgggaggtgtacccaacagctcattgagaacgggccatgatgacaatggcggttttgtggaatagaaaggggggaaaggtggggaaaagattgagaaatcggatggttgccgtgtctgtgtagaaagaggtagacatgggagacttttcattttgttctgtactaagaaaaattcttcttccttgggatcctgttgatctgtgaccttgcccccaaccctgtgctctctgaaacatgtgctgtgtccactcagggttgaatggattaagggtggtgcaagatgtgctttgttaaacagatgcttgaaggcagcatgctcgttaagagtcatcaccactccctaatctcaagtacccagggacacaaacactgcagaaggccgcagggtcctctgcctaggaaaaccagagacctctgttcacttgtttatctgctgaccttccctccactattgtcctgtgaccctgccaaatccccctctgcgagaaacacccaagaatgatcaataaaaaaaaaaaaaaaaaaa

SEQ ID NO: 641 - DNA, 6164 bp, Homo sapiens
  source 1..6164: mol_type = other DNA
gtcaagatggccgaataggaacagctccggtccatagctcccagcatgagcgacgcagaagacgggtgatttctgcatttccatctgaggtaccgtgttcatctcacaagggagtgccagacagtgggcgcgggacagtgggtgcagcacaccgtgcacaagccgaagcagggtgaggcattgcctcacttgggaagcacaaggggtcagggagttccctttcctagtcaaagaaaggggtgacagacggcacctggaaaatcgggtcactcccacccgaatactgtgcttttccaacgggcttaaaaaacggcacaccaggagattatatcccgcacatggctcggagggtcctacgcccacagagtctcactgattgctggcacagcagtctgagatcaaactgcaaggtggcagcgaggctggggaaggggcggccgccattgcccaggcttgcttaggtaaacaaagcagccgggaagctccaactgggtggagcccaccacagctcaaggaggcctgcctgcctctgtaggctccacctctgggggcagggcacagacaaacaaaaagacagcagtaacctcctcagacttaaatgtccctgtctgacagctttgaagaaagcagtggttctcccagcacacagctggagatctgagaatgggcagactgcctcctcaagtgggtccctgacccctgacccccgagcagtgtaactgggagggaccccccagtaggggcagactgacacctcacacggctgggtactcctctgagacaaaacttccagaggaacgatcagacagcagcattcgcggttcatgaaaatccgctgttctgcagccaccgctgctgttacccaggcaaccagggtctggagtggacctctagcaaactccaacagagctgcagctgagggtcctgtgtgttagaaggaaaactaacaaacagaaaggacatccacaccaaaaacccatctgtacatcaccatcatcaaagaccaaaagtagataaaaaccacaaagatggggaaaaaacagagcagaaaaactggaaactctaaaaagcagagtgcctctcctcctccaaaggaatgcaactcctcaccagcaacggaacacagctggatggagaatgactttgacaagttgagagaagaaggcttcagatgatcaaactactctgagctacaggaggaaattcaaaccaaaggcaaagaagttaaaaactttgaaaaaaatttagaccaatgtataacgagaataaccaatacagagaagtgcttaaaggagctgatggagctgaaagccaaggctcgagaactacgtgaagaatgcagaagcctcaggagccgacgcgatcaactggaagaaagggtatcagtgatggaagctgaaatgaatgaaatgaagcgagaagggaagtttagagaaaaaagaataaaaagaaatgaacaaagcctacaagaaatatgggattatgtgaaaagaccaaatctacgtctgattggtgtacctgaaagtgatggggagaatggaaacaagttggaaaacactctgcaggatattatccaggagaacttccccaatctagcaaggcaggccaacattcagattcaggaaatacagagaacgccacaaagatactcctcgagaagagcaactccaagacacataattgtcagattcaccaaagttgaaatgaaggaaaaaatgttaagggcagccagagagaaaggtcaggttacccacaaagggaagcccatcagactaacagtggatctctcagcagaaactctacaagccagaagagagtgggggccaatattcaacattcttatagaaaagagttttcaacccagaatttcatatccaaccaaactaagcttcataagtgaaggagaaataaaatcctttacagagaagcaaatgctgagagattttgtcaccaccaggcctgccctaaaagagctcctgaaggaggcactaaacatggaagggagcaaccggtaccagccacagcaaaatcatgccaaattgtaaagaccgtcgaggctaggaagaaattgcatcaactaacgagcaaaataaccagctaacatcataatgacaggatcaaattcacacataacaatattaactttaaatgtaaatggactaaatgctccaattaaaagacacagactggcaaattggataaagagtcaagacccatcagtgtgctgtattcaggaaacccatctcacgtgcagagacacacataggctcaaaataaaaggatggaggaagatctaccaagccaatggaaaacaaaaaaaggcaggggttgcaatcctagtctctgataaaacagactttaaaccaacaaagatcaaaagagacaaagaaggccattacataatggtaaagggatcaattcaacaagaggagctaactatcctaaatatttatgcacccaatacaggagcacccagattcataaagcaagtcctgagtgacctacaaagagacttagactcccacacattaataatgggagactttaacaccccactgtcaacattagacagatcaacgagacagaaagtcaacaaggatacccaggaattgaactcagctctgcaccaagcagacctaacagacatctacagaactctccaccccaaatcaacagaatatacatttttttcagcaccacaccacacctattccaaaattgaccacatagttggaagtaaagctctcctcagcaaatgtaaaagaacagaaattataacaaactatctctcagaccacagtgcaatcaaactagaactcaggattaagaatctcactcaaagccgctcaactacatggaaactgaacaacctgctcctgaatgactactgggtacataacgaaatgaaggcagaaataaagatgttctttgaaaccaacgaaaacaaagacacaacataccagaatctctgggacacattcaaagcagtgtgtagagggaaatttatagcactaaatgcccacaagagaaagcaggaaagatccaaaattgacaccctaacatcacaattaaaagaactagaaaagcaagagcaaacacattcaaaagctagcagaaggcaagaaacaactaaactcagagcagaactgaaggaaatagagacacaaaaaacccttcaaaaaatcaatgaatccaggagctggttttttgaaaggatcaacaaaattgatagaccgctagcaagactaataaagaaaaaaagagagaagaatcaaatagacacaataaaaaatgataaaggggatatcaccaccgatcccacagaaatacaaactaccatcagagaatactacaaacacctctacgcaaataaactagaaaatctagaagaaatggatacattcctcgacacatacactctcccaagactaaaccaggaagaagttgaatctctgaatagaccaataacaggctctgaaattgtggcaataatcaatagtttaccaaccaaaaagagtccaggaccagatggattcacagccgaattctaccagaggtacaaggaggaactggtaccattccttctgaaactattccaatcaatagaaaaagagggaatcctccctaactcattttatgaggccagcatcattctgataccaaagccgggcagagacacaaccaaaaaagagaattttagaccaatatccttgatgaacattgatgcaaaaatcctcaataaaatactggcaaaccgaatccagcagcacatcaaaaagcttatccaccatgatcaagtgggcttcatccctgggatgcaaggctggttcaatatacgcaaatcaataaatgtaatccagcatataaacagagccaaagacaaaaaccacatgattatctcaatagatgcagaaaaagcctttgacaaaattcaacaacccttcatgctaaaaactctcaataaattaggtattgatgggacgtatttcaaaataataagagctatctatgacaaacccacagccaatatcatactgaatgggcaaaaactggaagcattccctttgaaaactggcacaagacagggatgccctctcttaccactcctattcaacatagtgttggaagttctggccagggcaatcaggcaggagaaggaaataaagggtattcaattaggaaaagaggaagtcaaattgtccctgtttgcagacgacatgattgtttatctagaaaaccccatcgtctcagcccaaaatctccttaagctgataagcaacttcagcaaagtctcaggatacaaaatcaatgtacaaaaatcacaagcattcttatacaccaacaacagacaaacagagagccaaatcatgggtgaactcccattcacaattgcttcaaagagaataaaatacctaggaatccaacttacaagggatgtgaaggacctcttcaaggagaactacaaaccactgctcaaggaaataaaagaggacacaaacaaatggaagaacattccatgctcatgggtaggaagaatcaatatcgtgaaaatggccatactgcccaaggtaatttacagattcaatgccatccccatcaagctaccaatgactttcttcacagaattggaaaaaactactttaaagttcatatggaaccaaaaaagagcccgcattgccaagtcaatcctaagccaaaagaacaaagctggaggcatcacactacctgacttcaaactatactacaaggctacagtaaccaaaacagcatggtactggtaccaaaacagagatatagatcaatggaacagaacagagccctcagaaataatgccgcatatctacaactatctgatcttcgacaaacctgagaaaaacaagcaatggggaaaggattccctatttaataaatggtgctgggaaaactggctagccatatgtagaaagctcaaactggatcccttccttacaccttatacaaaaatcaattcaagatggattaaagatttaaacgttaaacctaaaaccataaaaaccctagaagaaaacctaggcattaccattcaggacataggcgtgggcaaggacttcatgtccaaaacaccaaaagcaatggcaacaaaagacaaaattgacaaatgggatctaattaaactaaagagcttctgcacagcaaaagaaactaccatcagagtgaacaggcaacctacaacatgggagaaaattttcgcaacctactcatctgacaaagggctaatatccagaatctacaatgaactcaaacaaatttacaagaaaaaaacaaacaaccccatcaaaaagtgggcgaaggacatgaacagacacttctcaaaagaagacatttatgcagccaaaaaacacatgaagaaatgctcatcatcactggccatcagagaaatgcaaatcaaaaccactatgagatatcatctcacaccagttagaatggcaatcattaaaaagtcaggaaacaacaggtgctggagaggatgcggagaaataggaacacttttacactgttggtgggactgtaaactagttcatccattgtggaagtcagtgtggcgattcctcagggatctagaactagaaataccatttgacccagccatcccattactgggtatatacccagatgagtataaatcatgctgctataaagacacatgcacacgtatgtttattgcggcactattcacaatagcaaagacttggaaccaacccaaatgtccaacaatgatagactggattaagaaaatgtggcacatatacaccatggaatactatgcagccataaaaaatgatgagttcatatcctttgtagggacatggatgaaaatggaaaccatcattctcagtaaactatcgcaagaacaaaaaaccaaacaccgcatattctcactcataggtgggaattgaacaatgagatcacatggacacaggaaggggaatatcacactctggggactgtggtggggtcgggggaggggggagggatagcattgggagacacattagtggatgcagcgcaccagcatggcacatgtatacatatgtaactaacctgcacaatgtgcacatgtaccctaaaacttagagtataataaaaaaaaaaaaaaaagaaaaaaaaaaaaaaaaaaaacaaaa

SEQ ID NO: 642 - DNA, 270 bp, Homo sapiens
  source 1..270: mol_type = other DNA
ggccaggcgcggtggctcacacctttaatcccaacactttgggaggcgggtcgatcacttgatatcaggagtttgagaccagcctggccaacatagggaaaccctgtctctactaaaaatacaaaaattagccaggcctggtggcacgcgcctgtaatcccagctacttgggaggctgaggcaggagaatcacttgaacctgggaggtggaggttgcagtgagtcaagatcgtgtcactgcactccagcctaggtgacagagtgagactc

SEQ ID NO: 643 - DNA, 5553 bp, Homo sapiens
  source 1..5553: mol_type = other DNA
ctggcaagatggctgaataggaacagctccagtctgcagctcccagcaagatcaatgcagaaggtggatgatgtctgcatttccaactgaggtacctggttcatctcaatgggactggttggacagtgggtgcagcccacggagggcgagccaaagcagggtggggtgttgcttcaccctggaagtgccaggggtcggggaattttttcccctacccaagggaagctgtaagggactgaacctggggaactgtgcactctggcccagatactgcacttttcctaatggtcttcgcaacctgcagaccaagagattccctccagtgcctaccccaccagggccctgggtttcaagcacaaaactgggtggccgtttaggcagacaccgaaatagctgcacaaggttttttgtttgtttgtttgttttttcccataccccagtggtgcctggaatgccagtgagacagtgagacaaaaccattcactcccctggaaagggtgctgaagccagggagccaagtggtctggctcagtggtcccacccctgtggagcccagcaaactaaaatccactggcttgaaattctcgctgcctgcacagcagcagtcagagatcaacctgggacacttgaacttggtgcagggaggggcatccgccattgctgaggcttgagtaggcggttttaccctcacagtgtaaacaaagccactgggaagttcaaactgggcagagcccactgcagctgagcaaggctgctgtggccagactgccagatttgccctctctgggcagggcatctctgaaaaaaaggcagcagccccagtcagggacttttagacaaaactcccatctccctgggccagagcacctggggaaaggagtgcctgtaggcgcaatttcagcagacttaaatgtttctgccagatggctctgaagagagcagtggatctcccaacacagcattcgagctctgctaagggtcatactgcctcaagtgggtgcctgacccccgcatatcctgactaggagacacctcccagtaggggctgacagacacctcatacaggaaagctctggctggcatctggcaggtgcctccctggacgaagctgccagaggaaagaacaggcagcaatctttgctgttctgcagcctctgctggtgatacccaggcaaatggtctggagtggacctccagcaaactccagcagacctgtagcaaaggggcctgactgttagaaggaaaactaacaaacaggaagagcatgtccactcagagatcccatccaaaggtcaccaacatcaaagatcaaaggtagataaatccacaaagatggggagaaatcagtgcaaaaaggctgaaaataccaaaaaccagaatgcctcttctcctccaaaggatcacaacttctcaccagcaagggaacaaaactggatggagaatgagtttgacaaactgacagaagtaggcttcagaaggtgggtaataacaaattcctctgagctaaaggaccatgttctaacccaatgcaaggaagctaagaaccttgaaaaaaggttagacgaattgctaactagaataaccagtttagagaagaacataagcgacctgatggagctgaaaaacacagcacaagaacttcctgaagcatacacaagtgtcaatagccgaatcaatcaagtggaagaaaggatatcagagattgaagatcaacttaatgaaataaagtgagaagacaagattagagaaaaaagaataaagaggcacaaacaaagcctccaagaaatatgggactatgtgaaaagaccaaatctatgtttgattgatctacctgaaagtgacagggagaatggaaccaagctggaaaacactcttcaggatattatccaggagaacttccccaacctagcaagacaggccaacattcaatttcaggaaatagagagaacaccacaaagatactccttgagaagagcaacccaagacacataattgtcagattcaccaaggttgaaatgaaggaaaaaatattaagggcagccagagagaaaggtcaggttacccacaaagggaagcccatcagaccaacagtggatctctctgcaggaaccctacaagccagaagagagtgggggccaatgttcaacattcttaaagaattttcaacctagaatttcatatccagccaaactaagcttcataaatgtagaagaaataaaattctttacagacaagcaaatgctgagagattttgtcaccaccaggcctgccctacaagagctcctgaagggagcactaaacatggtaaggaacaacaggtaccagtcactgtaaaaacataccaaattgtaaagaccatcgacactatgaagaaactgcattaactaataatggacaaaataaccagctagcatcataatgacaggatcaaattcgcacataacaatattaaccttaaatgtaaatggactaaatgccccagttaaaagacacagactggcaaattggataaacagtcaagacccatcggtgtgttgcattcaggagacccatctcacatgcaaagacacacataggctcaaaataaagggagggaggaatctttaccaagaaaatggaaagaaaaaaaaaagggggttgcaatcatagtctctgataaaacagactttaaaccagcaaagatcaaaaaagacaaagaagggcattgcataatgataaggggatcaatgcaacaagaagagctaactatcctaaatatatatgcacccagtacaggagcacaagattcataaagcaaattcttagagacctacaaagagacttagactcccacacaataatagtgggagactttaacaccccactgtcaatattagatcaatgagatggaaaattaacaaggatattcaggacttgaactcagctctggaacaagcatacctaatagacatctacagaactctccatcccaagtcagcagaatatacattcttctcagcaccacatcacattaattctaaaattgaccacataattggaagtaaaacactcctcagcaaatgcaaaagaatggaaatcataacagtctctcagaccacagtgcaatcaaattagaactcaggattaagaaactcactcaaaatcacacaactgcatggaaactgaacaacctgctcctgaatgactgctaggaaataatgaaattaaggcagaaataaataagttctttgaaaccactgagaacaaagtcacaacataccagaatctctgagacacagctaaggcagtgtttaaagggaaatttatagcactaaatgcccacaagagaaagcaggaaagatctaaaatcgacactctaacatcacaatgaaaagagctagaggaacaagagcaaacaaattcaaaagctagcagaagacaagaaataactaagatcagagcagaattgaaggagatagagacacaaaaaaacctttaaaaaatgaatccaagagctgttttttttgaaaagatcaacaaaatagactggtagccaattaataaagaagaaaagagggaagaatcaaacagacacaataaaaaatgataaaggggatatcaccactgatcccacagaaatacaaactagcatcagagaatattataaacacctctatgcaaataaactagaaagtctagaggaaatggataaactcctggacacatacaccctcccaagactaaaccaggaagaagttgaatccctgaatagaccaataacacgtttttattttattatttaatagcctaccaaccaaaaaaaagcccaggatcagacagattcacagctgatttctaccacaggcacaaagaggagctggcaccatttcttctgaaactatttcaaacaatagaaaatgagggactcctccctaactcattttataaggccagcatcatcctgataccaaaacctggcagagacacaacaaaaaaaaatttcaggccaatatccctgatgagtatcaatgtgaaaatcctcaataaaatactggcaaactgaatccagcagcacatcaaaaaacttatccactactatcaagttggcttcatctttgggatgcaagcatggttcaacatatgcaaatcaataaatgtaatccatcacataaaagaaccaatgacaaaaaccacatgattatctcaatagatgcagaaaaggccttcgataaaattcaacaccccttcatgctaaaaactcaataaactaggtattgatggggaatgtatctcaaaataatgaaagctatttatgacaaacccacagccaatatcatactgaatgggcaaaagctggaagcattccctttgaaaactggcacaagacaaggatgccctctctcaccactcctattcaacatagtattggaagttctggccagggcaatcaaggaagagaaagaaataaagtgtattcaaatagaaagagaggacgtcaagttttctgtttgcagatgacatgattatatatttagaaaaccccattgtctcagcccaaaatctccttaagctgataagcaacttcagcaaagtctcaggatacaaaatcaatgtgcaaaaatcaaaagcattcctatacaccaatgacagacaaacagagagccaaatcatgagtgaactcccattcacaactgctacaaagagaataaaatacctaggaatacaacttacaagggctgtgaaggacttcttcaaggagaactacaaaccactgctcaaagaaataagagaggacacaaatggaagaacattccatgctcatggatagacagaatcaatattgtgaaaatggccatactgcccaaagtaatttatagattcaacgctctcctcatcaagcaaccattgactttcttcacagaattagaaaaaacgtctttaaatttcatatggaaccaaaaaacagcccgtatagccaagacaatcctaagcaaaaagaacaaagctggaggcatcatgctacctgacttcaaactataccacaaggctacagtaaccaaaacagcatggtactggtactaaaacagatacatagaccaatggaacagaacagaggcctcagaaataatgccacacatctacaaccatctgatctttgacaaccctgacaaaagcaatggggaaaggataccctatttaataaatggtgtcaggaaaactggccagccatatgcagaaaactgaaactggaccctttccttacaccttatacaaaaattaactcaagatggattaaagacttaaacctaagacctaaaaccataaaaaccctagaagaaaacctaggcaataccattcaggacacatgcatgggcgaagacttcatgtctaaaacaccaaaagcaatggcaacaaaagccagaatagacaaatgggatctaattaaactaaagagcttctgcacagcaaaagaaactggcatcaaagtgaacaggcagcctacagaatgggagaaagtttttgcaatctgtccatctgacaaagggctaatatccagaatgtacaaagaactta

SEQ ID NO: 644 - DNA, 3427 bp, Homo sapiens
  source 1..3427: mol_type = other DNA
gtacccactaactgatagatccagcaggctggaaatcagtaaggacatagttgaacagcaccatcaattaagtgtatctaattggcatttagagaatacttcacccaacaacaacagaatacacattcttctcaagttcacatggaatattcatcaagacagaccacattctgtgccataaaacatacaacaacaaatatcaatgacttctatgatggagattactgagatcacaacagaatcactagaaatcaataacagaaagatatctgaaaaacattaaaaaaatggaaactaaatgacacacttctaaacaacatgtaaacaaatcaaagaataactctcaagaaaaaatttaaaatatttcaaactaaattaaaatgaaaatataacatcaaaatttatgggatgctgctaaagtagtgtttagagggaaatttagagcactgaatgcatatattattaaagaagaaagagctaaaagcaagtttccaaattaggaaactagaaaaagaagagcaaattaaatccaaaataaacagaagaaaggaaataataaaaattacagcagaacttgtgaaattgaaaacatgctgtcaatagagaaaatcaacaaaacctaaagctggttccttgaaaagatgaataaaactgagacacctctagccaggttaactaagaagaaaaagagagaagactcaaattactaatatcaaaaatgaaagaagggccatcaatactgatcctacggtcattaaaaggataataaaatactagtatgaacaactctatatcaacaaatttggtaagttaaatgaaatgaaacaatcccttgaaagtacaacgttccaaaactcacacaaagagaaatagataatctgaataggcctatactgattaaagaactggagccagtagccttccaaaatagaaagcactagggttaatgaatatgactaaacatttaagaaagaaattatgccaattctctatgatctctttcaaaaaatagaagtagaggaaattctctaattttcttgggtcagaattaccctggtaccaaaaccagaaacattacaagaaaggaaactaacagatcaatatttctcataaacatagatgttaaaatcctcaaaaaaatcagcaattgaatccaacaatgtttaaaaagaattatacataaccaccacatgggatttattctaggttaaacatttgaaaatcaattaatgtaatccatcgcatgaataggctaaggaagaattatatgatcacatcaatagatccagaaaatgcatttgacaagaatctaacattcatttatgataagagctttcagcaagctagtaataaatgggaacttaacttgataaagaagatctatgaaaaacctacagctaacatcatacttaatggagagaaactagaagcttttcccctaagatcagaaataaggcaaggatgttccctttcacccttcctagtcaacattatactggaagtgctggctaatgtaattagaaaagaaaagaaaatgaaaagtctacagattgggaaggaagaaataaactgttcttgttctcaaaaaacataattggctatgtggaaaatgccaacaaagcaacagaaaactggaaataataagttattctgccaaagttgctggatgtaaagtcatggttaatatacaaaaattgattactttcttatatactagcaataaacaattgaaatttgagattaaaaacacaaaaccatttacattagcaccaaaaagtgaattatttatacataaacctaaaataggtcaaaatctatgtgagaataaccataactgatgaaaacataaaaatatgtataaataaatgaagagatagtacatgttcatgggtagggaaactctatactgtccagatgtcagttctttccgactttatctatagattcaatgcaatcccaatcaaaaccccagcagttatttgtggatatcaacaaactgattctcaagtttatttggagagacaaaagacctgggatagtcaacacaatattgaaggagaacgaagttagaggaccgatactgcctgtccccaagactttactataaagctacagtaatcaagacagtacggtattggcaaaagaatagtcagatagatcaattgaacagaatagagagcccagaagtaaactcacatcaatacagtcaactgaactttgacaaagagacaaaggcaagacaatggagaaaatctgcattgcacaaaaatcacacaaatatctgtacactgatgtttacagcatctttatttgtaactgccaaaacttggatttgactttttagatacaacaacaacagcacaattcatggaggaaaaaaaatggtacattagaccttattaaaatttaaaacttctgctctgcaaaagacactgttaagagaatgaaaagacaagccatggttggggagagaagacatatctggtaaagcactgttatccaaaatatacaaagaactattaaaactcaacagtaaaacaaacaacccaattttaaaatgggccaagtaaattaaccgacattcacaaaagaagatatacagatggcagagaagcatttaaaaagatgctcaacactgtaagtcattacagattgcaaattaaaatataacaatgagatactactatatgcgtattagaagagttaaattaagagcactgacaacaaatgctgatgaggctgtggagcaacaggaactcttatttattactggtagaaatgaaaaattatgccaccactatggaaaaaggtttggtagttttttataacacgaaacatacttttaccatgtgatccatcaatcgctcttgatatttactcaaaggagaagaaaactaatgtccacacaaaaacctgcacacaaatgttgatagcagctttattcactgctaaaacttggaagcaaccaagatatcctgtagtatgtgaatggagaaataaactgtggtacctccacatccatacaacagaatattagtcaatgataaaaagaaatgggttaccaagtcacagaaagacatggaggatgcttaaatgcattttgctaagcgaaagaagccagtctggaaaggctatataccatatgattcatacatactatatgacattctggaaaaggcaaaactacaaaggcagtaaccagtggttgccagggataggtaggggggttggggggtggatgggtagagcacaggagagttttagggcagtgaaactattctctatgatactgtaacactggatactcatcattatatgtttgtccaaaaccatagaaggtacaacaccaagagggaattctaatgtaaattatggactttcattaataacattgcatcgatattggctcaccaagtataacaaaatt

SEQ ID NO: 645 - DNA, 5256 bp, Homo sapiens
  source 1..5256: mol_type = other DNA
tccatctgagacctgcagctgagggtcctgtctgttagaaggaaaactaacaaccagaaaggacatctacaccgaaaacccatctgtacatcaccatcatcaaagaccaaaagtagataaaaccacaaagatggggaaaaaacagaacagaaaaactggaaactctaaaacacagagcgcctctcctcctccaaaggaacgcagttcctcaccagcaacagaacaaagctggatggagaatgattttgacgagctgagagaagaaggcttcagacgatcaaattactctgagctacgggaggacattcaaaccaaaggcaaagaagttgaaaactttgaaaaaaatttagaagaatgtataactagaataaccaatacagagaagtgcttaaaggagctgatggagctgaaaaccaaggctcgagaactacgtgaagaatgcagaagcctcaggagccgatgcgatcaactggaagaaagggtatcagcaatggaagatgaaatgaatgaaatgaagcgagaagggaagtttagagaaaaaagaataaaaagaaatgagcaaagcctccaagaaatatgggactatgtgaaaagaccaaatctacgtctgattggtgtacctgaaagtgatgtggagaatggaaccaagttggaaaacactctgcaggatattatccaggagaacttccccaatctagcaaggcaggccaacgttcagattcaggaaatacagagaacgccacaaagatactcctcgagaagagcaactccaagacacataattgtcagattcaccaaagttgaaatgaaggaaaaaatgttaagggcagccagagagaaaggtcgggttaccctcaaaggaaagcccatcagactaacagcggatctctcggcagaaaccctacaagccagaagagagtgggggccaatattcaacattcttaaagaaaagaattttcaacccagaatttcatatccagccaaactaagcttcataagtgaaggagaaataaaatactttatagacaagcaaatgttgagagattttgtcaccaccacgcctgccctaaaagagctcctgaaggaagcactaaacatggaaaggaacaaccggtaccagccgctgcaaaatcatgccaaaatgtaaagaccatcgagactaggaagaaactgcatcaactaatgagcaaaatcaccagctaacatcataatgacaggatcaaattcacacataacaatattaactttaaatataaatggactaaattctgcaattaaaagacacagactggcaagttggataaagagtcaagacccatcagtgtgctgtattcaggaaacccatctcacgtgcagagacacacataggctcaaaataaaaggatggaggaagatctaccaagccaatggaaaacaaaaaaaggcaggggttgcaatcctagtctctgataaaacagactttaaaccaacaaagatcaaaagagacaaagaaggccattacataatggtaaagggatcaattcaacaagaggagctaactatcctaaatatttatgcacccaatacaggagcacccagattcataaagcaagtcctcagtgacctacaaagagacttagactcccacacattaataatgggagactttaacaccccactgtcaacattagacagatcaacaagacagaaagtcaacaaggatacccaggaattgaactcagctctgcaccaagcagacctaatagacatctacagaactctccaccccaaatcaacagaatatacatttttttcagcaccacaccacacctattccaaaattgaccacatagttggaagtaaagctctcctcagcaaatgtaaaagaacagaaattataacaaactatctctcagaccacagtgcaatcaaactagaactcaggattaagaatctcactcaaagccgctcaactacatggaaactgaacaacctgctcctgaatgactactgggtacataacgaaatgaaggcagaaataaagatgttctttgaaaccaacgagaacaaagacaccacataccagaatctctgggacgcattcaaagcagtgtgtagagggaaatttatagcactaaatgcctaccagagaaagcaggaaagatccaaaattgacaccctaacatcacaattaaaagaactagaaaagcaagagcaaacacattcaaaagctagcagaaggcaagaaataactaaaatcagagcagaactgaaggaaatagagacacaaaaaacccttcaaaaaatcaatgaatccaggagctggttttttgaaaggatcaacaaaattgatagaccgctagcaagactaataaagaaaaaaagagagaagaatcaaatagacacaataaaaaatgataaaggggatatcaccaccgatcccacagaaatacaaactaccatcagagaatactacaaacacctctatgcaaataaactagaaaatctggaagaaacggatacattcctcgacacatacactctcccaagactaaaccaggaagaagttgaatctctgaatcgaccaataacaggctctgaaattgtggcaataatcaatagtttaccaaccaaaaagagtccaggaccagatggattcacagccgaattctaccagaggtacaaggaggaactggtaccattccttctgaaactattccaatcaatagaaaaagagggaatcctccctaactcattttatgaggccagcatcattctgataccaaagccgggcagagacacaaccaaaaaagagaattttagaccaatatccttgatgaacattgatgcaaaaatcctcaataaaatactggcaaaccgaatccagcagcacatcaaaaagcttatccaccatgatcaagtgggcttcatccctgggatgcaaggctggttcaatatacgcaaatcaataaatgtaatccagcatataaacagagccaaagacaaaaaccacatgattatctcaatagatgcagaaaaagcctttgacaaaattcaacaacccttcatgctaaaaactctcaataaattaggtattgatgggacgtatttcaaaataataagagctatctatgacaaacccacagccaatatcatactgaatgggcaaaaactggaagcattccctttgaaaactggcacaagacagggatgccctctctcaccgctcctattcaacatagtgttggaagttctggccagggcaatcaggcaggagaaggaaataaagggtattcaattaggaaaagaggaagtcaaattgtccctgtttgcagacgacatgattgtttatctagaaaaccccatcgtctcagcccaaaatctccttaagctgataagcaacttcagcaaagtctcaggatacaaaatcaatgtacaaaaatcacaagcattcttatacaccaacaacagacaaacagagagccaaatcatgagtgaactcccattcacaattgcttcaaagagaataaaatacctaggaatccaacttacaagggatgtgaaggacctcttcaaggagaactacaaaccactgctcaaggaaataaaagaggagacaaacaaatggaagaacattccatgctcatgggtaggaagaatcaatatcgtgaaaatggccatactgcccaaggtaatttacagattcaatgccatccccatcaagctaccaatgactttcttcacagaattggaaaaaactactttaaagttcatatggaaccaaaaaagagcccgcattgccaagtcaatcctaagccaaaagaacaaagctggaggcatcacactacctgacttcaaactatactacaaggctacagtaaccaaaacagcatggtactggtaccaaaacagagatatagatcaatggaacagaacagagccctcagaaataatgccgcatatctacaactatctgatctttgacaaacctgagaaaaacaagcaatggggaaaggattccctgtttaataaatggtgctgggaaaactggctagccatatgtagaaagctgaaactggatcccttccttacaccttatacaaaaatcaattcaagatggattaaagatttaaacgttaaacctaaaaccataaaaaccctagaagaaaacctaggcattaccattcaggacataggcgtgggcaaggacttcatgtccaaaacaccaaaagcaatggcaacaaaagacaaaattgacaaatgggatctaattaaactaaagagcttctgcacagcaaaagaaactaccatcagagtgaacaggcaacctacaacatgggagaaaatttttgcaacctactcatctgacaaagggctaatatccagaatctacaatgaactcaaacaaatttacaagaaaaaaacaaacaaccccatcaaaaagtgggcgaaggacatgaacagacacttctcaaaagaagacatttatgcagccaaaaaacacatgaagaaatgctcatcatcactggccatcagagaaatgcaaatcaaaaccactatgagatatcatctcacaccagttagaatggcaatcattaaaaagtcaggaaacaacaggtgctggagaggatgcggagaaataggaacacttttacactgttggtgggactgtaaactagttcaaccattgtggaagtcagtgtggcgattcctcagggatctagaactagaaataccatttgacccagccatcccattactgggtatatacccaaatgagtataaatcatgctgctataaagacacatgcacacgtatgtttattgcggcactattcacaatagcaaagacttggaaccaacccaaatgtccaacaatgatagactggattaagaaaatgtggcacatatacaccatggaatactatgcagccataaaaaatgatgagttcatatcctttgtagggacatggatgaaattggaaaccatcattctcagtaaactatcgcaagaacaaaaaaccaaacaccgcatattctcactcataggtgggaattgaacaatgagatcacatggacacaggaaggggaatatcacactctggggactgtggtggggtcgggggaggggggagggatagcattgggagatatacctaatgctagatgacacattagtgggtgcagcgcaccagcatggcacatgtatacatatgtaactaacctgcacaatgtgcacatgtaccctaaaacttagagtataataaaaaaaaaaaaa

SEQ ID NO: 646 - DNA, 4313 bp, Homo sapiens
  source 1..4313: mol_type = other DNA
gaagcaagatggcagaatacaaggctccacctattgtcccacttgcaaggaatccaagttaacaactatatacacgagcaaagcacctccataagaaccacaaatcaggtgagcactcatagtacctggttttaacttcatatcactgaaagaggcactgaagaggtaggaaaaacagtcttgaagccccgacaccatccttccctcatccgcagcagtgcagcatggtgtggagagtatttctgggtgctggggagagggagagcatagcaagtgtgaggcattgatgaactcaaggctgtctgttagaccagaaagaaaaaccaaaccaaactcagcttatatccacccacagaggaagcatttggaccagccctagccagaggggaatcactaatccccagaggtcaattgccatgatgggctaaagggctctgggtctctaagtaaatttgaaaggctgtctaggccataaggactgaactcttaggtgagtggtagtgctgaactgggtggacttgggggcatgtgactactgagacaccagcagggatagctaagaaagtgctggcatcacccctcccctaaccccggctgcacaactcatggctccaaaagagagcccttcctttcacttgaggagaggagagagaagagtggaggggactgtgtcttgtatctttgatcccacagcagaatagggcactggtcagagtcatgaggcccctgttccaagccctagctcctaaatgacatttccagaaacaccctggggcagaaaggaatctgctgccttgaagggaagaacccagtcctggcagcattgatcacatgctaactgaagagcctttgggtcctgaataaccagcagtgatgcccaggtactatgttgaaggccttgggtgagcctctgaaacttgctggcttcaggtaccagcttgaccacaggggagtagagcaccaggggggctcttggggtccccgattcaaagacttgactcttggatggcattctggacccaccctgggccagaagggagcccattgctctgaagggtgggtcccaggaaagacagcattcaccacaagctgactgaagagcccttgggtcttaagggaacatcagtggcagtctggtagaactccccatggcctgtaatggtggtagctagaggatgaagcttttctgcctttgtaaagaggagggaagaatgggaaggactgccatcctgtggcttgatggccagctcagccacaatacaatagaataccaggtagacttctaaggattttgactctagtctctgaccccagatggcacctctagacccatctggggcctggggggattcaccaacctggacacaagcctggctggctttgctacctgtgattgtaaagccacaaggccttgagcaaacataggcaatagccagggagtggttcagcaggccttgggtgagacccactactgtgctggcttcaggtctgacccagcgagtcatagtggtggtggctgcaggtgtgcatgtgtcactccacacccagatttaggtggctcagaactgaaagagagagacacggtttgcttgggaaaaagtaaggcaagagaacaagaatctctgcctggtaatacagataattcttccagatcttgtccaagaccatcaaggtggtacctctatgagtcttcaagaactatagaattactaagcatggggtgccccctaaagcagatacagcttagatctcaacacccaagtcctttcaaatatctgaaaaatcttctcaacaagtacaggtacaaagaagcccagacagttaaaactataataaatacctaactcctcaatgcctagacatctacacgtataaagataatccaggaaaacatgacctcaccaaatgaactaaataaggcaccagggagcaatcctggagaaacataaatatgttacctttaagacagaaaattcaaaatagctgtgttgaggaaactcaaattcaagataacacagagatggaattcagaattctatcagctagatttcacaaagagattgaaataaaaagaatcaagcagaaattctggagcaaaaaaatgcagttggcacactgaacaatgcattagagtcctttaatagcagaatgaatcaagcagaagaaaaaaattagtgaacttaaagacaaattatttgaaaatacaccatcagaggagaccaaaaaaagaataaaaaacaatgaaacatgcctacagaacctaataaatagcctcgaaagggcaaatctaagagttatttgtcttaaagagaaggtagagaaagagataggggtagaaagtttattcaaagggataacaacagaaaacttcccaaacctagagaaagatattaaatatccaagtacaagaaggctgtagaatatcaagcagatttaacccaaagaagactacctcaagttgtttaataatcaaactcccaaggatcaaggataaagaaaggatcttaaaagcagcaagagaaaagaaacaaatatcatacaatggagctcccatacatctggctgcagacttctcagtggaaaccttacaggccaggagacagtggcatgacatatttaaagggctgaaggaaaataacttttgccctagaataatatatcttatgaaaaacttttcagacatgaaggagaaatgaagactttctcagacaaaaaaagctgaaggatttcatcaacaccagatctgtcctataagaaatgctaaagggagtacttcagaaagaagaggatgttaatgagcaataactaattacctgaaggtacaaaactcactggtaatagtaagtacatagaaaaacacagaatattataagactgtaactgggttgtataaactactcttatcctaagtagaaagactaaatgatgaaccaatcaaaaataacaactacaacaacttttcaagacaatgacagtacaataagatataaataggaacaacaaaatgttaaaaagtggagggataaagttaaggcatataatttttattagttttttgtgcttgtttgtttatgacaaatagtgttaagttggtatcagctcaaaataatgggttataagatagtagttgcaagtctcattgtaacctcaaaccaagaaacatacaccaaatacacaaaaattaaaaagcaaggaagtaaattatattaccagagaaaatcactaaaggaagacaaggaaaaaaaggaataccacaaaacaactggaaaacaaattacaaaatggcaagagtaagtccttactcatcaataataaatgtaaatggactatactctccaatcaaaagacataaagtggccgagtggatgaaaaaacaagaaccacttatctgttgcctacaagaaacacaattcatctataaatatatacatatactgaaaatgaaaggatggaaaaagatatgccatgctaatgaaaaccaaagaacagaggagcagaagtaaatggagcagtagctatatttatatcacacaaaatagatttcaagacaaaaagtgtaagaagagacaaagaagatcactgtataatgataaagaggccaattcagcaaaagaatataacaatatacatgtacccaacactgtagcatccagatatataaagcaaatattattagagctaaagagagatataggacccaatacaataataatgtggagacatgaacatcccactttcagcactggacaaacttccaggcagaaaagcaataaagaaacttcagtcttaatatgcactatacaccacatggatctaatagatatttacagaaaattagatccaagagctgcagaatgcacactctttttctcagcacatggatcattctcaaggatataccgtatgtttggtcacaaaacaagtcttaaaacattcaagaaacaaatgaaacaatatcaagcatcttctctgaccacaatagaataaacctagaaatcaatagctagaggaatttatgaaactatacaaatatatggtaattaaatagtatgctcctgaataaccagtgggtcaatgaaggaattaaggaaattgaaaaatgtgttgaaataaattataatggaaacacaacatatcaaaacctatggaatacagaaaaaggagtcctaagatggaagtttataagtgtctataccaaaaaagaggaaaaacatcaaataaacaatctaatgatgcatcttaaaaaactagaaaagcaagaacaaaccagacccaaaattagtagaagaaaagaaataataataatttcagca

SEQ ID NO: 647 - DNA, 6128 bp, Homo sapiens
  source 1..6128: mol_type = other DNA
ggggcggttccaagatggccgaataggaacagctccagtctacagctcccagcatgagcagcgcagaagatgggtgatttctgcatttccaactgaggtaccgggttcatctcactggggcttgtcagacagtgggtgcaggacagtgggtgcagcgcaccgagcatgagccgaagcagggcaaggcattgcctcacctgggaagtgcaaggggtcagggaattccttttcatagccaagcaaagctgtgacagatggcacctggaaaatcaggtcactcccaccctaatactgcgcttttccaatggtcttagcaaacagcacaccaggagattatatcccgtgcatggctctgaaggtcccatgcccacggagcctctctcattgctagcatagcagtctgagatcgaactgcaaggcggcagcaaggctgggggaggagtgcccgccattgctgaggcttgagtaggtaaacaaagtggctggaaagctggaactgggtggagcccactgcagctcaaggaggcctgcctgcctctgtagactccacctctgggggcagggcatagctgaacaaaaggcagcagaaacctctgcagacttaaatgtccctgtctgacagctttgaagagagtagtgcttctcccagcacggagtttgagatctgagcactgacagactgcctcctcaagtgggaccctgacacctgagtagcctaactgggaggcatcccccagtaggggcagactgacacctcacacggccgggtacccctttgagacgaaacctccagaggaacaatcagacagcaacatttgctgttcagcaatatttgctgttctgcagcctccgctgctgatacccaggcaaacagagtctggagtggatctccagcaaactccaacagacctgtagctgagggtcctgactgttaaaaggaaaactaacaaacagaaagggcatccacaccaaaaccgcatctgtacgtcactatcatcaaagaccaaaggtagataaaaccacaaagatggggaaaaaacagaacagaaaaactgaaaattctaaaaatcagagggcctctcctcctccaaaggaacgcagctcctcaccagcaacggaacaaagctggacagagaatgactttgacgagttgagagaagaaggcttcagatgatcaaacttctccgagctaaaggaggaagttggaacccatggcaaagaagttaaaaaccttgaaaaaagattagacgaatggctgactagaataaccaatgcagagaaatccttaaaggacctgatggagctgaaatccacggcacaggaactacgtgacgaatgcacaagcttcagtagccgattcgatcaactggaagaaagggtatcagtgattgaagatcaaatgaatgaaatgaagcgagaagagaagtttagagaaaaaagaataaaaagaaacgaacaaagcctccaagaaatatgggactatgtgaaaagaccaaatctatgtctgattggtgtacctgaaagtgatggggaaatggaaacaagttggaaaacactctgcaggatataatccaggagaacttccccaacctagcaaggcaggccaacattcaaattcaggaaatacagagaacgccacaaagatactcctcgagaagagcaactccaagacacataattgtcagattcaccaaagttgaaatgaaggaacgaacgttaagggcagccagagagaaaggtcgggttacccacaaagggaaccccatcagactaacagctgatctctcggcagaaattctacaagccagaagagagtgggggccaatattcaaaattcttaaggaaaagaattttcaacccagaatttcatatccagccaaactaagcttcaaaagtgaaggagaaataaaatcctttacagacaagcaaatgctgagagattttgtcaccaccaggcctgtcctaaaagagctcctgaaggaagcactaaacatggaaaggaacaatcggtaccagccactgcagaaacatgccaaattgtaaagaccatcgatgctaggaagaaactgcatcaactaacgagcaaaataaccagctaacatcatactgagaggatcaaattcacacataacaatattaaccttaaatgtaaatgggctaaatgctccagttaaaagacacagactggcaaattggatagagtcaagacccatcagtgtgctgtattcaggagacccatctcacgtgcagagacacacataggctcaaaataaaaggatggaggaagatctaccaagcaaatggaaaacaaaaaaaggcaggggttgaaatcctagtctctgataaaacagactttaaaccaacaaagatcaaaagagacaaagaaggccattacataatggtaaagggatcaattcaacaagaagagctaactatcctaaatatatatgcacccaatacaggagcacccagattcataaagcaagtccaagagacccacaaagagacttagactcgcacacaataataatgggagactttaacaccccactgtcaacattagacagatcaacgagacagaaggttaacaagaatatccaggaattgaattcagctctgccccaagcagacctaatagacatctacagaactctccaccccaaatcaacagaatatacattcttctcagcaccacaccacacctattccaaaactgaccacatagttggaagtaaagcactcctcagcaaatgtaaaagaacagaaattataacaaactgtctctcagaccacagtgcaatcaaactagaacccaggattaagaaactcaatcaaaactgctcaactgcatgggaactgaacaacctgctcctgaatgactactgggtacataacgaaatgaaggcagaaataaagatattctttgaaaccaacgagaacaaagacgcaacataccagaatctctgggacacatttaaagcagtgtgtagagggaaatttatagcactaaatgcccacaagagaaagcaggaaagatttaaaattgacaccctaacatcacaattaaaagaactagaaaagcaagagcaaacacattcaaaagctggcagaaggcaagaaataacttaggtcagagcagagctgaaggagatggagacacaaaaaacccttcacaaaatcaatgaatccaggagctggtttttggaaaagatcaacaaaattgatagactgctagctagactaataaagaagaaaagagagaagaatcaaatagatgcaataaaaaatgttaaaggggatatcaccgatcccacagaaatacaaactaccatcagagaatactataaacacctctatgcaaataagctagaaaatctagaagaaatggataaattcctggacacatacaccctcccaagactaaaccaggaagaagttgaatctcttaatggaccaataacaggctctgaaattgaggcaataattaatagcttaccaaccaaaaaaagtccaggaccagatggattcacagccgaattctaccagaggtacaaggaggaactggtaccattcattctgaaactatttcaatcaatagagaaagagggagtcctccctaactcattttatgaggccagcatcatcctgataccaaagcctggcagagacacaacaaaaaaagagaattttaaaccaatatccctgatgaacattgatgcaaaaatcctcaataaaatactggcaaaccgaatccagcagcacatcaaaaagcttatccaccatgatgaagtgggcttcatccctgggatgtaaggctggttcaacatacacaaatcaacaaatgtaatccatcctataaacagaagcaaagacaaaaaccacatgattatgtcaatagatgcagaaaaggcctttgacaaaattcaacagcccttcatgctaaaaactctcaataaattaggtattgatgggacatatctaaaaataataagagctatttatgacagactcacagccaatatactgaatgggcaaaaactggaagcattccttttgaaaactggcataagacagggatgccctctctcaccactcctattcaacatagtgttggaagttctggccagggcaatcaggcaggagaaagaaataaagggcattcaactaggaaaagaggaagtcaaattgtccctgtttgcagacgacatgattgtatatctagaaaaccccatcatctcagccccaaatttctttaagctgataagcaacttcaccaaagtctcaggatacaaaatcaatgtgcaaaaatcacaagcatacttatacaccaataacagacaaacagagacccaaatcatgagtgaactcctattcacaattgcttcaaagagaataaaatacccaggaatccaacttacaagggatgtgaaggacctcttcaaggagaactacaaaccattgctcaaggaaataaaagaggacacaaacaaatggaagaacattccatgctcatggataggaagaatcaatatcgtgaaaatggccatactgcccaaggtaatttatagattcaatgccatccccatcaagctaccaatgactttcttcacagaattggaaaaaactactttaaagttcatatgaaaccaaaaaagagcctgcattgccaagtcaatcctaagccaaaagaacaaagctggaggcatcacgctacctgacttcaagctatactacaaggctacagtaaccaaaacagcatggtactggtaccaaaacagagatatagaccaatggaacagaacagagccctcagaaataatgccacacatctacaactatctgatcttcgaccaccctgacaaaaacaagaaatggggaaaggattccctatttaacaaatgatgctgggaaaactggctagctgtatgtagaaagctgaaactggatccttccttacaccttatacgaaaattaattcaagatggattaaagacttaaatgtcagacctaaaaccgtaaaaaccctagaagaaaacctaggcaataccatttgggacataggcatgggcaaggacttcatgtctaaaacaccaaaagcaatggcaacaaaagccaaaattgacaaatggggtctaattaaactaaagagcttctgcacagcaaaagaaactaccatcagagtgaacaggcaacttacagaatgggagaaaatttttgcaatctactcatctgacgaagggctaatatccagaatctacaaagaactcaaacaaatttacaagaaaaaaacaaccccatcaaaaagtgggcgaaggatataacagacacttctcaaaagaagacatttatgcagccaacagacacatgaaaaaaatgctcatcatcactggccatcagagaaatgcaaatcaaaaccacaatgagataccatctcacaccagttagaatggcgatcattaaaaagtcaggaaacaacaggtgctggagaggatgtggagaaataggaacacgtttacactgttgttgggactgtaaactagttcaaccattgtggaagtcattgtggcggttcctcggggatctagaactagaaataccatttgacctagccatcccattactgggtatatacccaaaggaatataaatcatgctgctataaagacacatgcacatgtatgtttattgcggcactattcacaatagcaaagacttggaaccaacccaaatgtccaacaatgatagactggattaagaaaatgtggcacatataccccatggaatactatgcagccataaaaaaggatgagttcatgtcctttgtagggacatggatgaagctggaaaccatcattctcagcaaactatcgaaggacaaaaaaccaaacaccgcatgttctcattcatagctgggaattgaacaatgagaacacttggacacaggaaggggaacatcacacactggggcctgttgtggggtgaggggctgggggagggatagcattaggagatatacctaatgttaaatgacgagttaatgggtgcagcacaccaacatggcacatgtatacatatctaaaaacctgcacgttgtgcacatgtactctataacttaaagtataattaaaa

SEQ ID NO: 648 - DNA, 505 bp, Homo sapiens
  source 1..505: mol_type = other DNA
gtgttgatttaaaaatttgtctaaaaattatttgataatcctcttttcaacaagtggagactaattcctctcttcttgaatgtgagcaatgtttagtgacttactcctaataaatagaatgtgacagaagtgacaatgtgtgatctccaacaccaagtcattaaaaagcatggtgccttcctctttgtcttctatcttatctctcttgctctgtaggaaagcagtggccatgtatgtcatgaggacattccagtaaccccatgtggtaaggaaccaagtcagcctgccaacaaccactgaaaaactgagccctcctgctgacagccatgtgagaggaacacctgggaagtggatcctccaggcctggtcatacttcagatgactgcagcccaagccaacatcttgcttgagtggagcctcatgagtgactcagtcaaaaccacacagctgagatatttccaacccacagatactgagataataaatgtttattgctactaggttt

SEQ ID NO: 649 - DNA, 1217 bp, Homo sapiens
  source 1..1217: mol_type = other DNA
gcaaaagcaattgcgtttttgcatttttgaaatttgctgtttgatattggaatacattcttaaataaatgtggatcattttaatgcacatttctcactttatttttttgctaatgacttattgctgtttattttagaatatgctttttgtctaatgatgttagataaaaagcaaatttggagcagttttcttattcgagttcaaaatggttcataaagcagcgaagacaactcaaaacatcagtaacacatttggcccaggaactgctaacaaacatacagtgcagtggtggcttaagaagttttgcaaggaagagagccttgaagatgaggaacgtgatatgggccatgggaagttgacaacgaccaattgagagcaatcattgaactacatgaaaaattacagaagaactcagcgttgactattctacggtcattagggtcgttcagcattcgaagcaaattggaaaggtgaaaaagcttgataagtgggtgcctcatgagctgagcggaaatcaaaactatcgttttgaagtgtagtcttcttttatgctacgcaacaacaaaccatttctcaatcggattgtgacatgtaatgaaaagtgaattttatacaacaaccagctcagtggttggaccaagaggcagctccaaagcagttcccaaagccaaacttgcaccaaaaaaaaggtcatggtcactgttcggtggtctgctgcccatctgatccactacagttttctgaatcctggtgaaaccattacatctgagaagtatgctcagcaaattggtaagatgcaccgaaaactgcaatacctgctgcctgcattggtcaacagaaagggcccaattcttctccacgacaacacctgactgcgtgtcgcacaaccagtgcttcaaaagttgaaggaattgggctacaaagttttgcctcatccaccatattcacctgacctttcgccaactgactaccacttctgctagcatcttgacaactttttgcagggaaaacacttcagcatggtgcagaaaatgctttccaagagttcgtcaaatcctgaagcacggatttttatgctacaggaataaacaaacatttctcattggcaaaaatgtgttgattgtaatggttcctgttttgattaatagaatatgttttagcgtagttacaatgatttaaaattcgcagtctggaaatttaatttttgcatcaaccta

SEQ ID NO: 650 - DNA, 6118 bp, Homo sapiens
  source 1..6118: mol_type = other DNA
tcgaagatggccgaataggaacagctccaatctacagctcccagcgtgagcgacacagacgggtgatttctgcatttccaactgaggtaccgggttcatctcactgggacttgttggacagtgggtgcagcccacagagtgtgaggggaagcagggcggggcatcgctgcactggggaatcacaaggggttggggaattccatttcctagcgaagggaagccatgacagacagtatctggaaaatcggaacactcccaccctaatactgcacctttccaatggttttagcaaatggcacaccaggagattatatcccatgcctagctcagagggtcccaagcccatggagccttgctcactgctagcacagcagtccaagatcaaactgcgaggcggtggcgaagctggggaggggcgtctgccattcctgaggcttgactaggtaaacaaagcggccaggaagcttgaactgggtggagcccaccacagctcaaagaggtctgcctgcctctgtagacttcacctctggggacagggaatagctaaacaaaaggcagcagaaacttctgcagacttaaacatccttgtctgacagctttgaagagaatagtggttctcccagcactgagtttgatatctgagaacagacagactgcctcctcaggtgggtccctgacccctgagtagcctaactgggagacacctcctagtaggggcctactgacacctcatacaggtgggtgcccccctgagacaaagcttccagaggaaggatcaggcagcaacatttgctgttctgcggcctctgctggtgatacccaggcaaacagggtctgcagtggacgtccagcaaactccaacagacctgcagctgagagtcctgttagaaggaaaactaacgaagagaaagaaatagcatcaacatcaacaaaaatgacatccacaccaaaaccccacctgtaggttaccatcatcaaagaccaaaggtagataaaaccacaaagggggagaaatcagagcagaaaagctgaaaactctaaaaaccagagcacctcttctcctccaaaggattgcagctcctcgctagcaacagaacaaagctggacaaagagtgactttgatgagttgagagaagtaggcttcagaaagtcggtaataacaaactttcccgagctaaaggaagatgttcgaacccatcgcaaggaagctaaaaaccttgaaaaggattagacgaatggctaactagaataaacagtgcagagaggttcttaaatgacctgaaggagctgaaaaccatggcacgagaactacgtgacacatgcacaagcttcagtagccgattcgattgagtggaagaaagggtatcagtgattgacgatcaaaagaatgaaataaagcaagaagagaagttgagaaaaaaagagtaaaaagaaacaaacaaaacctccaagaaatatcagactatgtgaaaagaccaaatctatgtttgattggtgtacctcaaagtgacggggagaatggaaccaagttggaaaacactgcaggatattatccaggagaacttccccaacctagcaaggcaggccaacattcaaatataggaaacacacagatgccacaaagatactcctcgagaagagcaaccctgagacacataattctcacattgaccaaggttgaaatgaaggaaaaaaaaatcttaaagagcagccagagagaaaggtcaggttaccataaagggaagcacatcagactaacagcagatctctcagcagaaactctacaagccagaagagagtgggtgccaatattcaacattcttaaagaaaagaattttcaacccagaaattcatatccagccaaactaagcttcataagtgaaggagaaataaaatcctttacagcaagcaaatgctgagagatttgtcacaccaggcctgccttacaagagctcctgaaggaagcactaaacgtagaaaggaacaactggtagcagccactgcaaaaacatgccaaattgtaaagaccattgatgctaggaataaactgcatcaactaacgagcaaaataaccagttaacatcataatgacaggatcaaattcacacataacaatattaaccttaaatgtaaatgggctaaatgccccaattaaaagaaaaagactggcaaattggataaagagtcaagacccatcagtgtgctgtattcaggagacccatctcacctgcagaaacacacataggctcaaaataaagggatggaggaagatctaccaagcaaatggaaaataaaaaaaaagcaggggttgcaatcatagtctctgataaaacaaactttaaaccaacaaagatcaaaagagacaaagaaggccattacataatggtaaaggtatcaatgcgacaagaagagctaactctcctaaatatatatgcacccagtacaggagcacccagattcataacgcaaatccttagagacctacaaagagacttagactcccacacagtaataatgggagactttaacaccacactgtcaacattagacagatcaaggagacagagtgttaaaaaggatatccaggaattgaactcagctctgcaccaagcagacctaatagacatctacagaactctccaccccaaatcaacaaaatacacattcttctcagcaccacatcacacttattccaaaattgaccacatacttggaagtaaagcactcctcagcaaatgtaaaagaacagaaattataacaaactgtctctcagaccacagtgcaatcaaattagaactcaggattaagaaactcactcaaaactgcacaactacatggaaactgaacaacctgcttctgaatgattactgggtaaaaaacgaaatgaaggcagaaataaagatgttctttgaaaccaatgagaacaaagacacaacataccagaatctctgggacacatttaaagcagtgggtagaaggaaatttatagcactaaatgcccacaagagaaagcaggaaagatctaaaattgacaccctaacatcacaattaaaagaactagagaagcaagagcaaatacattcaaaagctagcagaaggcaagaaataattaagatcagagcagaactgaaggatatacacaaaaaacccttcaaaaaaatcaatgaatccaggagctggctttttgaaaagatcaacaaaattgatagaccgctaggaagactaataaagaagaaaagagagaagaatcaaataggcacaataaaaaatgacaaagaggatatcaccactgatcccacagaaatacaaactaccatcagacagtattataaacatctctacgcaaataagaaaatctagaagaaatggataaattcctggacacatacaccctcccaagaccaaaccaggaagaagttgaatccctgaatagaccaataacaggttctgaaattgaggcaataattaatagcctaccaaccaaaaaaaagtccaggaccagatggattcacagccgaattctaccagaggtacaaggaggagctggtaccattccttctgaaactattccaatcaatagaagaagagggaaccctccctaactcattttataaggccagcatcatcctgataccaaagcctggcagagacccaagaaaaaaagagaattttagaccagtatccctgatcagtcgaggcaaaaaccctcaataaaatactggcaaaccgaatccagcagcacatcaaaaagcttatccaccacgatcaagttggcttcatccctgggatgcaaggctggttcaacatacgcacatcaataaacataatccatcataaaacagaaccaaagacaaaacccacgattatctcaacagatgcagaaaaggcctttgacaaaattcaacagcccttcatgctaaaaattctcaataaactaggtattgatgggacgtatctcaaaataataagagctatttatgacagacccacagccaatatcatactgaatgggcaaaaactagaaccattccctttgaaaactggcacaagacagggatgccctctttcaccactcctattcaacatagtgttggaagttctggccagggaaatcaggcaggagaaagaaataaagggtattcaattaggaaaagaggaagtcaaattgtccctgtttgcagatgacatgattgtatatctagaaatccccatcatctcagcccaaaatctccttaagctgataagcaacttcagcaaagtctcaggatacaaaaccaatacgcaaaaatcacaggcattcttatacaccaataacagaaaagcagagagccaaatcatgagtgaactcccattcacaactgcttcaaagagaataagatacctagcaatccaacttacaagggatgtgaaggacctcttcaaggagaactacaaatgattgctcaaagaaataaaagaggacacaaacagaatgaaagaacattccatgctcacgggtaggaagaatcaatatggtgaaaatggccatactgtccaaggtaatttatagattcaatgccaaccccatcaagctaccaaagactttcttcacagaattggaaaaaaactactttaaagttcatatggaaccaaaaaagagcctgcattgccaagacaatcctaagcaaaaagaacaaagctcgaggcatcatgctacctgacttcaaactatactacaaggctacagtaaccaaaacagcatggtactggtaccaaaacagagatacagaccagtgtaacagaacagagccctcagaaataatactacatcctacaaccatctgatttttgacaaacctgacaaaaacaagaaatggggaaaggattccccatttaataaatggtgctgggaaaactagctagccatatgaagaaagctgaaactggattccttccttatgccttatacaaaaattaatccaagatggattaaagacttaaatgttagacctaaaaccataaaaaccctagaagaaaacctaggcaataccattcaggacataggcatgggcaaggacttcatgactaaaacaccaaaccaaatggcaacaaaagccaaaattgacaaatgggatctaattaaactaaagagcttctgcacagcaaaagaaactaccatcagagtgaacaggcaacctaaagaatgggagaaaatttttgcaatctacccatgtgacaaagggctaatatccagaatgtacaaagaacttaaagaaatttacaagaaaaaatcaaacaaccccatcaaaaagtgggcgaaggatatgaacaaacacttctcaaaagaagacatttatgtaaccaacagacacatgaaaaaaaggctcatcatcactggccatctgagaaatgcaaatcaaaaccacaatgagataccatctcacaccagttagaatggcgatcattaaaaagtcaggaaacaacaggtgctggagaggatgtagacaaataggaacacttttacactgttggtgggactgtaaactagttcaaccattgtggaagacagtgtggcgattcctcaaggatctagaactagaaataccatttgacccagccatcccattactgggtatatacccaaaggattataaatcatgttgctataaagacacatgcacatgtatgtttattgtggcactattcacaataccaaagacttggaaccaacccaaatgtccatcaatgatagactggattaagacaatgtggcacatatacaccatggaatactatgcagccataaaaaaggatgagttcctgtcctttgtagggacatggatgaagccagaaagcatcattctgagcaaactatctcaaggacagaaaaccaaacaccgcatgttctcactcataagtgggaattgaacaataagaacacctggacacagggtggggaacatcacacacggtggcctgtcgcagggtgggggaagagaggagggatagcattagaagaaatacctaatgtaaatgatgagttaatggatgcagcacaccaacatggcacatgtatacatacgaaacaaacctgtacgttgtgcacatgtatcctagaacttaaaaaaaaagaaaaaaa

SEQ ID NO: 651 - DNA, 1377 bp, Homo sapiens
  source 1..1377: mol_type = other DNA
tgagaggtgacagcgtgctggcagtcctcacagccctcgctcgctctcggtgcctcctctgcctgggctcccactttggcggcacttgaggagcccttcagcccacggctgcactgtgggagcccctttctgggctggccaaggccggagccggctccctcagcttgcagggaggtgtggagggagaggcgcgagcgggaaccggggctgcgcgccgcgcttgcgcgccagctggagttccgggtgggcgtcggcttggcggaccccgcacttggaacagccggctggccctaccggccccgggcaatgaggggcttagcacctgggccagcggctgcagagggtgtactgggtcccccagcagtgccagcccaccggcgctgcgctcaattcctcgcctgtccttagctgccttcccgtggggcagggctcgggacctgcagccgccatgcctgagcctcccataccctccgtgggctcctgtgcggcccgagcctccccgacgagtgccaccccctgctccatggcacccagtcccatcgaccacccaagggctgaggagtgcaggtgcacggtgcgggactagcaggcagctccacctgcatcccctgtgcgggatccactgggtgaagccagctgggctcctgagtctggtggggacatggaggacctttatgtctagctcagggattgtaaatacaccaatcggcactctgtatctagctccaggtttgtaaaaacaccaatcagcaccctgtgtctagctcagggtttgtgaatgtgccaatctacactctgtatctagctactctggtggggccttggagaacctttgtgtctagctcagggattgtaaacacaccaatcagcaccctgtcaaaacagaccactgggctctaccaatcagcaggatgtgggtggggccagataagaataaaaccaggctgccccagcccgcagtggcaacccgctggggttcccttccacattgtggaagttttgttctttcgctctttgcaataaatcttgctactgctcacgctttgggtccacactgcttttatgagctgtaacactcaccacgaaggtctgtagcttcacttctgaagccagcgcgaccacgagcccaccgggaggaatgaaaaactccagacgcactgccttaagagctgtaacactccccgcaaaggtctgcagcttcactcctgagccagcgagaccacgaacccaccagaaggaagaaactccgaacacatctgaacatcagaaggaacaagctccagacgcaccaccttaagagctgtaacactcaccgcgagggtccgcggcttcattgttaaagtcagtgagaccaagaacccaccaattccagacaca

SEQ ID NO: 652 - DNA, 2975 bp, Homo sapiens
  source 1..2975: mol_type = other DNA
tgcttgctttctcagcagggaggcttgtggactggggcaagttctcagccctggtcactggctacctggaaatagacttggtggtgttggggaagcacagtgggactgagaacaccctttaggactgcaggctgcataggagcagggtgaagcctgtgactgctggctttcccccacttgcctggtgacctgtatgactcagcagaggcagccataatcaccccgggaatataaatccattggactgggaaccacactcccatcccctacagcagctgcagtaagccccgcccaaggagaggctgagctcagacacccatatctctgcccccacttggtgatctgtctctacccatcctggtagctgaagacaaaaatcataatcataatctcttgggaactctatggccctgcccactgcctaagaaacctgactacttaaccaggtgtgcctagggcaagttcgcatttccttatagggctgcagctgatgcactctcaaaagtgccacctcctggctagaggccaacaaagacaaaagcagcaccctaaataaaaacacgaccaaagtccctcacaaagtccacttcactcccctgctacctccaccagagcaggtgctggtatctatggctgcaagacctgaagatagatcacatcacaaaactccttgaaaacactcctcagtaccagcctggagcccagtagctccactgggtggttagacccagaagagtggaaacaatcactacagtttagctctcaggaagccccattcctaggggaaggagcagaacaccacattaaggaagcaccccgagggacaaaagaatctgaacagcagaccttgaatcccagagcttcccatcgacatagtctacccaaataagaaggaaccagaaaaacaattctgattctttaataccccctgaaaacaaggttctttaataccccctgaaaattataccagctcaccaagaatggatccaaactaagatgaaatctctgaattgccaaaaaataattaataaggtcgattattaagctaatcaaggaggcacaagagaaaggttaagtccaacttaaataaaaagcatgatacaggatataaaaagaaaattcttcagtgagatagatagcataaataaaaaacaatataacctctggaaatcaaggacacacttagagaaatgaaaaatgcgctggaaagtctaagcaatcaagttgaacagcagaaaaaaaaaaacttaagcgcttgaagacaaggcatttgaattaactcaaaccattaaagtcaaaaacaaaagaattttttcaaaaaatgaacgaaggctccaaaaagtttgggacaatgttagatgtccaaacccaagaataattggtgttcccaaggaagaagagaaatctaaaaatttggaaaacatatttcagggaataattgaggaaaacatctccagccttgccagagatctagacatccaatgaaagaagctcaaagaagacctggcaaattcatcacaaaaaaaaatcacccgggcacatagtcatgaggttgtctaaagtcaagatgaaggaaagaaccttaagagatgtgaagcaaaagcatgagataacccatgaagtaaaacctatcagattaagagcagatttctcagcagaaaccctacaagccagaatggattggggacctatttttagcctccttaaacaaaacaattatcagccaaaaattttgtatccagtgtaactaagcttcataaataaaggaaagattcagtctttccctgataaacaaatgctgagagaatttgccgctaccaagccagcactacaagaactgctaaaaagagctctaaatcttgaaacaaatcctcctcaaaatacactaaaatagaacctccttaaagcataaatctcacaggacctatataacaataacaacattaaaaaaaaaaaaggtattcaggccacaaatagcacacgaatagaatagtaccttacatctcagtactaacattgaacgtaaatagcctaaatgctccacttaaaagatacagaatggcagaatagatacaaattcacaaaccaagtttctgctgtcttgaggagactcaacacataaggactcatataaacttaaggtaaatgggtgaaaaaagatattccatgaagatcgacaccaaaagtgagcaggaatagctattttttctatcagataaaacaaacttttaagcaacagcagttaaaaatgacaaaaggggacattatatgatgataaaaggactaggccaacaggaaaacattgcaaatctaaatatatatccaccaaacactggagcttccaaatttacagaacgattactaccagactgacgaaatgaaataaacagcaaaacaataaagtgggggactttaatactccactgacagcacttgtcaggtcatcaagacagaaggtcaacaaagaaacaatggacctacagtacctacattgtactccacaacaaatggacttaacagatatttacagaacattctacccaacaactgcagcatacacattctactcatcagcacatggaacactctccaagatagaccatatgataggctacaaaacaagtcccagtaaattcaaaaaaatcaaaattatatcaagtattccctcagaccacagtggaaaaaaattggaaatcaactctgaaaggaacccttaaaacatgcaaatacatggaaattaaataacctgctcctggatgatggttgggtcaacaatgaaatcaagatggaagttaaaatttttttttgagctgaacgacaatagtgacacaacctatcaaaactgggatacagcaaaacagtgctaataggaaagttcacaggattaaatgcctatattaaaaagtctgaaagagcaaaaatagacaatctaaggtcacgtctcataaaactggagaaacaagaacaaacaaaac

SEQ ID NO: 653 - DNA, 300 bp, Homo sapiens
  source 1..300: mol_type = other DNA
gctaggcgcagtggctcatgcctataatcccggcactttgggaggctgaggtgggcggatcacttgaggtcaggagttcgagtccagcctggccaacatggtgaaaccccatctctactaaaaatacaaaaaactggccaggcatagtggtgcatgccagtaatcccagctacttgggaggccaaggtgggagaatctattgaacctgggaggtggaggttgcattgagccaagatcacaccgctgcactcaagcctgggtgacagtgagactctgtctcaaaacaaacaaaacaaaaaa

SEQ ID NO: 654 - DNA, 1304 bp, Homo sapiens
  source 1..1304: mol_type = other DNA
gaaacagcaatattaaaatcaggccaattaataactcctcaatggctgctaagcgttcaagtggaatgaagagtcacacatgtctcactttaatcaaaacctagaaatgattaaacatagtgagaaagacatgttaaaagtcaagatagggtgaaagttagatctcttgcactaaacagcccagttgtgaatacaaataaaatgttcttgaaggaaattgaaagtgctactatagtaagcacacaaattatcagtaagtgaaacagctttattgatgatatggagaaggtttcaacaatattcccttaagccaaagcctaatctacagtaagcccttaactctcttcaattctatgaaggctgagagagaagacgaagctgcaaaagaaaagttggaagctggcaaagactgattcatgaggttgaaagaaagaagtcacctccataacataaaagtgcaatgtgaagcaggaaatgctggtgcagatgctgtagcaagttatccagaagatctagctaacattgtgaatgagggtggctatgctaaacaacagattttcagtgtatatgaaagagtcctatattagaagaagatgccatctaggatttcatatctaaatagaagtcaatgaccagtttcaaagcttcaaagaacaggctgactctcagtaagatctaatgcagctggtgatttaagatgaagccaattcccactccaaaaattctagggcccttaagaatcatgaaaaatctactctgcctgtgctcaaaaaatggaacagcaaagcctggatgatagaatatctgtttatagcatggcttattgaatatttaaaagccattgttgagacctacttctcagaaaaaaagatatttcaaaatattactgcttattgtcaaagcatctgtcacctaggaactctgatggagatgcccaaggagattattgtttttatgcctgctaacacaatactcattctgcagcccatggatcaggagtaatttttgctttcaagtcttattatttaagaaatacatttaaaaaggttatagatgtcatagagagtgattcttctgacgaatctgggcaaagtaaattaaaaaccttctagaaaggatttaccattctatatgccattaaaacatctgtgattcatgggaggaggtcaaaacatcaatattaacagaagtgcagaaaaagttgattccaatcctcatggataactctgagaggtcaagactccagtggaagaagcaactgcagatgtgatggaaatagaacaagaactagaattagaagtgga

SEQ ID NO: 655 - DNA, 723 bp, Homo sapiens
  source 1..723: mol_type = other DNA
tggttagatcttttttttttttaagcccaaatatcttctccatgcagaaatctgcaatttcaaataaattagtgggcaattacttggaatgagtcaaaactcttttttggtagcaattttgattctacgcagaggcacccttctgtatgaaagtagtgacaataaaaatcaagtttccagattttcataataaatgtaagttctgccatagacttatattagatttaaagaatatggattgctttcaacagcatagaatattggcattccagatagtcatcatagaatccagccctgaactgactataccttaatcctgaaacaagctcacgtaagtcaaggatatttgagatagacttctcaatgggcaggccaaaccttgctctagttttatatatgttgtcaatgtattaatttagtatctaaattatctaaattctggatagtgcccactatatttactagcgatatttaatttttagtgtttatgaatgggtaatatatgaatattaaaataatttttctttttcctataaaatacctagctaattatgttactttaataccctttgtagaaatttatatgatagattttatttagaatttagtactaggaaataatctgtttctccaaatgaactggcattcactcctttatcaaataagtaaaatcatatcatgtggcatattgtccttatggccttaactgaaggaaaatcaaaa

SEQ ID NO: 656 - DNA, 511 bp, Homo sapiens
  source 1..511: mol_type = other DNA
atagtgagtgagatcagagatttacaaagtcatattaacattacaggagactcctagattggactatacttgattcactgcatcatcagaattttttaaaaatatattaatcctaaaggaggcttctcagacatggaagtatagaaaaagaaacatcagaaagaaaaataaaccctgactttccacattcaagtgttgcccatgggagaggaaattttggccaaagatttggagtattattattctgtggtcaaagttatctttatagtggacaagagtttttcaaggtctcttagctaaggattacttctttttaaaaaactgacttagattgttctgagtacaagcatgcgatttcccatgtagatttgcccaatggtaaggaatgtgtaagtcatgctgatgctgttttatcagttgatgtgactgtcaggtttctcattcagagataacaactgccttatcccttgagctctgtgggcttagttaatgagtgacaaccttgagagat

SEQ ID NO: 657 - DNA, 1729 bp, Homo sapiens
  source 1..1729: mol_type = other DNA
caatgagaaaagagaagggatccaaatagaacatccacattccccacctccatctgtgcccccacacttttccttctctcatttgttctaggtaaatagctcataaccctagcaacagatagtctctcttgttgtatgcatgtatcctttctcacctcctcgtgaacagcattcccctctgtctcctgcatcatcaattttttgttctctattggctccttctcattagtatcacaacatgccattgttttgtacactttaaaaaactctctttacatcatctggtcctacaactaacgctccatttcctccctcccttttcaataaaaatattcaagtgatgtataccatcaccttcttcaatgtctttctactctgtcaaacacattacaaacaagctttcatgtctacttcctccatgaaaactggcaacatcatggtcatcaatgatttcctttgctagattaattctcaatcctcatctttaaaacaactgatcagccctctacttcttgaaacacttccaggattccatattctcctgctttcccttttacatggaatgcagctctttttcagactcctttttggtttctcctcatctcataatgctgacgtacaccattatgtaccagattttatgacgtaaagtctggtccctggtcatcttcaatattctaaactcacacacttttgatgcattcaatctcttcgcttttacaacccgctatatgatgaagagtcctaaatgtatgccattagcttggtcttccagctaactgcatgcttgacatttccatttggatatctaaaacccatctaacacctaacatatccaaatccagattcttaatcccaattacatcttcttcctgttctttccaatctcagttaacagaaactcttatctttccagttgcttaggcaattacattctccttaatttcttttgctctcacattccatatcctatctctcagcaaaccctgaggaatacaccctcaaaatatatatacagaatatgaactactcaccacttccactgctatcatccgggtctaagccaccatgatctgtcacataaattatgatagcctaactgttatccctgcttctattcttgctttcttcagtctgttctcaatacagtaggcagagtaatggtatcaaacagatgtgttagatcatgtcattcctcttgtcaaaaggctccaatggcctccaaatggcttcaagtaaaggttatcattacaatagcttagcagaccatgtagtactatctggcccctatgacatttaaaatcccatatcctacttctcctctatcctccattccacttcagctacacaagcttctttgctgatccctgaacacagcaatgtgcccggcctctgcacttgctatttctctgcgcccggaaactcttgccccaaatatatggcttactccctcaactgcttcaagtctactgaaatgtcaccttctccagaggacttccggtaaaatcctattttaaattactaaacacacactctttttcctgctttatgtaataagtccatagcacttattacggtttcaccttatatttttcttatgtactacatatactgtctccctccactagaatgtatattccaagaagccagaagtttcttctttgctttattccagtgtcaagaacactgcttggcacgcagtaagcaatcaacaaacaattgttgacta

SEQ ID NO: 658 - DNA, 307 bp, Homo sapiens
  source 1..307: mol_type = other DNA
gccgggtgcagtggttcacgcctgtaatcccagcactttgggaggccgaggcgaacagatcacctgaggtcgggaattcaagactagcctgaccaacatggggaaaccccgtctcgactgaaaatacaaaattagccgggcgtggtggcacatgcctgtaatctgagctactcgggaggctgaggcatgagaatcgcttgaatccgggaggcggaggttgtggtgacccgagatcacatcattgtcctccagcctgggtaacaggagtgaaactctgtctaaaaaagaaagaaagaaagaaaaaaga

SEQ ID NO: 659 - DNA, 303 bp, Homo sapiens
  source 1..303: mol_type = other DNA
gacgggtgcggtggctcacgtctgtaatcccagcactttgggaggctgagacaggtggatcacttgaggtcgggagttcgagaccagcctggccaacatagcaaaaccctgtctctactaaaaatacaaaaattagatgggtgttttggcacctgcctgtaatctcagctactcaggaggctgaggcacaagaatcgcttgaatccaggaagcaagcggaggttgcagtgagttgagatcgcactccagcctgggtgacagagtgagattctgtctcaaaagcaaactaacaaagaaaaacaa

SEQ ID NO: 660 - DNA, 2335 bp, Homo sapiens
  source 1..2335: mol_type = other DNA
agacatggggagagtgtaagcaacatggaaaacataattcaggatatcatccgggagaactttcccaagttagctatagaggccaacattcaaattcaggaaatgcagagaaccccagtaagctacttcacaagaggatcatccccaacacacacaatcagcagattctccaaagttgaaagaaaaaatgttaaaggcagctagacagaaaggtcaggtcacttacaaagggaagtccatcagactaactgtggacttctcagcagaaactctacaagccagaagagactgggggccaatatttaacattcttaaagaaaaattccaacacagaatttcatatccaggcaaactaagcttcataagtgaaggagaaataagatccttttcagacaagcaaatgctgagataattcattaccaccagatctgccttacaagagctcctgaaggaaggagtaaatatggaaagaccattgccagccactacaaaaacacactgaaggacacagaccagtgacactataaagtaaccacataaacaagtctaaaataaccagctaacagcatgatagcaggatcagatccacacatgtcaatactaaccttgaatgtaaacgggctacatgccccaattaaagggcacagagtggcaagctggataagaaccaagacccattattatgctgtcttcaagagacccatctcacatgcaatgacacctacaggctcaaaataaaggcatggagaaaaatctaccaagcaaatggaaaacagaaaaagcaggggatgcaaccctaatttcacataaaacaccctttcaaccaacacagatttttaaaaagggcattacataatggtaaaggattcaatttagcaagaagacgtaactatcctaaatgtatatgcacccaacacaggagcacccagattcacaaagcaagttcttagagacctaaagagactgagacttccacacaagaatagtgagagacttcaacaccccaccaacagtattagatcaccgaggcaaaaaattaaaaaagatactcaggacctgaactcagtagtggatcaaatggacctgatagacatctacattacctctccaccccaaaacagaatatacagttttctcattgccacatgaaacatactctaaaatcaatcacataatcggacataaaacacactcagcaaatgcaaaataactgaaatcaaaacaaccacactctcggaccacagagcaatcaaactggaaatcaaaactaagaaattctgtcaaaaccatacaattatatggaagttgaataacctgctcctgagtgaattttgggtaaataatgaaatttaggcagaaaaagaaattctttgaaaccaatgaaaacaaagatacaacataccagaatccctgggacacagctaagacagtgttaagagggaaatgtatagcactaaatacccatatcaaaaacttagatctcaatttaaaaacctaacatcacaactaaatgaactagaaaaccaagagcaagccaatcccaaagctagcagaagacaagaaacaaccaaaatcagagctgaactaaaacagctttagacatgaaaaaccatccaaaacctcaatgggtcctggagttggttttttgaaaaaaaaaaattaacaaaatagatcactacctagactaataaagaagagagtagatccaaataaacacaattagaaatggcaaagggcatattacaaatgaactcacagaaatacaaataaccatcagagaatattatgaacacctctacacacataaactagaaaacctgtaaaaaatggataaattcctggacacatcctcccgagactgagccaggaagaaatggaattgctgaatagactagtaacaagctctgaaatttaatcggtaataaatagcccaccaattaaaaaaagcccaggaccagagggattcacaggcaaattctatcagatatataaagatgagctggtaccattcctactgaaactattccaataaattaaggaagaaggactcctccctaacttattctatgaggccagcatcatcctgataccaaaacctggcagacacaacaaaaaaagaaaacttcaggccaatatccttgatgaacatcaatgcaaaaatcctcaacaaaatactcgcaaaccaaatccaacaggacatcaaaatgcttatccaccacgatcaagtaggctttgtccctggaatgcaagtttggatcaacatacacacacaaatcaaaaaatatgattcatcacataactaaagacaaccacacaattatctcaatagatgcac

SEQ ID NO: 661 - DNA, 1510 bp, Homo sapiens
  source 1..1510: mol_type = other DNA
tccctctccctctcccgctccctctccccacggtctccctctccctctctttccatggtctccctctgatgccgagccgaagctggactgtactgctgccatctctgctcactgcaacctccctgcctgattctcctgcctcagcctgccgagtgcctgcgattgcaggcgtgcgccgccacgcctgactggttttcgtattttttttggtggagacggggtttcgctgtgttggccgggctggtttccagctcctaaccgcgagtgatctgccagcctcggcctcccgaggtgccgggattgcagacggagtctcgttcactcagtgctcaatggtgcccaggctggagtgcggtggcgtgatctcggctcgctacaacctccacctcccagccgcctaccttggccgcccaaagtgccgagattgcagcctctgcccggccgccaccccgtctgggaagtgaggagcgtctctgcctggccgcccatcgtctgggatgtgaggagcccctctgcccggctgcccagtctggaaagtgaggagcgtctctgcctggccaccatctcatctaggaagtgaggagcgtctctgcccggccgcccatcgtctgagatgtgcggagcgcctctgccccgccgccccgtctgggatgtgaggagcgcctcttcccagccgcgaccccgtctgggaggtgaggagcgtctctgcccagccaccccatctgagaagtgaggagaccctccgcccggcagccaccccgtctggcaagtgaggagcgtctccgcccggcagccaccccgtccgggagggaggtgggggtcagccccctgcccggccagccgccccgtccgggagggaggtggggggtcagccccccgcccggccagccgccccgtccggaaggtgaggggcgcctctgcctggctgcccctactgggaagtgaggagcccctctgcccggccaccaccccgtctgggaggtgtactcaacagctcattgagaacgggccatgatgacaatggcggttttgtggaatagaaatgggggaaaggtggggaaaagattgaaaaatcggatggttgccgtgtctgtgtagaaagaggtagacatgggagacttttcattttgttctgtactaagaaaaattcttctgccttgggatcctgttgatctgtgaccttacccccaaccctgtgctctctgaaacatgtgctgtgtccactcagggttaaatggattaagggcggggcaagatgtgctttgttaaacagatgcttgaaggcagcatgctcgttaagagtcatcaccaatccctaatctcaagtacccagggacacaaacactgcggaaggccgcagggtcctctgcctaggaaaatcagagacctttgttcacttgtttgtctgctgaccttccctccactattgtcctgtgaccctgccaaatccccctctgcgagaaacacccaagaatgatcaataaaaaaaataaataattaaaaaaaaaaa

SEQ ID NO: 662 - DNA, 6391 bp, Homo sapiens
  source 1..6391: mol_type = other DNA
gttgctggcaagctggccaaatagaaacagctccagtctgcagctcccagtgagatcaacgcagaaggcaggtgatttctgcatttccaactgaggtacccagttcatctcattgggactggttggacagtgggtgctgcccacagagggcgagcagaagcagggtggggtgtcaccttacctgggaagcacaaggggttggggagctccctctcctagccaagggaagctgtgagggactgtgccatgaggaattgtgcgctccagcccagatactgtgcttttcccatggtctttgcaacccgcagaccaggatattccctagggtacctacaccaccagggccctaagtttccagcacaaaactgggtggctgtttggacagaaaccaagctacgtgaaggagttttctttttcataccccagtggcttctggaacaccagcaagacagaaccattcactcccccggaaaggggctgaagtcagagaaccaagtggtctggctcgggggtcccaccccctcagagcccagcaggctaagatccacgggcttgaaattcacgctgtcagcatggcagtctgaggtcgacctgggatgctccagcttggttgggggaggggtgtccaccattgctgaagcttgagtaggaggtataccctcacagtgtaaacaaagccaccaggaagatcgaactgagcggagcccactgaagctcagcaaggcccctgtggccagactgtctctctagattcctcctccctgggcagggcatctctgaaaaaaaaggcagcagccccagtcaggggcttatagataatacccccaactccctgggacagagcacctggggaaagaggcagctataggcgcagcttcagcagatgtaaatgttccctgcctgatgactctgaagagagcagcggatctcccagcacagcgttcgagctctgctaagggtcagactgcctcctcaagtgggtccctgacccccatgtctcctgattgggagatacctcccagtaggggccgaccggcacctcatacaggagagctctcgctggcatctggcaggtagccctctgggacaaagcttccagaggaaagaacaggcagcaatctttgctgttctgcagcctctgctggtgatacccaggcaaacagggtctggagtggacctctagcaaacctgcagcagaggggcctattagaagaaaaactaacagaaatgaataacatcaacatcaacaaaaaggaagtccactgacagaccccatccgaaggtcacctacctcaaagaccaaagatagatgaatccacgaagatggggagaaaccagcccaaaaaggctgaaaattccaaaaaccagaacgcctcttctcctccaaaggatcacaactcctcgccagtaagagaacaaaacaggatgcagaatgagtttgacgaattgacagaagtaggcttcagaaggtgggtaataacaaactcctctgagccaaagaaacatgttctaaaccaatgcaaggaagctaagaaccttgaaaaaacattagacaaattgctaactagaataaccagtttagagaagaacataaacgacgtgatggagctgaaaaatacagcacgagaacttcgtgaggcatacacaagtatcaatagccgaattgatcaaacagaagaaaggatatcagagcttgaagatcaacttaaatacagcgtgaagacaagattagagaaaaaagaatgaaaagaaacaaacaaagcctccaagaaatatgcgaatatgtgaaaagaccaaacctacgtttgattggtgtacctcaaagtgacagggagaatggaaccaagttcaaaaacactcttcagaatattatccaggagaacttccccaacctagcaagacaggccaacattgaaattcaggaaatacagagaacaccacaaagatactccttgagaagagcaaccccaagacacataatcatcagattcactaaggttgaaatgaaggaaaaaatgtgaagggcagacagggaggaaggttgggttacccacaaagggaagcccatcagactaaccatggttctctctgcagaaaccctacaagccagaagagagtgggggtcaatattcaacattcttaaagaaaagaatgttcaacccagaatttcctatccaggcaaactaagctttgtaagtgaaggagaaataaaatcctttacagacaagcaaaagagattttgtcaccacccggcctgccttacaagagctcctgaagaaagcactaaatatggaaaggtaaaaccggtaccagccactgcaaaaacataccaaattgtaaagaccatcgacactatgaggaaactgcatcaactaagacaaaataaccaactagcatcataatgagaggctcaaattcacacataacaatattaaccttaaatgtaaaaggactagatgccccaattaaaagacacagactggcaaattggatagagtgtcaagaaccatcagtgtgctgtattcaggagactctcatgtgtaaaaacacgcataagctcaaaataaagggtaggaggaatatttactaagcaaatggacagcaaaaaaaaaaaaaaaagcaggggttgcaatcctagtatctgataaaacagactttaaaccaacaaagatcaaacagcaaagaaggacattacataatggcaaagggatcaatacaacaagaagagctaacgatcctaaatatatatgctaactatccgaattatatatacacccaataaaggagcatccagattcataaagcaagttctcagagacctacaaagagacttagattcccacacaataatagtgggagactttaacagtgcactatcaatattagatcaatgagacagaaaattaacaaagatattcagaactcagctctgggccaagcgggcccaatagacatctacagaactctccaccccaaatcaacagaatatacgttcttctcagcaactcattgctcttattctaaaattgatcacataattggaagtaaaacactactcagcaaatgcaaaagaatggaaatcataacattctctcggaacacagtgcaattaaattggaagtcaggattaagaaactgactcaaaactgcacaacaacatggaaactgaacaacctgctcctgaatgactaccgggtgaataacgaaatgaaggcagaaataaataagttctttgaaaccaatgagaaaaaagacacaatgtaccagaatctctgggacacacttaaagcagcatgtggagggaaatttatagcactagatgcccacaagagaaagcaagaaagatctaaaatcgacaccctaacatcacaattaaaagaactagagaagcaagagcaaacaaattaaaagctagcagaaggtgagaaataactaagatcagagcagaactgaaggagatagagacatgaaaaacccttcaaaaaaaaaaaaaaaaatcaatgaatccaggagctgattttttgaaaagatcagcaaaacagactgctagccagactaataaagaaaagggagaagaataaaatagacacactaaaaaatgataaaggggtatcaccactgatcccacagaaatacaaactaccatcagagaatactataaacacctctatgcaaataaactagaaaatctagaagaaatggataaattcctggacccatacaccctcccaagtctaaaccaggaagaagtcaaatcccaataacaagttctgaaattgaggcagttaattaatagcctaccaatcaaaaaaattccaggaccagatggattcacagacgaattctaccagaggtacaaaaaggaagtggtaccattccttctgaaactattccaaggaacagaaaaagagggaatcctccctaacttattttatgaggccagcatcatcctgatactaaaacctggcagagacacgacaaaaaaataaaatttcaggccaatatccctgaacatcaatgcaaaaatcctcaataaaatactggcgaaactaatccagcagcacatcaaaaagcttatccaccacgatcaagtcagcttcatccctgggatgcaaggctggttcaacatatgcaaataaatatacgtaacctatcacataaacagaaccaatgacaaaaaccacatgattatctcaatagatgcagaaaaagccttcaacaaaattcaaaaccccttcatgctgaaaactctcaataaattaggtattgacggaacctaccttgaaataataagagctattatgacaaacccacagccagtatcacactgaatgggcaaaaactggaagcattccctttgaaaactagcacaagataaggatgccctctctcaccactcctattcaacatagcatcggaagttctggccaggggatcaggcaagggaaagaaataaagggtattcaattaggaaaaggggaagtcaacttgtctgtttgcagatgacatgattgtatatttagataacccaattgtctcagcccaacatctcctaacactgataaaaacttcagcaaagtctcaggagacaaaatcaatgtgccaaaatcacaagcattcctatacaccaataacagacagagggccaaatcatgagtgaactcctattcacaattgctacaaagagaataaaatacctaggaatacaacttacatgggatgtgaaggaccttttcaaggataactacaaaccactgctcaaggaaataagagaggacacaaatggaaaaacattccatgcccacggataggaagaatcgatatcgtgaaaatggccatactgcccaaagtaactgatagattcaatgctattcccatcaagctaccattaactctcttcacagaattagccaagacaatcctaagcgaacagaacaaagctggaggttatcatgttacctggcttctaactatactacaaggatacagtaaccaaaacagcatggtattggtaccaaaacagatatatagatcaatggaagagaacagaagcctcagaaataatatcacacatctacaaccatttgatctttgacaaacccgtcaaaaataagcaatggggaaaggcttccctatttaataaatggtgttgagaaaactggctaaccatatgcagaaagctgaaactggatcccttccttacaccttatacaaaaattaactcacaatggattaaagacttaaatgtaagacctaaaaccataaaaaccctagaagaaaacctaggcaataccattcaggacataagcatgggcaaggacttcatgactaaaacactaaaagcaatggcaacaaaagccaaaatagacaaatgagatctaattaagctaaagagcttctgcacagcaaaagaaactatcatcagagtgaacaggcaacctacagagtgggagaatatttttgcaatctatccatctgataaaggtctaatacccagaatctacaaagaacttaaatttacaaaaaaaaaaaaaaaaaaacaaaaacaaaaaaaacgtcaaaaagtgggcaaaggatatgaacagacacttcttaagagaagacatttatgcagccaacaaacatggaaaaaaagctcatcatcactggtcactagagaaatgcaaatcaaaaccacaatgagataccatctcacaccagttagaatggcaagcattaaaaagtcaggaaatgacacatgctgaagaggatgtagagaaataggaatgcttttacactgttggtgcaagtgtaaattagttcaaccattgtgaagacagtgtggtgattcctcaaagatctagaaccagaaataccatatgacccagcaatcttattactgggtatacaccccaaggattataaatcattccactataaagacacaagcacacgcatgtttactgcggcactattcacaatagcaaagacttggaaccaacccaaatgcccatcagtgatagactggttaaagaaaatgtggcacgtatacaccatggaacactatgcagccataaaaaaggatgaattcatgtcctttgcagggacatggatgaagctggaaaccatcattctcagcaaactaacagaagaacagaaaaccacacactgcatgttctcataagtgggagctgaacaatgagaacacatggacacagggaagggaacatcacacaccagggcctgtcgaagggtcagggggctaggggagggatagcattaggagaaatacctaatgtagatgacaggttgatgggtgcagcaaaccaccatagcacatgtatacctatgtaacaaacctgcacgttctgcacatgtaccccagaacttaaagtattaaaaaaaaaaaaaa

SEQ ID NO: 663 - DNA, 293 bp, Homo sapiens
  source 1..293: mol_type = other DNA
gtttctgacctttattctcccggctcggcctcccttccccacctcgcgtctcgccagcttccctcatgtccttccttcccccgggcatcttcgttttctgcacagaaccacccccgccgcccgactttcttccccccagttactcatcgcgatatctatgttttaatgtctgtgttctctactaagattgttagctccataagacttgagactatgtctgttttggtctccatcatctaaccagcacagtacctggtacataattggcattcagtaagtatgaatgaaggaat

SEQ ID NO: 664 - DNA, 2418 bp, Homo sapiens
  source 1..2418: mol_type = other DNA
aaggaatagggttctaaggcatcctatgcttccttctacttaaagacctttctcctccccccttctataaacaccccaagatctggctttaccccttactactagttcttattacaggcttctacagatccctgtcactccccattattcctggagatcttaggtcctgacttactgctgctttctccagtactactcctgtcatcattcctgatgtgtttaatattgatgtagagaatccttccagttgcatggcatcttaattccttgacttccttcctgtcttccaatgaccttgtcccacacacaatctcagccacttacccaacagtcattctctggacctcatcattcctaacaaccctccatactctcaatttcaaatattccactctggaaagcagatccattgcctcctatgattcttcattcccaaccaggacaagcagtccactattctaaagccattttcctgtcctttaaacctcgtatgtcctcacttctttattacccagcttctatgtcaggtgtgtcattccttgatgtgtatacaacccccacttctttgccctttattgttttcatattctccaaccaaacgctactctaggtaaatccaactttttaccaaccctgaatttatacctgtgtagctgaaatggctggggaaagaaaactacaaccattagaaatgttctgcctttaagttaacgattgtgaaccccaaaagggttatagcagtacccagtaatcctactgcatcccccagtgcattccctctccccgtttcctaagagaggtatttcacgctttctgtttcccctgacatcacaactcctcccattcccttactcccagctaatgaatgccctttctccttatttcatggagaaaatagacacaatcagaagagaaattctgtatgttctcatagccacatctaccctcccacctgcatttgtgtccatatgccctgccttccctcctgttactcctgtttgcttcctggacttgtccttgcttctacctaaattaattccccacaattgtgcagtagatgccatccactcttgcctacttcaggatatttccctagcaattggtccctctctttcatgcataattaaattttccctctctactgaattatcctcgtcagcattcaagtgtgctgtaatttcttacatctcaacaaaaaaaaacaatcttgacccacttttccctctagctaccacctcatttctcagctgccctttaaagcagactctctagtttatcccctcccataaatccacttttgaatctacttccctgaaactgatcttgaaaaagacaccaatggtttccatgctgctaaactgaatgattttgctttaaaggcctcatcctacttgaaaggtgagcagcatttgacacagttgatcattcccgcctcctggaaacagtttcttcccatggcatctgggactccacaccctcttgattttccacctgccttacagaacagtctttctcagcccttttgctggtttctccttatctccccaaactcttcgctgtggagtactccaagactcagtccccacacctccacccacacacactccagtctcagggctttgattgtcaccagcacattcatggttgaaatttctacctccagttcacacctctctcctgagttctagtctttaatatgcatctgtaccctcatttctaataagccttttaaggttaacatgtttgaagctgaactcctgatttttccccaaaacgtactctacccccaaacttccccatatctgttaaaggcaaatccaccttcattttgtctgagtctcaaatcttggactcatcctggcctcttcttttcccttcatatcattcatctgctctactggcaaatcccgttggctctaacgttggtgcaaaatcagaatccgacactttcactacctccaatgacacaaacccaatccgtaccaccatcacctctcacttgaaatattggtgaattctcttgcctctgccttaaaaatatccagactctgattggtttggatcaattcactatcatctcttgcctggttgactacaagggactcctaaatggtccccttgctcctgcccttgaccctaagctagaatgatccccttaaatgtaagactaagcatggaattccctagctcaaaaccttccagtgatttcccacctcactctgagtgaaagcccatattcttacaactgcctttgaggcctagttgtgctcctatcattgccagctacctctgagacttcacgacctccaattctctcagtcagtcctctactcttactgtgccggtcttcttgccactgttcaaacacttcacaccctctttcctctgaaagcctttgtgcactggttagttcctctg

SEQ ID NO: 665 - DNA, 5472 bp, Homo sapiens
  source 1..5472: mol_type = other DNA
ctcctcaagtgggtccctgacccctgagcagcctaactgggaggaaccctccagaaggggcagactgacacctcacacagccgggtactcctctgagacaaaacttccagaggaatgatcaggcagcagcatttgcggttcaccaatatccgctgttctacaaccaccgctgttctgcagccaccactgctgatacccaggcaaacagggtctggagtggacctctagcaaactccaacagacctgcagctgagggtcctgtctggtagaaggaaaactaacaaacagaaaggacatccacaccaaaaacccatctgtacatcaccatcatcaaagaccaaaagtagataaagccacaaagatggggaaaaaacagagaagaaaaactggaaactctaaaaagcacagtgcctctcctcctccgaaggaatgcagctcctcaccagcaatggaacaaagctggatggagaatgacaagttgagagaagaaggcttcagacgatcaaactactccaagctacaggaggaaattcaaaccaatggcaaagaagttaaaaacattgaaaaaaaattagatgattggataactagaataaccaatgcagagaagtccttaaaggagctgatggagctgaaagccaaggcttgagaactacgtgaagaatgcagaagcctcaggagccgatgcgatcaactggaagaaagggtatcagtgatggaagactaaatgaatgaaatgaagcaagaagggaagtttagagaaagaataataaaaagaaatgaacaaagactccaagaaatatgggactatgtgaaaagaccaaatctacatttgattggtgtacctgaaagtgacggtgagaatggaaccaagttggaaaacactctgcaggatattatccaggagaacttccccaacctagcaaggcaggccaacattcagattcaagaaatacagagaatgctacaaagatactcctcgagaagagcaactccaagacacataactgtcagattcaccaaagttgaaatgaaggaaaaaatgttaagggcagccagagagaaagatcaggttacccacaaagggaagtccatcagacttacagcagatctctctgcagaaactctacaagccagaagagagtgggggccaacattcaacattcataaagaaaacaattttcaacctagaatttcatatccagccaaactaagcttcataagtgaaggagaaataaaatactttacagacaagcaaatgctgagagattttgtcaccaccaggcctgccctaaaagagctcctgaaggaagcactaaacatggataggaacaaccggtaccagccactgcaaaaacacgccaaaatgtaaagaccatcaaggctaggaagaaactgcatcaactaacgagcaaaataaccagctaacatcataatgacaggatcaaattcacacataacaatattaaccttaaatgtaaatgggctacatcctccaattaaaagacacaaactggaaaattggataaagagtcaagacacatcagtgtgctgtatacaggaaacccatctcacgtgcagaggcacacataggctcaaaataaagggatggaggaatatctaccaagcaaacggaaaacaaaagaaggcaggggttgcaatcctagtctctgataaaacagactttaaaccaacaaaaatcaaaagagacaaagaagaccattacatagtggtgaagggatcaattcaacaagaagagctaactatcctaaatatatatgcacccaatacaggagcacccagattcataaagcaagtcctgagtgacctacaaagagacttagactcccacacattaataatgggagactttaacaccccactgtcaacattagacagatcaacgagacagaaagttaacaaggatatccaggaattcaactcagctctgcaccaagcggacctaatagacatctacagaactctccaccccaaatcaacagaatatacatttttttcagcaccacaccaaacctattccaaaattgaccacatggttggaagtaaagcactcctcagcaaatgtaaaagaacagaaattataacaaactgtctctcagaccacagtgcaatcaaactagaactcaggattaagaaactcactcaaaaccgctcaactacgtggaaactgaacaacctgctcctgaatgactactgggtacataacaaaatgaaggcagaaataaagatgttctttgaaaccaacaagaacaaagacacaacataccagaatctctgggacacattcaaagcagtgtgtagagggaaatttatagcaccaaatgcccacaagagaaagcaggaaagatccaaaattgacaccctaacatcacaattaaaagaactagaaaagcaagagcaaacacattcaaaagctagcagaaggcaagaaataactaacatcagggcagaactgaaggaaatagagacacaaaaaacccttcaaaaattaatgaatccaggagctggttttttgaaaagatcaacaaaattgatagaccgctagcaagactaataaagaagaaaagagagaagaatcagatagacacagtaaaaaatgataaaggggatgtcaccaccgatcccacagaaatacaaactaccatcagagaatactacaaacacctctacgcaaataaactagaaaatctagaggaaatggataaattcctggacacatacaccctcccaagactaaaccaggaagaagttgaatctctgaatagaacaataacaggctctgaaattgtggcaataatcaatagcttactaacaaaaaaagtcaacgaccagatggattcacagccaaattctaccagaggtacaaggaggaactggtaccattccttctgaaactactccaatcaatagaaaaagagggaatcctccctaactcatttgataaggccagcatcatcctgataccaaagccgggcagagatacaacaacaaaaaaagagaattttagaccaatatccttgatgaacattgatgcaaaaatgctcaataaaatactagcaaagcgaatccagcagcacatcaaaaagcttatccaccatgatcaagtgggcttcatccctggaatgcaaggctggttcaacatacgcaaatcaataaatgtaatccagcatataaacagaaccaaagacaaaaaccacatgattatctcaatagatgcagaaaaggcctttgacaaaattcagcaaccttcgtgctaaaacctctcaataaattaggtattgatgggacgtatctcaaaataataagagctatctaagacaaacccacagccaatagcatactgaatgggcaaaaactggaagcattccctttgaaaactggcacaagacagggatgccctctctcaccactcctattcaacatagtgttggaagttctggccagggcaattaggcaggagaaggaaataaagggtattcaattgggaaaagaggaagtcaaattgtcctggtttgcagatgacaaggttgtatatctagaaaaccccattgtctcagccccaaatatccttaagctgataagcaacttcagcaaagtctcaggatacaaaatcaatgtacaaaaatcacaagcattcttacacaccaataacagacaaccagagagccaaatcatgagtgaacgcccccattcacaattgcttcaaagagaataaaatacctaggaatccaacttacaagggatgtgaaggacctcttcaaggagaactacaaaccactgctcaatgaaattaaagaggatacaaagaaatggaagaacattccatgctcatgggtaggaagaatcaatattgtgaaaatggccatactgcccaaggtaatttatagattcaatgccatccccatcaagctaccaatgactttcttcacagaattggaaagaactactttaaagttcatatggaaccaaaaagagcccgcatcgccaagtcaatcctaagccaaaagaacaaagccggaggcatcacgctacctgacttcaaactacactacaaggctacagtaaccaaaacagcatggtactggtaccaaaacagagatatagatcaatggaacagaacagagccctcagaaataatgccgcatatctacaaccatctgatatttgacaaacctgacaaaaacaagcaatggggaaaggattccctatttaataaatggtgctgggaaaactggctagccatatgtagaaagctgaaactggatcccttccttacaccttatacaaaaattaattcaagatggattaaagacttaaatgttagacctaaaaccataaaaaccctagaagaaaacctaggcaatatcattcatgacataggcatggggaaggacttcatgtctaaaacaccaaaagcaatggcaacaaaagccaaaattggcaaatgggatctaattaaactaaagagcctctgcacagcaaaagaaactaccatcagagtaaacaggcaagctacaaaatgggagaaaatttttgcaacctactcatctgacaaagggctaatatccagaatctacaatgaactcaaacaaatttacaagaaaaaaaaaccaaccccatcaaaaagtgggcgaaggatgtgaacagacacctgtcaaaagaagacatttatgcagccaaaaaacacatgagaaaatgctcatcatcactggccatcagagaaatgcaaatcaaaaccacaatgagataccatctcacaccagttagaatggcgatcattaaaaagtcaggaaacaacaggtgctggagaggatgtggagaaataggaacactttgacactgttggtgggactgtaaactagttcaaccattgtggaagtcagtgtggagattcctcagggatctagaactagaaataccatttgacccagccatcccattactgggtatatacccaaaggattataaatcatgctgctataaagacagatgcacacatatatttattgcggcactattcacaatagcaaagacttggaaccaacccaaatgtccaataacgatagactggattaagaaaatgtggcacatatacaccatggaatactgcagccataaaaaatgaagagttcatgtcctttgtagggacatggatgaaactggaaaccatcattctcagcaaactatcgcaaagacaaaaaaccaaacaccacatgttctcactcataggtgtgggaattgaacaatgagaacatatggacacaggaaggggaacatcacactccggggactgttatggggtggggggcggggggagggatagcattaggagatatacctaatgctaaatgacgagttaatgggtgcagcataccaacatggcacatgtatacatatgtaacaaatctgcacattgtgcacatgtaccctaaaagtataataataataaaa

SEQ ID NO: 666 - DNA, 1096 bp, Homo sapiens
  source 1..1096: mol_type = other DNA
ttagttccaaatattactgctcgttgataatgtgtctggtcacccaagagttctgatggagatgtacaaagagattaatgtttttatgtctgctaaacaacatccattctgcaggatccattactccatgggtcaaggagtaattttgactttcaagtattatttaaggaatacattttgtaaggctgtggctgccatagtggttgttctgtacaaagtaacttgaaaaccttctggaaaggattcatcattctagatgccattaaggacatttgtgattcatgggagaaggtcaaaatatcaacattaacaggagttcagaagacattgacctcaaccctgatggatgatcttgaggggttcaagacttcagtggacgaagtaactgcagatgtggtggaaatagcaagataactagacttagaagtggaacctgcatatgtgactgaattgctgcaatctcatgataaaacgtgaacaaatgaggagttgcttctaatataagagccacaaaagtggtttcttgagatggaaactactcctggtgaagatcctgtgaccattgttgaaatgacaacaaaggacttagaatattacataaacttagttgataaaacagcagcagagtttgagaggattgacttcaattttgaagaatgttccactgtgggtaaaaggctatccaacagcaacacatgctacagataaatctttcggaaaggaagagtcagttgatgttgcagccttccttgttgtctcatttaaagaaatctctagagccacactaaccttcagcaaccaccacaccgatcattcagcagccatcaacagtgaggcaagactgtcttccagcaacaaagactcactgaagacttagattatcgttaacatcttttagcaataaaatatttttaaattaaagtatgtacattgtcagatataatgctattgcaaacttaatagactataatatagattaaacataacttttataggtactggaaaataaaaataattgtgtgactccctttattgtgttaaacattttattacagttgtctggaagcaaacctgcaatatctccaagatatgcctg

SEQ ID NO: 667 - DNA, 6015 bp, Homo sapiens
  source 1..6015: mol_type = other DNA
ggagccaagatggccgaataggaacagcttccggtctacagctcccagcgtgagcgacgcagaagacgggtgatttctgcatttccatctgagataccgggttcatctcactagggagtgccagacagtgggcgcaggccagtgggtgcgctcaccgtgcgcgagccgaagcaggccgaggcattgcctcacctgggaagcgcaaggggtcagggagttccctttccaagtcaaagaaaggggtgacggacgcacctggaaaatcgggtcactcccacccgaatattgcccttttcagaccggcttaaaaaacggcgcaccacgagactatatcccacacctggctcggagggtcctacgcccacggaatctcgctgattgctagcacagcagtctgagatcaaactgcaaggcggcagcgaggctgggggaggggcgcccgccattgcccaggcttgcttaggtaaacaaagcagccgggaagctcaaacttggtggagcccaccacagctcaaggaggcctgcctgcctctgtaggctccacctctgggagcagggcacagacaaacaaaaagacagcagtaacctctgcagacttaaatgtccctgtctgacagctttgaagagagcagtggttctcccagcatgcagctggagatctgagaacgggcagactgcctcctcaagtgggtccctgacccctgacccccgagcagcctaactgggaggcaccccccagcaggggcacactgacacctcacatggcagggtattccaacagacctgcagctgagggtcctgtctgttagaaggaaaactaacagaaaggacatccacaccgaaaacccatctgtacatcaccatcatcaaagaccaaaagtagataaaaccacaaagatggggaaaaaacagaacagaaaaactggaaactctaaaacgcagagcgcctctcctcctccaaaggaacgcagttcctcaccagcaatggaacaaagctggatggagaatgattttgacgagctgagagaggaaggcttcagacgatcaaattactctgagctacgggaggacattcaaaccaaaggcaaagaagttgaaaactttgaaaaaaatttagaagaatgtataactagaataaccaatacagagaagtgcttaaaggagctgatggagctgaaaaccaaggctcgagaactacgtgaagaatgcagaagcctcaggagccgatgcgatcaactggaagaaagggtgtcagcaatggaagatgaaatgaatgaaatgaagcgagaagggaagtttagagaaaaaagaataaaaagaaatgagcaaagcctccaagaaatatgggactatgtgaaaagaccaaatctacgtctgattggtgtacctgaaagtgatgcggagaatggaaccaagttggaaaacactctgcaggatattatccaggagaacttccccaatctagcaaagcaggccaacgttcagattcaggaaatacagagaacgccacaaagatactcctcgagaagagcaactccaagacacataattgtcagattcaccaaagttgaaatgaaggaaaaaatgttaagggcagccagagaaaaaggtcgggttaccctcaaagggaagcccatcagactaacagcggatctctcggcagaaaccctacaagccagaagagagtgggggccaatattcaacattcttaaagaaaagaattttcaacccagaatttcatatccagccaaactaagcttcataagtgaaggagaaataaaatactttacagacaagcaaatgctgagagattttgtcaccaccaggcctgccctaaaagagctcctgaaggaagcgctaaacatggaaaggaacaaccggtaccagccgctgcaaaatcatgccaaaatgtaaagaccatcgagactaggaagaaactgcatcaactaacgagcaaaatcaccagctaacatcataatgacaggatcaaattcacacataacaatattaactttaaatgtaaatggactaaattctccaattaaaagacacagactggcaagttggataaagagtcaagacccatcagtgtgctgtattcaggaaacccatctcacgtgcagagacacacataggctcaaaataaaaggatggaggaagatctaccaagcaaatggaaaacaaaaaaaggcaggggttgcaatcctagtctctgataaaacagactttaaaccaacaaagatcaaaagagacaaagaaggccattacataatggtaaagggatcaattcaacaagaggagctaactatcctaaatatatatgcacccaatacaggagcacccagattcataaagcaagtcctgagtgacctacaaagagatttagactcccacacattaataatgggagaatttaacaccccactgtcaatattagacagatcaacgagacagaaagtcaataaggatacccaggaattgaactcagctctgcaccaagcagacctaatagacatctacagaactctccaccccaaatcaacagaatatacatttttttcagcaccacaccacacctattccaaaattgaccacatagttggaagtaaagctctcctcagcaaatgtaaaagaacagaaattataacaaactgtctctcagaccacagtgcaatcaaactagaactcaggattaagaatctcactcaaagccactcaactacatggaaactgaacaacctgctcctgaatgactactgggtacataacgaaatgaaggcagaaataaagatgttctttgaaaccaacgagaacaaagacacaacataccagaatctctgggacgcattcaaagcagtgtgtagagggaaatttatagcactaaatgcctacaagagaaagcaggaaagatccaaaattgacaccctaacatcacaattaaaagaactagaaaagcaagagcaaacacattcaaaagctagcagaaggcaagaaataactaaaatcagagcagaactgaaggaaatagagacacaaaaaacccttcaaaaaaccaatgaatccaggagctggttttttgaaaggatcaacaaaattgatagaccgctagcaagactaataaagaaaaaaagagagaagaatcaaatagacacaataaaaaatgataaaggggatatcaccaccgatcccacagaaatacaaactaccatcagagaatactacaaacacctctacgaaaataaactagaaaatctagaagaaatggataaattccttgacacatacactctcccaagactaaaccaggaaggagttgaatctctgaatagaccaataacaggagctgaaattgtggcaataatcaatagtttaccaaccaaaaagagtccaggaccagatggattcacagccgaattctaccagaggtacaaggaggaactggtaccattccttctgaaactattccaatcaatagaaaaagagggaatcctccctaactcattttatgaggccagcatcattctgataccaaagccgggcagagacacaaccaaaaaagagaattttagaccaatatccttgatgaacattgatgcaaaaatgctcaataaaacactggcaaaccgaatccagcagcacatcaaaaggcttatccaccatgatcaagtgggcttcatccctgggatgcaaggctggttcaatatacgcaaatcaataaatgtaatccagcatataaacagagccaaagacaaaaaccacatgattatctcaatagatgcagaaaaagcctttgacaaaattcaacaacccttcatgctaaaaactctcaataaattaggtattgatgggacatatctcaaaataataagagctatctatgacaaacccacagccaatatcatactgaatgggcaaaaactggaagcattccctttgaaaactggcacaagacagggatgccctctctcaccgctcctattcaacatagtgttggaagttctggccagggcaatcaggcaggagaaggaaataaagggtattcaattaggaaaagaggaagtcaaattgtccctgtttgcagacgacatgattgtttatctagaaaaccccattgtctcagccccaaatctccttaagctgataagcaacttcagcaaagtctcaggatacaaaatcaatgtacaaaaatcacaagcattcctatacaccaacaacagacaaacagagagccaaatcatgagtgaactcccattcacaattgcttcaaagagaataaaatacctaggaatccaacttacaagggatgtgaaggacctcttcaaggagaactacaaaccactgctcaaggaaataaaagaggatacaaacaaatggaagaacattccatgctcatgggtaggaagaatcaatattgtgaaaatggccatactgcccaaggtaatttacagattcaatgccatccccatcaagctaccaatgactttcttcacagaattggaaaaaactactttaaagttcatatggaaccaaaaaagagcccgcattgccaagtcaatcctaagccaaaagaacaaagctggaggcatcacactacctgacttcaaactatactacaaggctacagtaaccaaaacagcatagtactggtaccaaaacagagatgtagatcaatggaacagaacagagccctcagaaataatgccgcatacctacaactatctgatctttgacaaacctgagaaaaataagcaatggggaaaggattccctatttaataaatggtgctgggaaaactggctagccatatgtagaaagctgaaactggatcccttccttacaccttatacgaaaatcaattcaagatggattaaagatttaaacgttagacctaaaaccataacaaccctagaagaaaacctaggcattaccattcaggacataggcgtgggcaaggacttcatgtccaaaacaccaaaagcaatggcaaccaaagccaaaattgacaaatgggatctaattaaactaaagagcttctgcacagcaaaagaaactaccatcagagtgaacaggcaacctacaacatgggagaaaatttttgcaacctactcatctgacaaagggctaatatccagaatctacaatgaactcaaacaaatttacaagaaaaaaacaaacaaccccatcaaaaagtgggtgagggacatgaacagacacttctcaaaagaagacatttatgcagccaaaaaacacatgaaaaaatgctcatcatcactggccatcagagaactgcaaatcaaaaccactatgagatatcatctcacaccagttagaatggcaatcattaaaaagtcaggaaacaacgggtgctggagaggatgtggagaaataggaacacttttacactgttggtgggactgtaaactagttcaaccattgtggaagtcagtgtgacgattcctcagggatctagaactagaaataccatttgacccagccatcccattactgggtatatacccaaatgactataaatcatgctgctataaagacacatgcacatgtacgtttattgcggcagtattcacaatagcaaagacttggaaccaacccaaatgtccaacaatgatagactggattaagaaaatgtggcacatatacaccatggaatactatgcagccataaaaaatgatgagttcatgtcctttgtagggacatggatgaaattggaaaccatcattctcagtaaactatcgcaagaacaaaaaaccaaacaccgcatattctcactcataggtgggaattgaacaatgtgatcacatggacacaggaaggggaatatcacactctggggactgtggtggggaggggggaggggggagggatagcattgggagatatacctaatgctagatgacgagttagtgggtgcagcacaccagcatgacacatgtatacatatgtaactaacctgcacaatgtgcacatgtaccctaaaacttaaagtataattaaaa

SEQ ID NO: 668 - DNA, 3981 bp, Homo sapiens
  source 1..3981: mol_type = other DNA
gttccaagatggccaaataggaacagctccagtctgcagctcccagcctgaatgatgcaggacaggttatttctgcatttccagctgaggtaccagcttcatctcattggggcttgtcagacagtgagtgcagcccatggaggagggcagggcatcgcctcacctgggaagcacaagggctcagggaattctctttcctagctaagggaagctgtgacagatggtacctggaaattcaggacactcccaccctaatactgcacttttccaacagccttagccaatggcacaccaggagattatattccacacctggctcagagggtcccatgcccacggagcctcactcactgctagcacagcagtctgagattgaactgcaaggcggcagcgaggctaggggaggggcgtctgccattactgaggctcgagtaggtgaacaaagtgccagggaagctcgaactgggtggagcccaccgcagctcaaggaggcctgcctgcctctgtagacgccacctctggggcagggcatagctgaacaaaatgcagcagaaacttctgcagacttaaacgtccctgtctgacagctttgaagacagtagtggttctcccagcacagagtttgagatctgagaacgaacagactgccccctcaagtgggtccctgacccccgagtagcctaactgggagatgcctcccaaaaggggccgactgacacctcatacaactgggtgcccctctgagacgaagcttccagaggaaggatcaggcagcaacatctgccgttcttcaatatttgctgttctgcagcctccgctggtgatacccaggaaaacagggtctggagtggacctccagcaaactccaacagacctacagctgagggtcctgactattacaaggaaaactaacaaacagaaaggacatccacaccaaaaccccatctgtacgtcaccatcgtcaaagaccaaaggtagataaaaccacaaagatagggagaaacaagagcagaaaagctgaaaattctaaaaatcagagtgcctcttctcctccaaaagaacacagctcatcgccagcaacagaacaaagctggatggaaaatgactttgaggagtggagagaaggcttcagatgatcagtaataacaaacttctctgagcgaaaggaggatgttcaaacccatcgcaaagaagctaaagaccttgaaaaatgattagacgaatggctaactagaataaacagtgtagagaagtccttaaatgacctgatggagctgaaaaccatggcatgagtattacgtgatgcatgcacaagcttcagtagctgacttgatcaagtggaagaaagggtatcagtgattgaagatcaaaggaatgaaatgaaatgagaacagaagttgagagaaaaaagagtaaaaagaaactaacaaagcctccacgaaatatgggactatgtgaaaagaccaaatctatgtctgattcgtgcacctgaaagtgatggggagaagggaaccagtttggaaaacactcttcagaatattatccaggagaacttccccaacctagcaaggcaggccaacattcaaattcaggaaatacagagaatgtgacaaagatacaccttgagaagagcaacgccaagacacataattgtcagattcaccaaagttgaaatgaaggaaaaaatgttaagggcagtcagagagaaaggctgggttacccacaaagggaagcccatcagactaacagcagatctctcagcagaaactctacaagccagaagagggtgggggccaatattcaacatacttaaagaaaagaattttcaacccagattttcatatccagccaaactaagcttcataagtaaaggagaaataaaatcctttacagacaaacaaatgctgagagatcttgtcaccaccaggcctgccttacaagaggtcctgaaggaagcactaaacatggaaaggaacaactggttccagccacggcaaaaacatgccaaattgtaaagaccattgatgctaggaagaaactgcatcaaataacgagcaaaataaccagctaacatcataatgacgggatcaaattcacacataacaatattaaccttaaatgtaaatggcctaaacgccccaattaaaagacacagactggcaaattgcataaagaatcaagacccatcagtgtactgtattcaggagacccatctcacgtgcacagacacatataggttcaaaataaagggatggaggaagatctaccaagcaaatggaaaacaaaaaaaaagagaaggggttgcaatcctagtctctgataaaacagactttaaaccaacaaagatcaaaagagacaaagaaggccattacataatggtaaagtgatcaattcaataagaagaggtaactatcctaaatatatgtgcacccaatacaggagcacccagattcataaagcaagtccttagatacttacaaagagacttagactcccacacaataataatgggagactttaacaccccactgtcaacattagacagatcaacaagacagaaagttaaaaaggatatccaggaatggaactcagctctgcaccaagcagacctagtagacatctacagaactctccaccccaaatcaacagaatatacattcttctcagcaccacatcacacttattccaaaattgaccacatagttggaagtaaagcactcctcagcaaatgtaaaagaacagaaattataacaaactatctctcagaccacagtgcaatcaaactagacctcagaattaaaaaactcactcaaaaccactcaactacatggaaactgaacaacctgctcctgaatgactactgggtacataatgaaatgaaggcagaaataaagatgttctttgaaaccaatgagaacgaagacacaacataccagaatatctgggacacatttaaagcagtgtgtagagggaaatttatagcactaaatgcccacaagagaaagcaggaaagatccaaaattgacaccctaacatcacaattaaaagacctagagaagcaagagcaaacacattcaaaagctagcagaaagcaagaaataactaagatcagagcagaactgaaggagatagagacacataaatctcatcaaaaaaatcagtgaatccaggagctggttttttgaaaagatcaacgaaactgatagactgctagcaagactaataaagaagaaaagaaagaagaatcaaatagacacaataaaaaatgataaaggggatatcaccaccgatcccacagaaatacaaactaccatcagagaatacaataaacacctctacgccagtaaaccagaaaatctagaagaaatagataaattcctggacacactcaccctcctgagactaaaccaggaagaatttgaacccctgaatagaccaataacagattctgaaattcaggcaataattaatagcctactaaccaaaaaaagtccaggaacagatggactcacagtcgaattctaccagaggtacaaagaggagctggtaccattccttctgaaactattccaatcaatagaaaaagagggaatcctccctaattcattttatgaggccaacatcatcctgataccaaagcctggcagagacacaacaaaaaaagagaattttagacaaatatccctgatgaacattgatgcaaaaatcatcaataaaatactggcaaacagaatccagcagcatatcaaaaagcttatccaccacgatcaagtgggcttcatacctgggatgcaaggcttgttcaacatgcgcaaatcaataaacataatccatcatataaacagaaccaaagacaaaaaccacatgattatctcaatagatgcagaaaaggtctttgacaaaattcgacaacccttcatgctaaaaactctcgataaactcggtactgatggaatgtatctcaaaataatgagttattta

SEQ ID NO: 669 - DNA, 2212 bp, Homo sapiens
  source 1..2212: mol_type = other DNA
tttgtgctaaaaactctcaataaattaggtattgatgggacgtatttcaaaataataagagctatctatgacaaacccacagccaatatcatactgaatgggcaaaacctggaagcattccctttgaaaaccggcacaagacagggatgccctctctcaccgctcctattcaacatagtgttggaagttctggccagggcaatcaggcaggagaaggaaataaagggtattcaattaggaaaagaggaagtcaaattgtccctgtttgcagacgacatgattgtttatctagaaaaccccatcgtctcagcccaaaatctccttaagctgataagcaacttcagcaaagtctcaggatacaaaatcaatgtacaaaaatcacaagcattcttatacaccaacaacagacaaacagagagccaaatcatgggtgaactcccattcacaattgcttcaaagagaataaaatacctaggaatccaacttacaagggatgtgaaggacctcttcaaggagaactacaaaccactgctcaaggaaataaaagaggagacaaacaaatggaagaacattccatgctcatgggtaggaagaatcaatatcgtgaaaatggccatactgcccaaggtaatttacagattcaatgccatccccatcaagctaccaatgactttcttcacagaattggaaaaaactactttaaagttcatatggaaccaaaaaagagcccgcattgccaagtcaatcctaagccaaaagaacaaagctggaggcatcacactacctgacttcaaactatactacaaggctacagtaaccaaaacagcatggtactggtaccaaaacagagatatagatcaatggaacagaacagagccctcagaaataatgccgcatatctacaactatctgatctttgacaaacctgagaaaaacaagcaatggggaaaggattccctatttaataaatggtgctgggaaaactggctagccatatgtagaaagctgaaactggatcccttccttacaccttatacaaaaatcaattcaagatggattaaagatttaaacgttaaacctaaaaccataaaaaccctagaagaaaacctaggcattaccattcaggacataggcgtgggcaaggacttcatgtccaaaacaccaaaagcaatggcaacaaaagacaaaattgacaaatgggatctaattaaactaaagagcttctgcacagcaaaagaaactaccatcagagtgaagaggcaacctacaacatgggagaaaatttttgcaacctactcatctgacaaagggctaatatccagaatctacaatgaactcaaacaaatttacaagaaaaaaacaaacaaccccatcaaaaagtgggcgaaggacatgaacagacacttctcaaaagaagacatttatgcagccaaaaaacacatgaagaaatgctcatcatcactggccatcagagaaatgcaaatcaaaaccactatgagatatcatctcacaccatttagaatggcaatcattaaaaagtcaggaaacaacaggtgctggagaggatgcggagaaataggaacacttttaccctgttggtgggactgtaaactagttcaaccattgtggaagtcagtgtggcgattcctcagggatctagaactagaaataccatttgacccagccatcccattactgggtatatacccaaatgagtataaatcatgctgctataaagacacatgcacacgtatgtttattgtggcactattcacaatagcaaagacttggaaccaacccaaatgtccaacaatgatagactggattaagaaaatgtggcacatatacaccatggaatactatgcagccataaaaaatgatgagttcatatcctttgtagggacatggatgaaattggaaaccatcattctcagtaaactatcgcaagaacaaaaaaccaaacaccgcatattctcactcataggtgggaattgaacaatgagatcacatggacacaggaaggggaatatcacactctggggactgtggtggggtcgggggaggggggagggatggtattgggagatatacctaatgctagatgacacattagtgggtgcagcgcaccagcatggcacatgtatacatatgtaactaacctgcacaatgtgcacatgtaccctaaaacttagagtataataaaaaaaaaaaa

SEQ ID NO: 670 - DNA, 6030 bp, Homo sapiens
  source 1..6030: mol_type = other DNA
gagggaggagccaagatggccgaataggaacagctccggtctacagctcccagcgtgagcgacgcataagacggtgatttctgcatttccatctgaggtaccgggttcatctcactagggagtgccagacagtgggcgcaggccagtgtgtgtgcgcaccgtgcgcgagccgaagcagggcgaggcattgcctcacctgggaagcgcaaggggtcagggagttccctttccgagtcaaagaaaggggtgacggacgcacctggaaaatcgggtcactcccacccgaatattgcgcttttcagaccggcttaagaaacggcgcaccacaagactatatcccacacctggctcggagggtcctacgcccacggagtctcgctgattgctagcacagcagtctgagatcaaactgcaaggcggcaacgaggctgggggaggggcgcccgccattgcccaggcttgcttaggtaaacaaagcagccaggaagctcgaactgggtggagcccaccacagctcaaggaggcctgcctgcctctgtaggctccacctctgggggcagggcacagacaaacaaaaagacagcagtaacctctgcagacttaagtgtccctgtctgacagctttgaagagagcagtggttctcccagcacgcagctggagatctgagaacaggcagactgcctcctcaagtgggtccctgactcctgacccccgagcagcctaactgggaggcaccccccagcaggggcacactgacacctcacacggcagggtattccaacagacctgcagctgagggtcctgtctgttagaaggaaaactaacaaccagaaaggacatctacaccgaaaacccatctgtacatcaccatcatcaaagaccaaaagtagataaaaccacaaagatggggaaaaaacagaacagaaaaactggaaactctaaaacgcagagcgcctctcctcctccaaaggaacgcagttcctcaccagcaacagaacaaagctggatggagaatgattttgacgagctgagagaagaaggcttcagacgatcaaattactctgagctacgggaggacattcaaaccaaaggcaaagaagttgaaaactttgaaaaaaatttagaagaatgtataactagaataaccaatacagagaagtgcttaaaggagctgatggagctgaaaaccaaggctcgagaactacgtgaagaatgcagaagcctcaggagccgatgcgatcaactggaagaaagggtatcagcaatggaagatgaaatgaatgaaatgaagcgagaagggaagtttagagaaaaaagaataaaaagaaatgagcaaagcctccaagaaatatgggactatgtgaaaagaccaaatctacgtctgattggtgtacctgaaagtgatgtggagaatggaaccaagttggaaaacactctgcaggatattatccaggagaacttccccaatctagcaaggcaggccaacgttcagattcaggaaatacagagaacgccacaaagatactcctcgagaagagcaactccaagacacataattgtcagattcaccaaagttgaaatgaaggaaaaaatgttaagggcagccagagagaaaggtcgggttaccctcaaaggaaagcccatcagactaacagcggatctctcggcagaaaccctacaagccagaagagagtgggggccaatattcaacattcttaaagaaaagaattttcaacccagaatttcatatccagccaaactaagcttcataagtgaaggagaaataaaatactttatagacaagcaaatgttgagagattttgtcaccaccaggcctgccctaaaagagctcctgaaggaagcgctaaacatggaaaggaacaaccggtaccagccgctgcaaaatcatgccaaaatgtaaagaccatcgagactaggaagaaactgcatcaactaatgagcaaaatcaccagctaacatcataatgacaggatcaaattcacacataacaatattaactttaaatataaatggactaaattctgcaattaaaagacacagactggcaagttggataaagagtcaagacccatcagtgtgctgtattcaggaaacccatctcacgtgcagagacacacataggctcaaaataaaaggatggaggaagatctaccaagccaatggaaaacaaaaaaaggcaggggttgcaatcctagtctctgataaaacagactttaaaccaacaaagatcaaaagagacaaagaaggccattacataatggtaaagggatcaattcaacaagaggagctaactatcctaaatatttatgcacccaatacaggagcacccagattcataaagcaagtcctcagtgacctacaaagagacttagactcccacacattaataatgggagactttaacaccccactgtcaacattagacagatcaacgagacagaaagtcaacaaggatacccaggaattgaactcagctctgcaccaagcagacctaatagacatctacagaactctccaccccaaatcaacagaatatacatttttttcagcaccacaccacacctattccaaaattgaccacatagttggaagtaaagctctcctcagcaaatgtaaaagaacagaaattataacaaactatctctcagaccacagtgcaatcaaactagaactcaggattaagaatctcactcaaagccgctcaactacatggaaactgaacaacctgctcctgaatgactactgggtacataacgaaatgaaggcagaaataaagatgttctttgaaaccaacgagaacaaagacaccacataccagaatctctgggacacattcaaagcagtgtgtagagggaaatttatagcactaaatgcctacaagagaaagcaggaaagatccaaaattgacaccctaacatcacaattaaaagaactagaaaagcaagagcaaacacattcaaaagctagcagaaggcaagaaataactaaaatcagagcagaactgaaggaaatagagacacaaaaaacccttcaaaaaatcaatgaatccaggagctggttttttgaaaggatcaacaaaattgatagaccgctagcaagactaataaagaaaaaaagagagaagaatcaaatagacacaataaaaaatgataaaggggatatcaccaccgatcccacagaaatacaaactaccatcagagaatactacaaacacctctacgcaaataaactagaaaatctagaagaaatggatacattcctcgacacatacactctcccaagactaaaccaggaagaagttgaatctctgaatcgaccaataacaggctctgaaattgtggcaataatcaatagtttaccaaccaaaaagagtccaggaccagatggattcacagccgaattctaccagaggtacaaggaggaactggtaccattccttctgaaactattccaatcaatagaaaaagagggaatcctccctaactcattttatgaggccagcatcattctgataccaaagccgggcagagacacaaccaaaaaagagaattttagaccaatatccttgatgaacattgatgcaaaaatcctcaataaaatactggcaaaccgaatccagcagcacatcaaaaagcttatccaccatgatcaagtgggcttcatccctgggatgcaaggctggttcaatatacgcaaatcaataaatgtaatccagcatataaatagagccaaagacaaaaaccacatgattatctcaatagatgcagaaaaagcctttgacaaaattcaacaacccttcatgctaaaaactctcaataaattaggtattgatgggacgtatttcaaaataataagagctatctatgacaaacccacagccaatatcatactgaatgggcaaaaactggaagcattccctttgaaaaccggcacaagacagggatgccctctctcaccgctcctattcaacatagtgttggaagttctggccagggcaatcaggcaggagaaggaaataaagggtattcaattaggaaaagaggaagtcaaattgtccctgtttgcagacgacatgattgtttatctagaaaaccccatcgtctcagcccaaaatctccttaagctgataagcaacttcagcaaagtctcaggatacaaaatcaatgtacaaaaatcacaagcattcttatacaccaacaacagacaaacagagagccaaatcatgggtgaactcccattcacaattgcttcaaagagaataaaatacctaggaatccaacttacaagggatgtgaaggacctcttcaaggagaactacaaaccactgctcaaggaaataaaagaggagacaaacaaatggaagaacattccatgctcatgggtaggaagaatcaatatcgtgaaaatggccatactgcccaaggtaatttacagattcaatgccatccccatcaagctaccaatgactttcttcacagaattggaaaaaactactttaaagttcatatggaaccaaaaaagagcccgcattgccaagtcaatcctaagccaaaagaacaaagctggaggcatcacactacctgacttcaaactatactccaaggctacagtaaccaaaacagcatggtactggtaccaaaacagagatatagatcaatggaacagaacagagccctcagaaataatgccgcatatctacaactatctgatctttgacaaacctgagaaaaacaagcaatggggaaaggattccttatttaataaatggtgctgggaaaactggctagccatatgtagaaagctgaaactggatcccttccttacaccttatacaaaaatcaattcaagatggattaaagatttaaacgttaaacctaaaaccataaaaaccctagaagaaaacctaggcattaccattcaggacataggcgtgggcaaggacttcatgtccaaaacaccaaaagcaatggcaacaaaagacaaaattgacaaatgggatctaattaaactaaagagcttctgcacagcaaaagaaactaccatcagagtgaacaggcaacctacaacatgggagaaaatttttgcaacctactcatctgacaaagggctaatatccagaatctacaatgaactcaaacaaatttacaagaaaaaaacaaacaaccccatcaaaaagtgggtgaaggacatgaacagacacttctcaaaagaagacatttatgcagccaaaaaacacatgaagaaatgctcatcatcactggccatcagagaaatgcaaatcaaaaccactatgagatatcatctcacaccagttagaatggcaatcattaaaaagtcaggaaacaacaggtgctggagaggatgcggagaaataggaacacttttacactgttggtgggactgtaaactagttcaaccattgtggaagtcagtgtggcgattcctcagggatctagaactagaaataccatttgacccagccatcccattactgggtatatacccaaatgagtataaatcatgctgctataaagacacatgcacacgtatgtttattgcggcactattctcaatagcaaagacttggaaccaacccaaatgtccaacaatgatagactggattaagaaaatgtggcacatatacaccatggaatactatgcagccataaaaaatgatgagttcatatcctttgtagggacatggatgaaattggaaaccatcattctcagtaaactatcgcaagaataaaaaaccaaacaccgcatattctcactcataggtgggaattgaacaatgagatcacatggacacaggaaggggaatatcacactctggggactgtggtggggtcgggggaggggggagggatagcattgggagatatacctaatgctagatgacacattagtgggtgcagcgcaccagcatggcacatgtatacatatgtaactaacctgcacaatgtgcacatgtaccctaaaacttagagtataataaaaaaaaaaaa

SEQ ID NO: 671 - DNA, 275 bp, Homo sapiens
  source 1..275: mol_type = other DNA
actgcaggtgtggaaacaggaagagaactagaactggaagtaaagcattgaagatgtgactgaattgctgcaatctcatgatcaaatttgaatggatgaggagttgctttttagggatgagcaaagaaagtggtttctcgagatggaatctactggtgaagttgctgtgaacattgttaaaatgccaataaaggatttaggaattacagaaacctggttgataaagcagtgccagggtgtgagagagttgacttcaattttgaaataagttccac

SEQ ID NO: 672 - DNA, 1634 bp, Homo sapiens
  source 1..1634: mol_type = other DNA
ctctccctctccctctccctctcccccctctccctctccccacggtctccctctccctctctttccaaggtctccctctgatgccgagccgaagctggactgtactgctgccatctcggctcgctgcagcctccctgcctgattctcctgcctcagcctgccgagtgcctgcgattgcaggcgcacgccgccacgcctggctgtttttcgtatttttttggtggagatggggtttcgctgtgttggccgggctggtctccagctcctaaccgcgagtgatccgccagcctcggcctcccgaggtgccgggattgcagatggagtctggttcactcagtgctcaatggtgcccaggctggagtgcaatggcgtgatctcggctcgctacaacctccacctcccagccgcctgccttggcctccaaagtgccgagattgcagcctctgcccggccgccaccccgtctgggaagtgaggagcctctctgcctggccgcccatcgtctgggacgtgaggagcccctctgcctggctgcccagtctggaaagtgaggagcgtctctgcccggccgccatcccatctaggaagtgaggagcgcctcttcccggccaccaacccatctaggaagtgaggagcgtctctgccccgccgcccatcgtctgagacgtggggagcgcctctgccccgccgccccgtctgggatgtgaggagcgcctctacctggccgcgaccccgtctgggaggtgaggagcatctctgcccggctgccccgtctgagaagtgaggagaccctctgcctggcaaccgccccgtctgagaagtgaggagcccctccgcccggcagccgccccgtctgagaagtgaggagcccctccgcccggcagccaccccgtctgggaagtgaggagcgtctccgcccggcagccaccccgtccgggagggaggtgggggggtcagccccccgcccagccagccgccccgtccgggagggaggtgggggggtcagccccccgcccggccagccgccccgtccgggaggtgaggggcgcctctgcccggccgcccctactgggaagtgaggagcccttctgcccggccaccaccccgtctgggaggtgtacccaacagctcattgagaacgggccatgatgacaatggtggttttgtggaatagaaaggggggaaaggcggggaaaagattgagaaatcggatggttgctgtgtatgtgtagaaagaagtagacatgggagacttttcattttgttctgtactaagaaaaattcttctgccttgtgatcctgttgatctgtgatcttacccctaaccctgtgctctctgaaacatgtgctgtgtccactcagggttaaatggattaagggtggtgcaagatgtgctttgttaaacagatgcttgaaggcagcatgctcgttaagagtcatcaccactccctaatctcaagtacccagggacacaaacactgcggaaggccgcagggtcctctgcctaggaaaaccagagacctttgttcacttgtttatctgctgaccttccctccactattgtcctatgaccctgccaaatccccctctgcgagaaacacccaagaatgatcaattaaaaaaaaaaaaaaaaaa

SEQ ID NO: 673 - DNA, 881 bp, Homo sapiens
  source 1..881: mol_type = other DNA
cctaactcacttgctccttggactttctcacactcttggaaactcacaaccatggatacatcctcttatctgcttgggccatgctcataatcctaaggctgaatgtagctggaaaaacgtgcacctatgctgacaggtcttgttatatattcatggccattgacctgcctcaggtaagccccagaggctgcccaaaaatcatatgtccctaatccattctctcttccagtcttctgtcaactatttcagacttcatttacttttcccacctccaatatttcttcccctattctcactcaggtgaggaccttgctgcttatttcactgcaagaaatgaagtaatctctgcatctctgtgtatgcaccctgctatctcttttattactgtttgtaaataggtcatgcacctaacaaaggccaccacctctgctcacaagtattgctctagcaactctcttcaccttgccttgtcattataaataatttcctccatactagttgtatccaccagtgccccatttctttatagccagattccttgagagccttgcctaaactgctgtctgaaatttctctcctcccattctctcttaaacccactccagttacctttaccactccacagaacagttctctaagtcaccaatgactaccatgttgttaaatcaaggatccattttctgtcctcatttttacttcatctctcagcagcatttgacagagttgttcattgtctcaatctttaaacattcttcttttgtcattcaaacaatacatttgcctgattttcctcccagctttatagatgctccttcccagtctctgactggtcctttttcatcaacctgacttttacatttggaagactttttgttttcatt

SEQ ID NO: 674 - DNA, 6028 bp, Homo sapiens
  source 1..6028: mol_type = other DNA
gggggaggagccaagatggccaaataggaacaactctggtctacagctcccagcttgagcgacgcagaagacgggtgatttctgcatttccatctgaggtaccgggttcatctcactagggagtgccacacagtgggcgcaggtcagtgggtgcgcgcaccgtgcgtgagccgaagcagggcaaggcattgcctcacttgggaagcgcaaggggtcagggagttccctttctgagtcaaagaaaggggttacagacgggacctggaaaatcgggtcactcctaccggaatactgcgcttttccgacgggcttaaaaaacggcgcaccaggagattatatcccgcacctggctcggagggtcctacgcccacggagtctccctgattgctagcacagcagtctgagatcaaactgcaaggcggcagcgaggctgggggaggggcgcccgccattgcccaggcttccttaggtaaacaaagcagccgggaagctcgaactgggtggagcccaccacagctcaaggaggcctgcctgcctctgtaggctccacctctgggggcaggacacagacaaacaaaaagacagcagtaatctctgcagacttaaatgtccctgtctgacagctttgaagagagcagtggttctcccagcacgcagctggagatctgagaacaggcagactgcctcctcaagtgggtccctgacccctgacccccgagcagcctaactgggaggcaccccccagcaggggcacactgacacctcacacggcagggtactccaacagacctgcagctgagggtcctctctgttagaaggaaaactaacaaacagaaaggacttccacaccagaagtccatctgtatatcaccatcatcaaagaccaaaagtagataaaaccacaaagttggggaaaaaacagaaaagaaaaactggaaactctaaaaagcagagtgcctctcctcctccaaaggaacgcagttcctcaccagcaacggaacaaagctggatggagaatgactttgacgagctgagagaaggcttcagatgatcaaattactctgagctacgggaggacattcaaaccaaaggcaaagaagttgaaaactttgaaaaaaatttagaagaaggtataactagaataaccaatacagagaagtgcttaaaggagctgatggagctgaaaaccaaggctcaagaactacgtgaagaatgcagaagcctcaggagccgatgcgatcaactggaagaaagggtgtcagtgatggaagatgaaatgaatgaaatgaagcaagaagggaagtttagagaaaaaagaataaaaagaaatgagcaaagcctccaagaaatatgggactatgtgaaaagaccaaatctacgtctgattggtgtacctgaaagtgatggggagaatggaaccaagttggaaaacactctgcaggatattatccaggagaacttccccaatctggcaaggcaggccaacgttcagattcaggaaatacagagaacaccacaaagatactcctcgagaagagcaactccaagacacataattgtcagattcaccaaagttgaaatgaaggaaaaaatgttaagggcagccagagagaaaggtcgggtcaccctcaaagggaagcccatcagactaacagctgatctctcggcagaaaccctacaagccagaagagagtaggggccaatattcaacattcttaaagaaaagaattttcaacccagaatttcatatccagccaaactaagcttcataagtgaaggagaaataaaatactttacagacaagcaaatgctgagagattttgtcaccaccaggcctgccttacaagagttcctgaaggaagcactaaacatggaaaggaacaaccggtaccagccactgcaaaatcatgcctaaatgtaaagaccatcgagactaggaagaaactgcatcaactaacgagcaaaataaccagctaacatcataatgacaggatcaaattcacacataacaatattcactttaaatgtaaatggactaaatgctccaattaaaagacacagactggcaaattggataaagagtcaagacccatcagtgtgctgtattcaggaaacccatctcacgtgcagagacacacataggctcaaaataaaaggatggaggaagatctaccaagcaaatggaaaacaaaaaaaggcaggggttgcaatcctagtctctgataaaacagactttaaaccaacaaagatcaaaagagacaaagaaggccattacataatggtaaagggatcaattcaacaagaagagctaactatcctaaatatatatgcacccaatacaggagcacccagattcataaagcaagtcctgagtgacctacaaagaaacttagactcccacacattaataatgggagactttaacaccccactctcaacattagacagatcaacgagacagaaagtcaacaaggataaccaggaattgaactcagctctgcaccaagtggacctaatagacatctacagaactctccaccccaaatcaacagaatatacatttttttcagcaccacaccacacctattccaaaattgaccacatagttggaagtgaagctctcctcagcaaatgtaaaagaacagaaattataacaaactatctctcagaccacagtgcaatcaaactcgatctcaggattaagaatctcactcaaaaccgctcaactacatggaaactgaacaacctgctcctgaatgactactgggtacatagtgaaatgaaggcagaaataaagatgttctttgaaaccaacgagaacaaagacacaacataccagaatctctgggacacattcaaagcagtgtgtagagggaaatttatagcactaaatgccaaaaagagaaagcaggaaagatccaaaattgacaccctaacatcacaattaaaagaactagaaaagcaagagcaaacacattcaaaagctagcagaaggcaagaaataactaaaatcagagcagaactgaaggaaatagagacacaaaaaaccctttaaaaaattaatgaatccaggagctggttttttgaaaggatcaacaaaattgatagaccgctaggaagactaataaagaaaaaaagagagaagaatcaaatagacgcaataaaaaatgataaaggggatatcaccaccgatcccacagaaatagaaactaccatcagagaatactacaaacagctctacgcaaataaactagaaaatctagaagaaatggataaattcctggacacatacaccctcccaagactaaaccaggaagaagttgaatctctgaatagaccaataacaggctctgaaattgtggcaataatcaatagtttaccaaccaaaaagagtccaggaccagatggattcacagccgaattctaccagaggtacgaggaggaactggtaccattccttctgaaactattccaatcaatagaaaaagagggaatcctccctaactcattttgaggccaacatcattctgataccaaagccaggcagagacacaacaaaaaaagagaattttagaccaatatccttgatgaacattgatgcaaaaatcctcaataaaatactggcaaaacgaatccagcagcacgtcaaaaagcttatccaccatgatcaagtgggcttcatccctgggatgcaaggctggttcaatatacgcaaatcaataaatgtaatccagcatatacacagagccaaagacaaaaaccacatgattatctcaatagatgcagaaaaagcctttgacaaaattcaacaacccttcatgctaaaaactctcaataaattaggtattgatgggacgtatttcaaaataataagagctatctatgacaaacccacagccaatatcatactgaatgggcaaaaactggaagcattccctttgaaacctggcacaagacagggatgccctctctcaccactcctattcaacatagtgttggaagttctggccagggcaatcaggcaggagaaggaaataaagggtattcaattaggaaaagaggaagtcaaattgtccctgtttgcagacgacatgattgtatatctagaaaaccccattgtctcagcccaaaatctccttaagctgataagcaacttcagcaaagtctcaggatacaaaatcaatgtacaaaaatcacaagcattcttatacaccaacaacagacaaacagagagccaaatcctgagtgaactcccattcacaattgcttcaaagagaataaaatacctaggaatccaacttacaagggatgtgaaggacctcttcaaggagaactacaaaccactgctcaaggaaataaaagaggatacaaacaaatggaagaacattccatgctcatgggtaggaagaatcaatatcgtgaaaatgaccatactgcccaaggtaatttacagattcaatgccatcctcatgaagctaccaatgcctttcttcacagaattggaaaaaactactttaaagttcatatgaaccaaaacagagcccgcatcgccaagtcagtcctaagccaagagaacaaagctggaggcatcacactacctgacttcaaactatactacaaggctacagtaaccaaaacagcgtggtactggtaccaaaacagagatatagatcaatggaacagaacagagccctcagaaataacgccgcatatctacaactatctgatctttgacaaacctgagaaaaacaagcaatggggaaaggattccctattgaataaatggtgctgggaaaactggctagccatatgtagaaagctgaaactggatcccttccttacaccttgtacaaaaatcaattcaagatggattaaagacttaaacgttagacctaaaaccataaaacccctagaagaaaacctaggcattaccattcacgacataagcatgggcaaggacttcatgtctaaaacaccaaaagcaatggcaacaaaagccaaaattgacaaatgggatctaattaaactaaagagcttctgcacagcaaaagaaactaccatcagagtgaacaggcaacctacaaaatgggagaaaattttcgcaaccttctcatctgacaaagggctaatatccagaatctacaatgaactcaaacacatttacaagaaaaaaacaaacaaccccatcaaaaagtgggcaaaggatatgaacagacacttctcaaaagaagacatttatgcagccaaaaaacacatgaaaaaatgctcatcatcactggccatcagagaaatgcaaatcaaaaccacaatgagataccatctcacaccagttagaatggcaatcattaaaaagtcaggaaacaacaggtgctggagaggatgtggagaaataggaacacttttacactgttggtgggactgtaaactagttcaaccattgtggaagtcagtgtggcgattcctcagggatctagaactggaaataccatttgacccagccatcccattactgggtgtatacccaaaggactataaatcatgctgctataaagacacatgcacacgtatgtttattgcggcattattcacaatagcaaagacttggaaccaacccaaatgtccaacaatgatagactggattaagaaaatgtggcacatatacaccatggaattctttgcagccataaaaaaatgatgagttcatgtcctttgtagggacatggatgaaattggaaatcatcattctcagtaaactatcgcaagaacaaaaaaaccaaacaccgcatattctcactcataggtgggaattgaactatgagatcacatagacacaggaaggggactatcacactctggggactgttgtggggtggggggaggggggagggatagcatcgggagatatacctaatgctagatgacgagttagtgggtgcagcgcaccagcatggcacatgtatacatatgtaactaacctgcacgatgtgcacatgtaccctaaaacttaaagtataataaaaaaaaaaga

SEQ ID NO: 675 - DNA, 1589 bp, Homo sapiens
  source 1..1589: mol_type = other DNA
aaggtaatttacagattcaatgccatccccatcaagctaccaatgactttcttcacagaattggaaaaaactactttaaagttcatatggaaccaaaaaagagcccgcattgccaagtcaatcctaagccaaaagaacacagctggaggcatcacactacctgacttcaaactatactacaaggctacagtaaccaaaacagcatggtactggtaccaaaacagagatatagatcaatggaacagaacagagccctcagaaataatgccgcatatctacaactatctgatctttgacaaaactgagaaaaacaagcaatggggaaaggattccctatttaataaatggtgctgggaaaactggctagccatatgtagaaagctgaaactggatcccttccttacaccttatacaaaaatcaattcaagatggattaaagatttaaacgttaaacctaaaaccataaaaaccctagaagaaaacctaggcattaccattcaggacataggcgtgggcaaggacttcatgtccaaaacaccaaaagcaatggcaacaaaagacaaaattgacaaatgggatctaattaaactcaagagcttctgcacagcaaaagaaactaccatcagagtgaacaggcaacctacaacatgggagaaaatttttgcaacctactcatctgacaaagggctaatatccagaatctacaatgaactcaaacaaatttacaagaaaaaaacaaacaaccccatcaaaaagtgagcaaaggacatgaacagacacttctcaaaagaagacatttatgcagccaaaaaacacatgaagaaatgctcatcatcactggccatcagagaaatgcaaatcaaaaccactatgagatatcatctcacaccagttagaatggcaatcattaaaaagtcaggaaacaacaggtgctggagaggatgcggagaaataggaacacttttacactgttggtgggactgtaaactagttcaaccattgtggaagtcagtgtggcgattcctcagggatctagaactagaaataacatttgacccagccatcccattactgggtatatacccaaatgagtataaatcatgctgctataaagacacatgcacatgtatgtttattgcggcactattcacaatagcaaagacttggaaccaacccaaatgtccaacaatgatagactggattaagaaaatgtggcacatatacaccatggaatactatgcagccataaaaaatgatgagttcatatcctttgtagggacatggatgaaattggaaaccatcattctcagtaaactatcgcaagaacaaaaaaaccaaacaccgcatattctcactcataggtgggaattgaacaatgagatcacatggacacaggaaggggaatatcacactctggggactgtggtggggtcgggggaggggggagggatagcattgggagatacacctaatgctagatgacacattagtgggtgcagcgcaccagcatggcacatgtatacatatgtaactaacctgcacaatgtgcacatgtaccctaaaacttagagtataataaaaaaaaaaaa

SEQ ID NO: 676 - DNA, 301 bp, Homo sapiens
  source 1..301: mol_type = other DNA
ggccgggcacagtggctcacgcctataatcccagcactttgggaggccaagggtggtagatcacttgaggtcaagagttgtgacaccagcctggccaacctggtgaaaccctatctctattaaaaaatacaaaaaaatacaaaaaaattagctgggcatgttggcatgcacctgtagtcccagctatttgggaggctgaggcacgagaattgcttgaatccgggaggtggaggttgcagtgagccaagatggggccactgcactctaacgtgggcaacagagaccctgtctcaaaaagaaa

SEQ ID NO: 677 - DNA, 116 bp, Homo sapiens
  source 1..116: mol_type = other DNA
ttctgcctggggatcctgaagataaaaagctttgaaaagtcgaattcatggtcgtggaagctgagcccatattaagagatgtcaggttggtaggggttcctggcgtcggcggcaga

SEQ ID NO: 678 - DNA, 6147 bp, Homo sapiens
  source 1..6147: mol_type = other DNA
gggatggagccaagatggccaaataggaacagctccagtctacagctcccagcatgagtgacacagaagacaggtgatttctgcatttccaactgaggtaccaggttcatctcacaggggagtgctggacagtgggtgcaggacttggtgcagtgcaccgtgtgtgagctgaagcagggcgaggcatcgcctcacccaggaagtgcaaggtgtcagggaattccctttcctagtcaaagaaaggggtgacagaaagcacctggaaaatcgggtcactcccactctaatacttaatactgcacttttccaatgggcttcacaaatggcacaccagaagattatatcccacaccttgcttggagggtcctacacccacagagcctcacttattgctagcacagcagtctgagatcaaactgcaagtggcagcgaggctgggggatgggtgcgcaccattgctcaggcttgagtaggtaaacaaagcagcgggaagctcaaactgggtggagcccaccacagcttaaggagacctgcctgcctctgtaggctccacctctgggggcagggcacagacaaacaaaagacagcataacctctgcagacttaaatgtccctgtctgacagctttggagagagtagtggttctcccagcacgcagcttgagatctgagaacgggcagactgcctcctcaagtgggtccctgacccctgagtagcctaactgggaggcaccccccagtaggggcagactgacacctcacatggctgggtactcctctgagacaaaacttccagaggaacaatcaggcagcagcatttgcggttcaccaatatccgctgttctgcagccaccgctgctgacacccaggtaaacagggtctggagtggacctccagtaaactccaatagacctgcagctgagggtcctgactgttagaaggaaaactaacaaacagaaaggacatccacaccaaaaacccatctgtacgtcaccatcataaaagaccaaaggtagataaaaccacaaagacggggaaaaaacagagcagaaaaaccagaaactctaaaaataagagcacctctcctcctccaaaggaacacagctcctcaccagcaatggaacaaagctggctggagaatgactttgacaagttgagagaggaaggcttcagaagattaaactattctgagctaaaggaggaagttcaaaccaatggcaaagaagttaaaaacttagaaaaaaaaccagctgaatggataactagaatgatcaatgcagagaagtccttaaaggacctgatggagctgaaaaccacggcacgagaactacgtgacgaatgcacaagcctcagtaactgatgcgatcaactggaagaaagggtatcagtcacggaagatgaaatgaatgaaatgaagtgagaagagaagtttagagaaaaaagaataaaaagaaatgaacaaagcctccaagaaatatgggactatatgaaaagaccaaatctacatcaaattggtgtacctgaaagtgacggggagaatggaaccaagttggaaaacgctctgcaggatattaaccaggagaacttccccaatctagcaaggcgggtcaacattcaaatacaggaaatacagagaatgccacaaagaaactccttgagaagagcaactccaagacacataattgtcagattcaccaaagttgaaatgaaggaaaaaatgttaagggcagccagagagaaaggtcgggttacccacaaagggaagtccatcagactaacagctgatctcttggcagaaactctacaagccagaagagagtgggggccaatattcaatattcttaaagaaaataattttcaacccagaatttcatatccagccaaactaagcttcacaagtgaaggagaaataaaatactttacagacaagcaaatgctgagagattttgtcaccaccagacctgccctaaaagagctcctgaaggaaacactaaacatggaaaggaacaaccggtaccagccactgcaaaaacacgccaaattgtaaagaacatcaaggctaggaagaaactgcatcaactaataagcaaaataaccagctaacatcataatgacaggatcagattcacacataacaatactaaccttaaatgtaaatgggctaaatgctccaattaaaaggcacagactggcaaattggataaagagtcaagacccatcagtgtgctgtattcaggaaacccatctcatgtgcagagacacacataggctcagaataaagggatggaggaagacctaccaagcaaatggaaaacaaaaaaaggcaggggttgcaatcctagtctcggataaaacagactttaaaccaacaaagatcaaaagagacaaggaaggccattacataatggtaaagggatcaattcaacaagaggagctaactatcctaaatatatatgcacccaatacaggagcacccagattcataaagcaagtccttagtgacctacaaagagacttagactcccacacaataataatgggagacgttaacaccccactgtcaacattagacagatcaacaagacagaaagttaacaaggatacccaggaattgaactcagctctgcaccaagtggacctaatagacatctacagaactcctcaccccaaatcaacagaatatacattcttttcagcaccacaccacacctattccaaaactgaccacatacttggaagtaaaacactcctcagcaaatgcaaaagaacagaaattataacaaactgtctctcagaacacagtgcaatcaaactagaacttaggattaagaaactcactcaaaacgactcaactacatggaaactgaacccgctcctgaatgactactgggtatataatgaaatgaaggcagaaataaagatgttctttgaaaccaatgagaacaaagacacaacataccagaatctctgggacacattcaaagcagtgtgtagagggaaatttatagcactaaatgcccactagagaaagtgggaaagatctaaaattgacaccctaacatcacaattaaaagaactagagaagcaagagcaaacacattcaaaagttagcagaaggcaagaaataactaaaatcagagcagaactgaaggaaatagagacacaaaaaaccgttcaaaaattaatgaatccgggagctggttttttgaaaagatcaacaaaattgatagaccactagcaagactaataaagaagaaaagagagaagaatcaaatagacacaataaaaaatgcaaaggagatatcaccactgattccacagaaatacaaactaccatcagagaatactataaacatctctatgcaaataaactagaaaatctagaagaaatggataaattcctcgacacatacactctcccaagactaaaccaggaagaacttgaatctctgaatagaccaataacaggctctgaaattgaggcaataattaatagcttaccaattaaaaaaagtccaggaccagatggattcacagctgaattctaccagaggtacaaggaggagctggtaccattccttctgaaactattccaatcaatagaaaaagagggaatcctccctaactcattttatgaggccagcatcatcctgataccaaagcctggcagagacacacacaaaaaaagagaattgtagagcaatatccttgatgaacattgatgcaaaaatcctcaataaaatactggcaaaccgaatccagcagcacatcaaaaagcttatccaccatgatcaagtggtgggcttcatccctgggatgcaaggctggttcaacatacaaaaaatcaataaatgtattccagcatataaacagaaccaaagacaaaaatcacatgattatctcaatagatgcagaaaaggcctttgacaaaattcaacaaccttcatgctaaaaactctcaataaattaggtattgatgggatgtatctcaaaataataagagctatctatgacaaacccacagccaatatcatactgaatggacaaaaactggaagcattccctttgaaaactggcacaagacagggatgccctctctcaccactcctattcaacatagtgttggaagttctggccagggcaaccgggcaggagaagggaataaagggcattcaatttggaaaagaggaagtcaaattgtccctgtttgcagatgacatgattgtatatctagaaaaccccattgtctcagcccaaaatctccttaagctgataagcaacttcagcaaagtctcaggatacaaaatcaatgtgcaaaaatcacaagcatccttacacaccaataacagacaaacagagagccaaatcatgagtgaactcccattcacaattgcttcaaagagaataaaatacctaggaatccaacttacaagggatgtgaaggacctcttcgaggaaaactacaaaccactgctcactgaaataaaagaggatacaaacaaatggaagaacattccatgctcatgggtaggaagaatcaatatcatgaaaatggccatactgcccaaagtaatttatagattcaatgccatccccatcaagctaccaatgactttcttcacagaattggaaaaaactactttaaatttcatatggaaccaaaaaagagcccgcatcgccaagacaatcctaagccaaaagaacaaagctggaggcatcacactacctgacttcaaactatgctacaaggctacagtaacaaaaacagcatggtactggtacaaaaacagagatatagatcaatggaacagaacagagccctcagaaataatgccacatatctacaactatctgatctttgacaaacctgacaaaaacaagcaatggggaaaggattccctatttaataaatggtgctgggaaaactggctagccatatgtagaaagctgaaactggatcccttccttacaccttatacaaaaattaattcaagatggactaaagacttaaatgttagacctaaaaccataaaaaccctagaagaaaacctaggcaataccattcaggtattggcatgggcaaggacttcatgtctaaaacaccaaaagcaatggcaacaaaggccaaaattgacaaatgggatctaattaaactaaagagcttctgcacagcaaaagaaactaccatcagaatgaacaggcaacctacagaatgggagaaaatttttgcaacctattcatctgacaaagggctaatatccagaatctacaatgaactcaaacaaatttacaagaaaaaaacaaacaatcccatcaaaaagtggccaaaggatatgaacagacacttctcaaaagaagacatttatgcagccaaaagacacatgaaaaaatggtcatcatcactgaccatcagagaaatgcaaatcaaaaccacaatgagataccatctcacaccagttagaatggcgatcattaaaaagtcaggaaacaacaggtgctggagaggctgtggagaaataggaacacttttacactgttggtgtgactgtaaactagttcaaccattgtggaattcggtgtggcaattcctcagggatctagaactagaaataccatttgaaccagccatcccattactgggtatatacccaaaggattataaatcatgctgctataaagacacatgcatacgtatgtttattgtggcactattcacaatagcaaagacttggaaccaacccaaatgtccaacagtgatagactggattaagaaaatgtggcacatatacaccatggaatactatgcagccataaaaaatgatgagttcatgtcctttgtggggacatagttgaagctggaagtcatcattctcagcaaactatcgcaaggacaaaaaaccaaacacgacatgttctcactcataggtgggaattgaacaagaagaacacatggacacaggaaggggaacatcatacaccggggactgttgtggggtggggggagtggggagggatagcattaggagatatacctaatgctaaatgacgagttaatgggtgctgcacatcaacatggcacatgtatacatatgtaacaaacgtgcacgttgtgcacatgtaccctgaaacttaaagtataaaaaaaaaa

SEQ ID NO: 679 - DNA, 6147 bp, Homo sapiens
  source 1..6147: mol_type = other DNA
aggtgggagccaagatggccgaataggaacaggtccagtctacagctcccagcgtgagcgatgcagaagacgggtgatttctgcatttccatctgaggtaccgggttcatctcactagggagtgccagacagtgggcacaggacagtgggtgcagcgcaccatgcctgagccgaagcagggagaggcattgcctcactcgggaagcgcaaggggtcagggagttccctttcctagtcaaagaaaggggtgacagacagcacctggaaaatcgggtcactcccaccccaatactgcgctttcccaacaggcttaaaaaaaggcgcaccaggagattatatcccgcacatggctcggagggtcctacgcccacggagtctcgctgattgctagcacagcagtctgagatcaaactgcaagatggcagggaggctgggggaggggagcccgccattgcccaggcttgcttaggtaaagaaagcagccgggaagctcgaactgggtggagcccaccacagctcaaggaggcctgcctgcctctgtaggctccacctctgggggcagggcacagacgaaaaaaaagacagcagtaacctctgcagacttaaatgtccatgtctgacagctttgaagagagcagtggttctcccagcatgcagctggagatctgagaatgggcagactgcctcctcaagtgggtccctgacccctgacccccgagcagcctaactgggaggcaccccccagtaggggcagactgacacctcacacagcagggtactcctctgagacaaaattccagaggaacgatcagacagcagcattcgcggttcacgaaaatctgctgttctgcagccaccgctgctggtacccaggcaaacagggtctggagtggacctctagcaaactccaacagacctgcagctgagggtcctgtctgttagaaggaaaactaacaaacagaaaggacatccacaccaaaaacccatctgtacatcaccatcatcaaagaccaaaagtagataaaaccacaaagacggggaaaaaacagagcagaaaaactggaaactctaaaaagcagagtgcctctcctcctccaaaggaacgcagctcctcaccagcaacggaacacagctggacggagaatgactttgacgagatgagagaagaaggcttcagacgatcaaactactccgagctacaggaggaaattcaaaccaaaggcaaagaagttgaaaactttgaaaaaaatttagatgaatgtataactagaataaccaatacagagaagtgcttaaaggagctgctggagtggaaagccaaggctcgagaactacgtgaagaatgcagaagcttcaggagccgatgcaatcaactggaagaaagggtatcagtgatggaagatgaaatgaatgaaatgaagcaagaagggaagtttagagaaaaaagaataaaaagaaacaaacaaagcctccaagaaatatgggactatgtggaaagaccaaatctacgtctgattggtgtacctgaaagtgatggggagaatggaaccaagttggaaaacactctgcagaatattatccaggagaacttccccaatctagcaaggcaggccaacattcagattcaggaaatacagagaacgccacaaagatactcctcgagaagagcaactccaagacacataattgtcagattcaccaaagttgaaatgaaggaaaaaatgttaagggcagccagagacaaagttcgggttacccacaaagggaagcccatcagactaacagtggatctctcggcagaaaccctacaagccagaagagactgggggccaatattcaacattcttaaagagaagaattttcaacccagaatttcatatccagccaaactaagcttcataagtgaaggagaaataaaatacttcacagacaagcaaatgctgagagattttgtcaccaccaggcctgccctaaaagagctcctgaaggaagcactaaacatggaaaggaacaactggtaccggccactgcaaaatcatgccaaattgtaaagaccatcgaggctaggaagaaactgcatcaactaacgagcaaaataaccagctaacatcataatgacaggatcaaattcacacataacaatattgactttaaatgtaaatgcactaaatgctccagttaaaagacacagactggcaaattggataaagagtcaagacccatcagtgtgctgtattcaggaaacccatctcacgtgcagagacacacataggctcaaaataaaaggatggaggaagatctaccaagcaaatggaaaacaaaaaaaaggcaggggttgcaatcctagtctctgataaaacagactttaaaccaacaaagatcaaaagagacaaagaaggccattacataatggtaaagggatcaattcaacaagaagagctaactatcctaaatatatatgcgcccaatacaggagcacccagattcataaagcaagtcctgagtgacctacaaagagacttagactcccacacaataataatgggagactttaacaccccactgtcaacattagacagatcaatgagacagaaagttaacaaggatacccaggaattgaactcagctctgcaccaagaggacctaacagacatctacagaactctcgaccccaaatcaacagaatatacatttttttcagcaccacaccacacctattccaaaattgaccacatacttggaagtaaagctctcctcagcaaatgtaaaagaacagaaattataacaaactgtctctcagaccacagtgcaatcaaactacaactcaggattaagaaactcactcaaaaccgctcaactgcatggaaactgatcaacctcctcctgaatgactgctgggtacataatgaaatgaaggcagaaataaagatgttctttgaaaccaacgagaacaaagacacaacataccagaatctctgggacacattcaaagcagtgcatagagggaaatttatagcactaaatgcccacaagagaaagcaggaaagatccaaaattgacaccctaacatcacaattaaaagaactagaaaagcaagagcaaacacattcaaaagctagcagaaggcaagaaataactaaaatcagagcagaactgaaggaaatagagacacaaaaaacccttcaaaaaattaatgaatccaggagctggttttttgaaaggatcaacaaaattgatagaccactagcaagactaataaagaataaaagagagaagaatcaaatagacgcaataaaaaatgataaaggagatatcaccaccgatcccacagaattacaaactaccgtcagagaatactacaaacacctctatgcaaataaactagaaaatctagaagaaatggataaattccttgacacatacaccctcccaagactaaaccaggaagaagttgactctctgaatagaacaataacagaatctgaaatggtggcaataatcaatagcttaccaaccaaaaagagtccaggaccagatggattcacagctgaattctaccagaggtacaaggagaaactggtaccattccttctgaaactattccaatcaacagaaaaagagggaatcctccctaactcattttatgaggccagcatcatcctgataccaaaacctggcagagacacaaccaaaaaagagaattttagaccaatatccttgatgaacattgatgcaaaaatcctcaataaaatactggcaaaccgaatccagcagcacatcaaaaagcttatccaccatgatcaagtgggcttcatccctgggatgcaaggctggttcaatatatgcaaatcaataaatgtaatccagcatataaacagagccaaagacaaaaaccacatgattatctcaatagatgcagaaaaagcctttgacaaaattcaacaacccttcatgctaaaaactctcaataaattaggtattgatgggacgtatctcaaaataagagctatctatgacaaacccacagccaatatcatactgaatgggcaaaaactggaagcattccctttgaaaactggcacaagacagggatgccgtctctcaccgctcctattcaacatagtgttggaagttctggccagggcaattaggcaggagaaggaaataaagggtattcaattaggaaaagaggaagtcaaattgtccctgtttgcagatgacataattgtatatctagaaaaccccattgtctcagcctaaaatctccttaagctgataagcaacttcagcaaagtctcaggatacaaaatcaatgtacaaaaatcacaagcattcttatataccaataacagacaaacagagagccaaatcatgagtgaactcccattcacaattgcttcaaagagaataaaatacctaggaatccaacttacaagggatgtgaaggacctcttcaaggagaactacaaaccactgctcaatgaaataaaagaggatacaaacaaatggaagaacattccatgctcatgggtaggaaaaatcaatatcatgaaaatggccatactgcccaaggtaatttatagattcaatgccatccccataaagctaccaatgactttcttcacagaattggaaaaaactactttaaagttcaaatggaaccaaaaaagaggccgcatcgccaagtcaatcctaagccaaaagaacaaagctggaggcatcaccctacctgacttcaaactatactacaaggctacagtaaccacaacagcatggtactggtaccaaaacagagatatagatcaatggaacagtacagagccctcagaaataatgcctcatatctacaactatctgatctttgacaaacctgagaaaaacaagcagtggggaaaggattccctatttaataaatggtgctgggaaaactggctagccatatgtagaaagctgaaactggatcgcttccttacaccttatacaaaaattaattcaagatggattaaagacttaaacggtagacctaaaaccataaaaaccctagaagaaaacctaggcattaccattcaggacataggcatgggcaaggacttcatatctaaaacaccaaaagcagtggcaacaaaagacaaaattgacaaatgggatctaattaaactaaagagcttctacacagcaaaagaaactaccatcagagtgaacaggcaacctacaaaatgggagaaaatttttgcaacctactcatctgacaaagggctaatatccagaatctacaatgaactcaaacaaatctgcaagaaaaaaacaaacaaccccatcaaaaagtgggcgaaggacatgaacagatacttctcaaaagaagacatttatgcagccaaaaaacacatgaaaaaatgctcatcatcactggccatcagagaaatgcaaatcaaaaccacaatgagataccgtctcacaccagttagaatggcaatgattaaaaagtcaggaaacaacaggtgctggagaggatgtgaagaaatagaaacacttttacactgttggtgggactgtaaactagttcagcccttgtggaagtcagtgtggcgattgctcagggatctagaactagaaatacgatttgacccagccatcccattactgggtatatgcccaaaggactataaatcatgctgctataaagacacatgcacacgtatgtttattgcagcactattcacaatagcaaagacttggaaccaacccaaatgtccaacaatgatagactggattaagaaaatgtggcatatatataccatggaatactatgcagccataaaaaaggatgagttcatgtcctttgtaggaacatggatgaaattggaaatcatcattctatcgcaagaataaaaaaccaaacaccgcatattctcactcataggtgggaattgaacaatgagaacacatggacacaggaaggggaacatcacactctggggacttttgtggggtggggggaggggggagggatagctttaggaggtatacctaatgctaaatgacgagttaatgggtgcagcacaccagcatggcacatgtatacatatgtaactaacctgcacattgtgcacatgtaccctaaaacttaaaagtataataataataaaa

SEQ ID NO: 680 - DNA, 6051 bp, Homo sapiens
  source 1..6051: mol_type = other DNA
gggaggagccaagatggccgaataggaacagctccggtctacagctcccagcgtgagcgacgcagaagacggtgatttctgcatttccatctgaggtaccgggttcatctcactagggagtgccagacagtgggcgcaggccagtgtgtgtgcgcaccgtgcgcgagccgaagcagggcgaggcattgcctcacctgggaagcgcaaggggtcagggagttccctttccgagtcaaagaaaggggtgacggacgcacctggaaaatcgggtcactcccacccgaatattgcgcttttcagaccggcttaagaaacggcgcaccatgagactatatcccacacctggctcggagggtcctacgcccacggaatctcgctgattgctagcacagcagtctgagatcaaactgcaaggcggcaacgaggctgggggaggggcgcccgccattgcccaggcttgcttaggtaaacaaagcagccgggaagctcgaactgggtggagcccaccacagctcaaggaggcctgcctgcctctgtaggctccacctctgggggcagggcacagacaaacaaaaagacagcagtaacctctgcagacttaagtgtccctgtctgacagctttgaagagagcagtggttctcccaggacgcagctggagatctgagaacgggcagactgcctcctcaagtgggtccctgactcctgacccccgagcagcctaactgggaggcaccccccagcaggggcacactgacacctcacacggcagggtattccaacagacctgcagctgagggtcctgtctgttagaaggaaaactaacaaccagaaaggacatctacaccgaaaacccatctgtacatcaccatcatcaaagaccaaaagtagataaaaccacaaagatggggaaaaaacagaacagaaaaactggaaactctaaaacgcagagcgcctctcctcctccaaaggaacgcagttcctcaccagcaacagaacaaagctggatggagaatgattttgacgagctgagagaagaaggcttcagacgatcaaattactctgagctacgggaggacattcaaaccaaaggcaaagaagttgaaaactttgaaaaaaatttagaagaatgtataactagaataaccaatacagagaagtgcttaaaggagctgatggagctgaaaaccaaggctcgagaactacgtgaagaatgcagaagcctcaggagccgatgcgatcaactggaagaaagggtatcagcaatggaagatgaaatgaatgaaatgaagcgagaagggaagtttagagaaaaaagaataaaaagaaatgagcaaagcctccaagaaatatgggactatgtgaaaagaccaaatctacgtctgattggtgtacctgaaagtgatgtggagaatggaaccaagttggaaaacactctgcaggatattatccaggagaacttccccaatctagcaaggcaggccaacgttcagattcaggaaatacagagaacgccacaaagatactcctcgagaagagcaactccaagacacataattgtcagattcaccaaagttgaaatgaaggaaaaaatgttaagggcagccagagagaaaggtcgggttaccctcaaaggaaagcccatcagactaacagcggatctctcggcagaaaccctacaagccagaagagagtgggggccaatattcaacattcttaaagaaaagaattttcaacccagaatttcatatccagccaaactaagcttcataagtgaaggagaaataaaatactttatagacaagcaaatgttgagagattttgtcaccaccaggcctgccctaaaagagctcctgaaggaagcgctaaacatggaaaggaacaaccggtaccagccgctgcaaaatcatgccaaaatgtaaagaccatcgagactaggaagaaactgcatcaactaatgagcaaaatcaccagctaacatcataatgacaggatcaaattcacacataacaatattaactttaaatataaatggactaaattctgcaattaaaagacacagactggcaagttggataaagagtcaagacccatcagtgtgctgtattcaggaaacccatctcacgtgcagagacacacataggctcaaaataaaaggatggaggaagatctaccaagccaatggaaaacaaaaaaaggcaggggttgcaatcctagtctctgataaaacagactttaaaccaacaaagatcaaaagagacaaagaaggccattacataatggtaaagggatcaattcaacaagaggagctaactatcctaaatatttatgcacccaatacaggagcacccagattcataaagcaagtcctcagtgacctacaaagagacttagactcccacacattaataatgggagactttaacaccccactgtcaacattagacagatcaacgagacagaaagtcaacaaggatacccaggaattgaactcagctctgcaccaagcagacctaatagacatctacagaactctccaccccaaatcaacagaatatacatttttttcagcaccacaccacacctattccaaaattgaccacatagttggaagtaaagctctcctcagcaaatgtaaaagaacagaaattataacaaactatctctcagaccacagtgcaatcaaactagaactcaggattaagaatctcactcaaagccgctcaactacatggaaactgaacaacctgctcctgaatgactactgggtacataacgaaatgaaggcagaaataaagatgttctttgaaaccaacgagaacaaagacaccacataccagaatctctgggacgcattcaaagcagtgtgtagagggaaatttatagcactaaatgcctacaagagaaagcaggaaagatccaaaattgacaccctaacatcacaattaaaagaactagaaaagcaagagcaaacacattcaaaagctagcagaaggcaagaaataactaaaatcagagcagaactgaaggaaatagagacacaaaaaacccttcaaaaaatcaatgaatccaggagctggttttttgaaaggatcaacaaaattgatagaccgctagcaagactaataaagaaaaagagagagaagaatcaaatagacacaataaaaaatgataaaggggatatcaccaccgatcccacagaaatacaaactaccatcagagaatactacaaacacctctacgcaaataaactagaaaatctagaagaaatggatacattcctcgacacatacactctcccaagactaaaccaggaagaagttgaatctctgaatagaccaataacaggctctgaaattgtggcaataatcaatagtttaccaaccaaaaagagtccaggaccagatggattcacagccgaattctaccagaggtacatggaggaactggtaccattccttctgaaactattccaatcaatagaaaaagagggaatcctccctaactcattttatgaggccagcatcattctgataccaaagccgggcagagacacaaccaaaaaagagaattttagaccaatatccttgatgaacattgatgcaaaaatcctcaataaaatactggcaaaccgaatccagcagcacatcaaaaagcttatccaccatgatcaagtgggcttcatccctgggatgcaaggctggttcaatatacgcaaatcaataaatgtaatccagcatataaacagagccaaagacaaaaaccacatgattatctcaatagatgcagaaaaagcctttgacaaaattcaacaacccttcatgctaaaaactctcaataaattaggtattgatgggacgtatttcaaaataataagagctatctatgacaaacccacagccaatatcatactgaatgggcaaaaactggaagcattccctttgaaaaccggcacaagacagggatgccctctctcaccgctcctattcaacatagtgttggaagttctggccagggcaatcaggcaggagaaggaaataaagggtattcaattaggaaaagaggaagtcaaattgtccctgtttgcagacgacatgattgtttatctagaaaaccccatcgtctcagcccaaaatctccttaagctgataagcaacttcagcaaagtctcaggatacaaaatcaatgtacaaaaatcacaagcattcttatacagcaacaacagacaaacagagagccagatcatgggtgaactcccattcacaattgcttcaaagagaataaaatacctaggaatccaacttacaagggatgtgaaggacctcttcaaggagaactacaaaccactgctcaaggaaataaaagaggagacaaacaaatggaagaacattccatgctcatgggtaggaagaatcaatatcgtgaaaatggccatactgcccaaggtaatttacagattcaatgccatccccatcaagctaccaatgactttcttcacagaattggaaaaaactactttaaagttcatatggaaccaaaaaagagcccgcattgccaagtcaatcctaagccaaaagaacaaagctggaggcatcacactacctgacttcaaactatactacaaggctacagtaaccaaaacagcatggtactggtaccaaaacagagatatagatcaatggaacagaacagagccctcagaaataatgccgcatatctacaactatctgatctttgacaaacctgagaaaaacaagcaatggggaaaggattccctatttaataaatggtgctgggaaaactggctagccatatgtagaaagctgaaactggatcccttccttacaccttatacaaaaatcaattcaagatggattaaagatttaaacgttaaacctaaaaccataaaaaccctagaagaaaacctaggcattaccattcaggacataggcgtgggcaaggacttcatgtccaaaacaccaaaagcaatggcaacaaaagacaaaattgacaaatgggatctaattaaactaaagagcttctgcacagcaaaagaaactaccatcagagtgaacaggcaacctacaacatgggagaaaatttttgcaacctactcatctgacaaagggctaatatccagaatctacaatgaactcaaacaaatttacaagaaaaaaacaaacaaccccatcaaaaagtgggcgaaggacatgaacagacacttctcaaaagaagacatttatgcagccaaaaaacacatgaagaaatgctcatcatcactggccatcagagaaatgcaaatcaaaaccactatgagatatcatctcacaccagttagaatggcaatcattaaaaagtcaggaaacaacaggtgctggagaggatgcggagaaataggaacacttttacactgttggtgggactgtaaactagttcaaccattgtggaagtcagtgtggcgattcctcagggatctagaactagaaataccatttgacccagccatcccattactgggtatatacccaaatgagtataaatcatgctgctataaagacacatgcacacgtatgtttattgcggcactattcacaatagcaaagacttggaaccaacccaaatgtccaacaatgatagactggattaagaaaatgtggcacatatacaccatggaatactatgcagccataaaaaatgatgagttcatatcctttgtagggacatggatgaaattggaaaccatcattctcagtaaactatcgcaagaacaaaaaaccaaacaccgcatattctcactcataggtgggaattgaacaatgagatcacatggacacaggaaggggaatatcacactctggggactgtggtggggtcgggggaggggggagggatagcattgggagatatacctaatgctagatgacacattagtgggtgcagcgcaccagcatggcacatgtatacatatgtaactaacctgcacaatgtgcacatgtaccctaaaacttagagtataataaaaaaaaaaaaaaaaaaaaaagaaaaaaaaaaaa

SEQ ID NO: 681 - DNA, 4330 bp, Homo sapiens
  source 1..4330: mol_type = other DNA
caatattcaacattcttaaagaaaagaattttcaacccagaatttcatatccagccaaactaagcttcataagtgaaggagaaataaaatactttatagacaagcaaatgttgagagattttgtcaccaccaggcctgccctaaaagagctcctgaaggaagcgctaaacatggaaaggaacaaccggtaccagccgctgcaaaatcatgccaaaatgtaaagaccatcgagactaggaagaaactgcatcaactaatgagcaaaatcaccagctaacatcataatgacaggatcaaattcacacataacaatattaactttaaatataaatggactaaattctgcaattaaaagacacagactggcaagttggataaagagtcaagacccatcagtgtgctgtattcaggaaacccatctcacgtgcagagacacacataggctcaaaataaaaggatggaggaagatctaccaagccaatggaaaacaaaaaaaggcaggggttgcaatcctagtctctgataaaacagactttaaaccaacaaagatcaaaagagacaaagaaggccattacataatggtaaagggatcaattcaacaagaggagctaactatcctaaatatttatgcacccaatacaggagcacccagattcataaagcaagtcctcagtgacctacaaagagacttagactcccacacattaataatgggagactttaacaacccactgtcaacattagacagatcaacgagacagaaagtcaacaaggatacccaggaattgaactcagctctgcaccaagcagacctaatagacatctacagaactctccaccccaaatcaacagaatatacatttttttcagcaccacaccacacctattccaaaattgaccacatagttggaagtaaagctctcctcagcaaatgtaaaagaacagaaattataacaaactatctctcagaccacagtgcaatcaaactagaactcaggattaagaatctcactcaaagccgctcaactacatggaaactgaacaacctgctcctgaatgactactgggtacataacgaaatgaaggcagaaataaagatgttctttgaaaccaacgagaacaaagacaccacataccagaatctctgggacgcattcaaagcagtgtgtagagggaaatttatagcactaaatgcctacaagagaaagcaggaaagatccaaaattgacaccctaacatcacaattaaaagaactagaaaagcaagagcaaacacattcaaaagctagcagaaggcaagaaataactaaaatcagagcagaactgaaggaaatagagacacaaaaaacccttcaaaaaatcaatgaatccaggagctggttttttgaaaggatcaacaaaattgatagaccgctagcaagactaataaagaaaaagagagagaagaatcaaatagacacaataaaaaatgataaaggggatatcaccaccgatcccacagaaatacaaactaccatcagagaatactacaaacacctctacgcaaataaactagaaaatctagaagaaatggatacattcctcgacacatacactctcccaagactaaaccaggaagaagttgaatctctgaatagaccaataacaggctctgaaattgtggcaataatcaatagtttaccaaccaaaaagagtccaggaccagatggattcacagccgaattctaccagaggtacatggaggaactggtaccattccttctgaaactattccaatcaatagaaaaagagggaatcctccctaactcattttatgaggccagcatcattctgataccaaagccgggaagagacacaaccaaaaaagagaattttagaccaatatccttgatgaacattgatgcaaaaatcctcaataaaatactggcaaaccgaatccagcagcacatcaaaaagcttatccaccatgatcaagtgggcttcatccctgggatgcaaggctggttcaatatacgcaaatcaataaatgtaatccagcatataaacagagccaaagacaaaaaccacatgattatctcaatagatgcagaaaaagcctttgacaaaattcaacaacccttcatgctaaaaactctcaataaattaggtattgatgggacgtatttcaaaataataagagctatctatgacaaacccacagccaatatcatactgaatgggcaaaaactggaagcattccctttgaaaaccggcacaagacagggatgccctctctcaccgctcctattcaacatagtgttggaagttctggccagggcaatcaggcaggagaaggaaataaagggtattcaattaggaaaagaggaagtcaaattgtccctgtttgcagatgacatgattgtttatctagaaaaccccatcgtctcagcccaaaatctccttaagctgataagcaacttcagcaaagtctcaggatacaaaatcaatgtacaaaaatcacaagcattcttatacaccaacaacagacaaacagagagccagatcatgggtgaactcccattcacaattgcttcaaagagaataaaatacctaggaatccaacttacaagggatgtgaaggacctcttcaaggagaactacaaaccactgctcaaggaaataaaagaggagacaaacaaatggaagaacattccatgctcatgggtaggaagaatcaatatcgtgaaaatggccatactgcccaaggtaatttacagattcaatgccatccccatcaagctaccaatgactttcttcacagaattggaaaaaactactttaaagttcatatggaaccaaaaaagagcccgcattgccaagtcaatcctaagccaaaagaacaaagctggaggcatcacactacctgacttcaaactatactacaaggctacagtaaccaaaacagcatggtactggtaccaaaacagagatatagatcaatggaacagaacagagccctcagaaataatgccgcatatctacaactatctgatctttgacaaacctgagaaaaacaagcaatggggaaaggattccctatttaataaatggtgctgggaaaactggctagccatatgtagaaagctgaaactggatcccttccttacaccttatacaaaaatcaattcaagatggattaaagatttaaacgttaaacctaaaaccataaaaaccctagaagaaaacctaggcattaccattcaggacataggcgtgggcaaggacttcatgtccaaaacaccaaaagcaatggcaacaaaagacaaaattgacaaatgggatctaattaaactaaagagcttctgcacagcaaaagaaactaccatcagagtgaacaggcaacctacaacatgggagaaaatttttgcaacctactcatctgacaaagggctaatatccagaatctacaatgaactcaaacaaatttacaagaaaaaaacaaacaaccccatcaaaaagtgggcgaaggacatgaacagacacttctcaaaagaagacatttatgcagccaaaaaacacatgaagaaatgctcatcatcactggccatcagagaaatgcaaatcaaaaccactatgagatatcatctcacaccagttagaatggcaatcattaaaaagtcaggaaacaacaggtgctggagaggatgcggagaaataggaacacttttacactgttggtgggactgtaaactagttcaaccattgtggaagtcagtgtggcgattcctcagggatctagaactagaaataccatttgacccagccatcccattactgggtatatacccaaatgagtataaatcatgctgctataaagacacatgcacacgtatgtttattgcggcactattcacaatagcaaagacttggaaccaacccaaatgtccaacaatgatagactggattaagaaaatgtggcacatatacaccatggaatactatgcagccataaaaaatgatgagttcatatcctttgtagggacatggatgaaattggaaaccatcattctcagtaaactatcgcaagaacaaaaaaccaaacaccgcatattctcactcataggtgggaattgaacaatgagatcacatggacacaggaaggggaatatcacactctggggactgtggtggggtcgggggaggggggagggatagcattgggagatatacctaatgctagatgacacattagtgggtgcagcgcaccagcatggcacatgtatacatatgtaactaacctgcacaatgtgcacatgtaccctaaaacttagagtataataaaaaaaaaaaaa

SEQ ID NO: 682 - DNA, 6515 bp, Homo sapiens
  source 1..6515: mol_type = other DNA
gctggcaatcgccgaataggagcagatctggtctgcagctcccagtgagattgacgctgggtggatgatttctgcatttccaactgaggtacctggttcatctcgttgggactggttggacagtgggtgcagcccacggagggcaagccgaagcagggtggggtgttgcctcacccatggaagcacaaggggtcggggaattccctcccccagccaatggaggctgtgagggactgtgccatgaggaatggtgcactctggcccagatactgcgcttttcccacagtcttcacaacctgcagaccaggagattcccttgggtgcctacaccaccagggccctgggttttaagcacaaaacagggcggccgtttgggtagacactgagctagctgcaggagtttttttttttttttcataccccagtggtgcctggaatgccagcgagacagaaccgtttactcccctggaaaggaggctgaagccagggagccaagtggtctggctcggtgggtcccactcccatggagcccagcaagctaagatccactggcttgaaattcttgctgccagcacagcagtctgaagttgacctgggacactcaagcttggtggggggaggagcagccagggagccaagtggtctggctcggtgggtcccactcccatggagcccagcaagctaagatccactggcttgaaattcttgctgccagcacagcagtctgaagttgacctgggacactcaagcttggtggggggaggagcgtccgccattggtgaggcttgagtaggtggttttaccctcacggtgtaaacaaagcctctggggagttcgaattgggtggagctcactgcagctcagcaaggccactgtggccagactgcctctctagattcctcctctctgggcagggcatctctgaaaaaaaaggcagcagccccagttaggggcttatagataaaacccccatctccctgggacagagcacctgggggaaggggcagctgtgggtgcagcttcagcagacttaaatgtccctgtctgacagctctgaagacagcagtggatctcccaggacagcatttgagctctgctaatggtcaaactgcctcctcaagtgggtcctcaacccctgtgtctcctgactgggagacacctcatacaggagagctctggcggaggcccctctggaatgaagcttccagaggaaggaactggcagcaatgtttgctgttctgtagcctccactggtgatacccaggtaaacagggtctggaatggacctctagcaaactccagcagagctgcagctgagaggcctgtgagaaggaaaactaacaaacaggaatagcgtcaacatcaacaaaaaggatgtctagacacagaaaacccatccaaaggtcaccaacatcaaagactaaagaaagatagataaatccacaaaaatggggagaaaccagtgcaaaaagctgaaaattgcaaaaaccagaatgcctcttctccaaaggattacaactccttgccagaaaaatggaacaaagctgaacagtttgagaaattaacagaagtaggcttcagaaggtgggtaataaactcctccgagctaaaggatcacgttctaatccaatgcaaggaagctaagaaccttgaaaaaaagttagacgaattgctaactagaataaccagtttagagaagaacataaatgacctgatggagctgaaaaacacagcacgagaacttcatgaagcatacacaagtatcaatagccaaatcgatcaagcagaagaaaggatatcagagattgaagatcaacttaatgaaataaagagagaagattagagaaaaaagaatgaaaaggaacaaacaaagccttcaagaaatataggactatgtgaaaagaccaaatctacatttgatttgtatacctgaaggtgacagggagaatggaaccaagttggaaaacactctgcaggatattatccaggagaacgtccccaacctagcaagacagaccaacattcaaattcaggaaatacagagaacaccacaaagatacttctcaagaagagcaactccaggacacataatcatcagattatgtgaaggtagaaatgaaggaaaaattgttaagggcagccagaaagaaaggtcaggttacccacaaagcaaagcccatcagactaacagcggatctctcagcagaaaccctacaagccagaagagagtgggggccaatattcaacattctctaagaaaataattctcaacccagaatttcatatccagccaaactaagcttcataagcaaaggagaaataaaatcctttacagacaagcaagtgttgagacatttagtcaccaccaggcctgccttacaagagctcctgaaggaagcactagacatggaaaggaacaaccggtaccagccactatgaaaacataccaaattgtaaacaccatcgacgctatgaaggaaactgcatcaactaatgagcaaaataaccagctagcatcataatgacaggatcaaattcacacataacaatattaactttaaatgtaaatggactaaatgctccaattaaaagacacagactggcaaattggataaagagtcaagacccatcagtgtgctatattcaggagacccatctcacatgcaaagacacacataggctcaaaataaagggatggaggaagattttccaagcaaatggaaagaaaaaaaaaaagcagggttgcaatcctagtctctgataaagcagactttaaatcaacaaagatcaaaagagacaaagaaggccatgacataatggtaaagggatcaatgcaacaacaagacctatcctaaatatatatgcacccaatacaggagcacccagattcataaagcaagttcttagagacctacaaagagacttagactcccacacaataatagtgggagattttaacaccccactgtcaatattagatcaatgagacagaaaagcaacaacaaggatattcagaacttgaactcagctctggaccaagcagacctaacagacatctacagaaatctccaccccaaatcatcagaatattcattcttctcagcaccacactgcacttattctaaaattgaccacataattgaaagtaaaacactcctcagcaaatgcaaaagaatggaaatcataaccaatagtctctcagacgcagtgcaatcaaattagaactcaggattaagacactcactcaaaaccgcacaactacatagaaactgaacaatttgctcctgaatgactactgggcaaatactgaaatgaaggcagaaataaagatgttacttgaaaccaatgagaacaaagacacaacataccagaatctctgggacacatttaaaatagtgttttgaaggaaatttatagtacgtaatgcccacaagagaaagcaggaaagatttaaaatcaacaccctaacatcacaattaaaagaactacagaaggaagagcaaacacattcaaaagctagcagaagacactaagatcagaggagaactgaaggagacagagacacaaaaaacccttcagatcaatgaatccaggagctggtttttttgaaatgatcaacaaaatagaccactagccagattaatacacaagaaaagagagaagaatcaaatatacacaataaaaaatgataaaggggttatcaccactgatcacacagaaatacaaactaccatcagagaatactataaacacctctacgcaaataaactagaaaatctagaagaaatggatacattcttgggcacatacaccctccaaagtctaaaccaggaagaagtcaaatccctgaatagaccaataacaagttctgaaatcaatagcctaccaaccaaaaaaagtccaggaccagacagattcacagccaatttctaccagaggtacaaaaaggagctggtaccattccttctgaaactattccaatcaatagaaaaagagggaatcctaactcattttatgaggccagcatcatcctgataccaaaacctggcagagacacaagaaagaaagaaaatttcaggccaatatgcctaatgaacatcaatgcgaaaatcctcaataaaatactggcaaaccaaatccaggagcacatcaaaaagcttatccaccatgatcaagtgggcttcatccctaggatgcaaggctggttcaacatacacaaatcaataaaagtaatccatcacataaacagaatcaatgacaaaaaccacatgattatctcaatagatgcagaaaaggccttcaacaaaattcaccaccccttcatcctaaaaactctcaataaactaggtactgatggaatgtatctcaaaataataagagctatttatgacaaacccacagccaatatcatactgaatgggcaaaaactgaagcattccctttgaaaactggcacaagacaaggatataccctctctcaccactcctattcaacatagtattggaagttctggccagggcaatcaggcaagagaaagaaagaaagggtattcagataggaaaagaggaagtcaaattatccctgtttgcagatgacatgattgtatatttagaaaaccccagcatctcagcccaaaatctccttaagctgataggcaacttcagcaaagtctcaggatacaaaatcaatgtgcaaaaatcacaagcattcctatacaccaataacagacaaacagccaaatcatgagtgaactcccattcacaattgctacaaagacaattaaatacctaggaatctaacttacaagggatgtgaaggacctcttcaaggagaactacaaaccactgctcaaggaaataagagaggacacaaataagtggaaaaacattccatgctcatggataggaagaatcaatattgtgaaaatggtcatactgcccaaagtaatttatagagtcaattcaatgctatccccatcaagctaccattgactttcttcacagaattagaaaaaactactttaaatttcatatggaaccaaaaaagagcctgtatagccaagacaatcctaagcaaaaagaacaaagctggaggcaccatactacctgacttcaaactatactacaaggctacagtaaccaaaacagcatggtactggtaccaaaacagatatatagaccaatggaacagaacagaggcctcagaaataacaccatgcatctacaaccatctgatctttgacaaacctgacacaaacaagcaatggggaaaggattccctaattagtaaatggtgttgggaaaactggctagccatatgcagaaaactgaaactggaccccttccttacaccttatacaaaaattaactcaagatggatgaaagacttaaacgtaaggcctaaaaccataaaaaccctagaaggaaacctaggcaataccattcaggacataggcatgggcaaagacttcatgactaaaacaccaaaagcaatggcaacaaaagccaaaattgacaaatgggatctaattaaagagcttctgcacagcaaaagaaactatcatcagagtgaacaggtaggctacagaattggagaaaatttttgcaatctatccaactgacaaagggctaatatccagaatctacaaagaacttaaacaaatttacaagaaaaaaacaaccccatcaaaaagtgggcaaaagatatgaacagacacttctcaaaagaagacatttacgcagccaacaaacatatgaataaaagctctttatcactggtcattagagaaatgcaaatcaaaaccacaatgagacaccatctcacacccttcagaatggcaatcattaaaaagttaggaaacaacagatgctggagaggatgtggagaaacagaaatgcttttacatcgttggtgggagtgtaaattagttcaaccattgtagaagacagtgtggcaattcctcaaggatatagaaccagaaataccatttgacccacaatctcattactgggtatatacccaaaggattataaatcattctagtataaagacacatgcacatctatgtttattgcggcactattcacaatagcaaagacttggaaccaacccaaatgcccatcaatgatagactggataaagaaaatgtggcacatatacgccatggaatactatgcagccatacaaaagaatgagttcatgtcctttgcagggacatggatgaagctggaaactgtcattctcagcaaactaacacaggaacagaaaagcaaatacctcatcttctcactcataagtgggagttgaacaaagagaacatatggacacagaggaacatcacatacgggggcctgttgtgggggtgggggcctaggggagggatagcattaggagaaatacctaatgtagatgatgggttgatgggtgcagcagaccaccatggcacatgtatacctatgtaacaaactgcgttctgcacatgtaccccagaacttaaggtataatttaaaaaaaga

SEQ ID NO: 683 - DNA, 6025 bp, Homo sapiens
  source 1..6025: mol_type = other DNA
gcggaggagccaagatggccgaataggaacagctccggtctacagctcccagcgtgagcgacgcagaagacgggtgatttctgcatttccatctgaggtaccgggttcatctcactagggagtgccagacagtgggcgcaggccagtgtgtgtgcacaccgtgcgcgagccgaagcagggcgaggcattgcctcacctgggaagcgcaaggggtcagggagttccctttccgagtcaaagaaaggggtgacggacgcacctggaaaatcgggtcactcccacccgaatattgcgcttttcagaccggcttaagaaacggcgcaccgcgagactatatcccacacctggctcagagggtcctacgcccacggaatctcgctgattgctagcacagcagtctgagatcaaactgcaaggcggcaacgaggctgggggaggggcgcccgccattgcccaggcttgattaggtaaacaaagcagccaggaagctcgaactgggtggagcccaccacagctcaaggaggcctgcctgcctctgtaggctccacctctgggggcagggcacagacaaacaaaaagacagcagtaacctctgcagacttaagtgtccctgtctgacagctttgaagagagcagtggttctcccagcacgcagctggagatctgagaacgggcagactgcctcttcaagtgggtccctgacccctgacccccgagcagcctaactgggaggcaccccccagcaggggcacactgacacctcacatggcagagtattccaacagacctgcagctgagggtcctgtctgttagaaggaaaactaacaaccagaaaggacatctacaccgaaaacccatctgtacatcaccatcatcaaagaccaaaagtagataaaaccacaaagatggggaaaaaacagaacagaaaaactggaaactctaaaacgcagagcgcctctcctcctccaaaggaacgcagttcctcaccagcaacagaacaaagctggatggagaatgattttgacgagctgagagaagaaggcttcagacgatcaaattactctgagctacgggaggacattcaaaccaaaggcaaagaagttgaaaactttgaaaaaaatttagaagaatgtataactagaataaccaatacagagaagtgcttaaaggagctgatggagctgaaaaccaaggctcgagaactacatgaagaatgcagaagcctcaggagccgatgcgatcaactggaagaaagggtatcagcaatggaagatgaaatgaatgaaatgaagcgagaagggaagtttagagaaaaaagaataaaaagaaatgagcaaagcctccaagaaatatgggactatgtgaaaagaccaaatctacgtctgattggtgtacctgaaagtgatgtggagaatggaaccaagttggaaaacactctgcaggatattatccaggagaacttccccaatctagcaaggcaggccaacgttcagattcaggaaatacagagaacgccacaaagatactcctcgagaagagcaactccaagacacataattgtcagattcaccaaagttgaaatgaaggaaaaaatgttaagggcagccagagagaaaggtcaggttaccctcaaaggaaagcccatcagactaacagcggatctctcggcagaaaccctacaagccagaagagagtgggggccaatattcaacattcttaaagaaaagaattttcaacccaaaatttcatatccagccaaactaagcttcataagtgaaggagaaataaaatactttatagacaagcaaatgctgagagattttgtcaccaccaggcctgccctaaaagagctcctgaaggaagagctaaacatggaaaggaacaaccggtaccagccgctgcaaaatcatgccaaaatgtaaagaccatcgagactaggaagaaactgcatcaactaatgagcaaaatcaccagctaacatcataatgacaggatcaaattcacacataacaatattaactttaaatataaatggactaaattctgcaattaaaagacacagactggcaagttggataaagagtcaagacccatcagtgtgctgtattcaggaaacccatctcacgtgcagagacacacataggctcaaaataaaaggatggaggaagatctaccaagccaatggaaaacaaaaaaaggcaggggttgcaatcctagtctctgataaaacagactttaaaccaacaaagatcaaaagagacaaagaaggccattacataatggtaaagggatcaattcaacaagaggagctaactatcctaaatatttatgcacccaatacaggagcacccagattcataaagcaagtcctcagtgacctacaaagagacttagactcccacacattaataatgggagactttaacaccccactgtcaacattagacagatcaacgagacagaaagtcaacaaggatacccaggaattgaactcagctctgcaccaagcagacctaatagacatctacagaactctccaccccaaatcaacagaatatacatttttttcagcaccacaccacacctattccaaaattgaccacatagttggaagtaaagctctcctcagcaaatgtaaaagaacagaaattataacaaactatctctcagaccacagtgcaatcaaactagaactcaggattaagaatctcactcaaagccgctcaactacatggaaactgaacaacctgctcctgaatgactactgggtacataacgaaatgaaggcagaaataaagatgttctttgaaaccaacgagaacaaagacaccacataccagaatctctgggacgcattcaaagcagtgtgtagagggaaatttatagcactaaatgcctacaagagaaagcaggaaagatccaaaattgacaccctaacatcacaattaaaagaactagaaaagcaagagcaaacacattcaaaagctagcagaaggcaagaaataactaaaatcagagcagaactgaaggaaatagagacacaaaaaacccttcaaaaaatcaatgaatccaggagctggttttttgaaaggatcaacaaaattgatagaccgctagcaagactaataaagaaaaaaagagagatgaatcaaatagacacaataaaaaatgataaaggggatatcaccaccgatcccacagaaatacaaactaccatcagagaatactacaaacacctctacgcaaataaactagaaaatctagaagaaatggatacattcctcgacacatacactctcccaagactaaaccaggaagaagttgaatctctgaatagaccaataacaggctctgaaattgtggcaataatcaatagtttaccaaccaaaaagagtccaggaccagatggattcacagccgaattctaccagaggtacaaggaggaactggtaccattccttctgaaactattccaatcaatagaaaaagagggaatcctccctaactcattttatgaggccagcatcattctgataccaaagccgggcagagacacaaccaaaaaagagaattttagaccaatatccttgatgaacattgatgcaaaaatcctcaataaaatactggcaaaccgaatccagcagcacatcaaaaagcttatccaccatgatcaagtgggcttcatccctgggatgcaaggctggttcaatatacgcaaatcaataaatgtaatccagcatataaacagagccaaagacaaaaaccacatgattatctcaatagatgcagaaaaagcctttgacaaaattcaacaacgcttcatgctaaaaactctcaataaattaggtattgatgggacgtatttcaaaataataagagctatctatgacaaacccacagccaatatcatactgaatgggcaaaaactggaagcattccctttgaaaactggcacaagacagggatgccctctctcaccgctcctattcaacatagtgttggaagttctggccagggcaatcaggcaggagaaggaaataaagggtattcaattaggaaaagaggaagtcaaattgtccctgtttgcagacgacatgattgtttatctagaaaaccccatcgtctcagcccaaaatctccttaagctgataagcaacttcagcaaagtctcaggatacaaaatcaatgtacaaaaatcacaagcattcttatacaccaacaacagacaaacagagagccaaatcatgggtgaactcccattcacaattgcttcaaagagaataaaatacctaggaatccaacttacaagggatgtgaaggacctcttcaaggagaactacaaaccactgctcaaggaaataaaagaggacacaaacaaatggaagaactgctcatgggtaggaagaatcaatatcgtgaaaatggccatactgcccaaggtaatttacagattcaatgccatccccatcaagctaccaatgactttcttcacagaattggaaaaaactactttaaagttcatatggaaccaaaaaagagcccgcattgccaagtcaatcctaagccaaaagaacaaagctggaggcatcacactacctgacttcaaactatactacaaggctccagtaaccaaaacagcatggtactggtaccaaaacagagatatagatcaatggaacagaacagagccctcagaaataatgccgcatatctacaactatctgatctttgacaaacctgagaaaaacaagcaatggggaaaggattccctatttaataaatggtgctgggaaaactggctagccatatgtagaaagctgaaactggatcccttccttacaccttatacaaaaatcaattcaagatggattaaagatttaaacgttaaacctaaaaccataaaaaccctagaagaaaacctaggcattaccattcaggacataggcgtgggcaaggacttcatgtccaaaacaccaaaagcaatggcaacaaaagacaaaattgacaaatgggatctaattaaactaaagagcttctgcacagcaaaagaaactaccatcagagtgaacaggcaacctacaacatgggagaaaattttcgcaacctactcatctgacaaagggctaatatccagaatctacaatgaactcaaacaaatttacaagaaaaaaacaaacaaccccatcaaaaagtgggcgaaggacatgaacagacacttctcaaaagaagacatttatgcagccaaaaaacacatgaagaaatgctcatcatcactggccatcagagaaatgcaaatcaaaaccactatgagatatcatctcacaccagttagaatggcaatcattaaaaagtcaggaaacaacaggtgctggagaggatgcggagaaataggaacacttttacactgttggtgggactgtaaactagttcaaccattgtggaagtcagtgtggcgattcctcagggatctagaactagaaataccatttgacccagccatcccattactgggtatataaccaaatgagtataaatcatgctgctataaagacacatgcacacgtatgtttattgcggcactattcacaatagcaaagacttggaaccaacccaaatgtccaacaatgatagactggattaagaaaatgtggcacatatacaccatggaatactatgcagccataaaaaatgatgagttcatatcctttgtagggacatggatgaaattggaaaccatcattctcagtaaactatcgcaagaacaaaaaaccaaacaccgcatattctcactcataggtgggaattgaacaatgagatcacatggacacaggaaggggaatatcacactctggggactgtggtggggtcgggggaggggggagggatagcattgggagatatacctaatgctagatgacacattagtgggtgcagcgcaccagcatggcacatgtatacatatgtaactaacctgcacaatgtgcacatgtaccctaaaacttagagtataataaaaaaaataaaa

SEQ ID NO: 684 - DNA, 6012 bp, Homo sapiens
  source 1..6012: mol_type = other DNA
gacaggaacagctccggtctacagctcccagcgtgagcgacgcagaagacggtgatttctgcatttccatctgaggtaccgggttcatctcactagggagtgccagacagtgggcgcaggccagtgtgtgtgcgcaccgtgcgcgagccgaagcagggcgaggcattgcctcacctgggaagcgcaaggggtcagggagttccctttccgagtcaaagaaaggggtgacggtcgcacctggaaaatcaggtcactcccacccgaatattgcgcttttcagaccggcttaagaaacggcgcaccacgagactatatcccacacctggctcggagggtcctacgcccacggaatctcgctgattgctagcacagcagtctgagatcaaactgcaaggcggcaacgaggctgggggaggggcgcccgccattgcccaggcttgcttaggtaaacaaagcagccgggaagctcgaactgggtggagcccaccacagctcaaggaggcctgcctgcctctgtaggctccacctctgggggcagggcacagacaaacaaaaagacagcagtaacctctgcagacttaagtgtccctgtctgacagctttgaagagagcagtagttctcccagcacgcagatggagatctgagaacgggcagacagactgcctcctcaagtgggtccctgactcctgacccccgagcagcctaactgggaggcaccccccagcaggggcacactgacacctcacacggcagggtattccaacagacctgcagctgagggtcctgtctgttagaaggaaaactaacaaccagaaaggacatctacaccgaaaacccatctgtacatcaccatcatcaaagaccaaaagtagataaaaccacaaagatggggaaaaaacagaacagaaaaactggaaactctaaaacgcagagcgcctctcctcctccaaaggaatgcagttcctcaccagcaacagaacaaagctggatggagaatgattttgacgagctgagagaagaaggcttcagacgatcaaattactctgagctacgggaggacattcaaaccaaaggcaaagaagttgaaaactttgaaaaaaatttagaagaatgtataactagaataaccaatacagagaagtgcttaaaggagctgatggagctgaaaaccaaggctcgagaactacgtgaagaatgcagaagcctcaggagccgatgcgatcaactggaagaaagggtatcagcaatggaagatgaaatgaatgaaatgaagcgagaagggaagtttagagaaaaaagaataaaaagaaatgagcaaagcctccaagaaatatgggactatgtgaaaagaccaaatctacgtctgattggtgtacctgaaagtgatgtggagaatggaaccaagttggaaaacactctgcaggatattatccaggagaacttccccaatctagcaaggcaggccaacgttcagattcaggaaatacagagaacgccacaaagatactcctcgagaagagcaactccaagacacataattgtcagattcaccaaagttgaaatgaaggaaaaaatgttaagggcagccagagagaaaggtcgggttaccctcaaaggaaagcccatcagactaacagcggatctctcggcagaaaccctacaagccagaagagagtgggggccaatattcaacattcttaaagaaaagaattttcaacccagaatttcatatccagccaaactaagcttcataagtgaaggagaaataaaatactttatagacaagcaaatgctgagagattttgtcaccaccaggcctgccctaaaagagctcctgaaggaagcgctaaacatggaaaggaacaaccggtaccagccgctgcaaaatcatgccaaaatgtaaagaccatcgagactaggaagaaactgcatcaactaatgagcaaaatcaccagctaacatcataatgacaggatcaaattcacacataacaatattaactttaaatataaatggactaaattctgcaattaaaagacacagactggcaagttggataaagagtcaagacccatcagtgtgctgtattcaggaaacccatctcacgtgcagagacacacataggctcaaaataaaaggatggaggaagatctaccaagccaatggaaaacaaaaaaaggcaggggttgcaatcctagtctctgataaaacagactttaaaccaacaaagatcaaaagagacaaagaaggccattacataatggtaaagggatcaattcaacaagaggagctaactatcctaaatatttatgcacccaatacaggagcacccagattcataaagcaagtcctcagtgacctacaaagagacttagactcccacacattaataatgggagactttaacaccccactgtcaacattagacagatcaacgagacagaaagtcaacaaggatacccaggaattgaactcagctctgcaccaagcagacctaatagacatctacagaactctccaccccaaatcaacagaatatacatttttttcagcaccacaccacacctattccaaaattgaccacatagttggaagtaaagctctcctcagcaaatgtaaaagaacagaaattataacaaactatctctcagaccacagtgcaatcaaactagaactcaggattaagaatctcactcaaagccgctcaactacatggaaactgaacaacctgctcctgaatgactactgggtacataacgaaatgaacgcagaaataaagatgttctttgaaaccaacaagaacaaagacaccacataccagaatctctgggacgcattcaaagcagtgtgtagagggaaatttatagcactaaatgcctacaagagaaagcaggaaagatccaaaattgacaccctaacatcacaattaaaagaactagaaaagcaagagcaaacacattcaaaagctagcagaaggcaagaaataactaaaatcagagcagaactgaaggaaatagagacacaaaaaacccttcaaaaaatcaatgaatccaggagctggttttttgaaaggatcaacaaaattgatagaccgctagcaagactaataaagaaaaaaagagagaagaatcaaatagacacaataaaaaatgataaaggggatatcaccaccgatcccacagaaatacaaactaccatcagagaatactacaaacacctctacgcaaataaactagaaaatctagaagaaatggatacattcctcgacacatacactctcccaagactaaaccaggaagaagttgaatctctgaatagaccaataacaggctctgaaattgtggcaataatcaatagtttaccaaccaaaaagagtccaggaccagatggattcacagccgaattctaccagaggtacatggaggaactggtaccattccttctgaaactattccaatcaatagaaaaagagggaatcctccctaactcattttatgaggccagcatcattctgataccaaagccgggcagagacacaaccaaaaaagagaattttagaccaatatccttgatgaacattgatgcaaaaatcctcaataaaatactggcaaaccgaatccagcagcacatcaaaaagcttatccaccatgatcaagtgggcttcatccctgggatgcaaggctggttcaatatacgcaaatcaataaatgtaatccagcatataaacagagccaaagacaaaaaccacatgattatctcaatagatgcagaaaaagcctttgacaaaattcaacaacccttcatgctaaaaactctcaataaattaggtattgatgggacgtatttcaaaataataagagctatctatgacaaacccacagccaatatcatactgaatgggcaaaaactggaagcattccctttgaaaaccggcacaagacagggatgccctctctcaccgctcctattcaacatagtgttggaagttctggccagggcaatcaggcaggagaaggaaataaagggtattcaattaggaaaagaggaagtcaaattgtccctgtttgcagacgacatgattgtatatctagaaaaccccatcgtctcagcccaaaatctccttaagctgataagcaacttcagcaaagtctcaggatacaaaatcaatgtacaaaaatcacaagcattcttatacaccaacaacagacaaacagagagccaaatcatgggtgaactcccattcacaattgcttcaaagagaataaaatacctaggaatccaacttacaagggatgtgaaggacctcttcaaggagaactacaaaccactgctcaaggaaataaaagaggagacaaacaaatggaagaacattccatgctcatgggtaggaagaatcaatatcgtgaaaatggccatactgcccaaggtaatttacagattcaatgccatccccatcaagctaccaatgactttcttcacagaattggaaaaaactactttaaagttcatatggaaccaaaaaagagcccgcattgccaagtcaatcctaagccaaaagaacaaagctggaggcatcacactacctgacttcaaactatactacaaggctacagtaaccaaaacagcatggtactggtaccaaaacagagatatagatcaatggaacagaacagagccctcagaaataatgccgcatatctacaactatctgatctttgacaaacctgagaaaaacaagcaatggggaaaggattccctatttaataaatggtgctgggaaaactggctagccatatgtagaaagctgaaactggatcccttccttacaccttatacaaaaatcaattcaagatggattaaagatttaaacgttaaacctaaaaccataaaaaccctagaagaaaacctaggcattaccattcaggacataggcatgggcaaggacttcatgtccaaaacaccaaaagcaatgcaacaaaagacaaaattgacaaatgggatctaattaaactaaagagcttctgcacagcaaaagaaactaccatcagagtgaacaggcaacctacatcatgggagaaaattttcgcaacctactcatctgacaaagggctaatatccagaatctacaatgaactcaaacaaatttacaagaaaaaaacaaacaaccccatcaaaaagtgggcgaaggacatgaacagacacttctcaaaagaagacatttatgcagccaaaaaacacatgaagaaatgctcatcatcactggccatcagagaaatgcaaatcaaaaccactatgagatatcatctcacaccagttagaatggcaatcattaaaaagtcaggaaacaacaggtgctggagaggatgcggagaaataggaacacttttacactgttggtgggactgtaaactagttcaaccattgtggaagtcagtgtggcgattcctcagggatctagaactagaaataccatttgacccagacatcccattactgggtatatacccaaatgagtataaatcatgctgctataaagacacatgcacacgtatgtttattgcggcactattcacaatagcaaagacttggacccaacccaaatgtccaacaatgatagactggattaagaaaatgtggcacatatacaccatggaatactatgcagccataaaaaatgatgagttcatatcctttgtagggacatggatgaaattggaaaccatcattctcagtaaactatcgcaagaacaaaaaaccaaacaccgcatattctcactcataggtgggaattgaacaatgagatcacatggacacaggaaggggaatatcacactctggggactgtggtggggtcgggggaggggggagggatagcattgggagatatacctaatgctagatgacacattagtgggtgcagcgcaccagcatggcacatgtatacatatgtaactaacctgcacaatgtgcacatgtaccctaaaacttagagtataataaaaaaaaaaaaa

SEQ ID NO: 685 - DNA, 6772 bp, Homo sapiens
  source 1..6772: mol_type = other DNA
tttttttttccaagatggtggatttagaggcttttgatgttcctcagccacttggaaatagcaagatagtacatagatatcaactctgtgagcttcaattcaagaaagaaaatggcaatccactaaattgtgaaggacaccccagatcctagggagaagaccatggggcaaacagtctctgtgacagtgtccagtgataaaagtaagtgaagtcccagtatgtgagaaggccagagaccctccctctgtgactcaacttttcaccaggaatctgagcaattcaggcactttgtttctcccaagccctggagttaacttggggagcggcttggagacactgagagggaaagacaccaggaaaaagctgcaggcaatttcccagacccgggactgagagcaagacactatttttaatgtcagcacatacaaagtcattctttggccacctggcactgtggccatgcaggcatttcagtctcaggccacattttggaggtcatgctctggagcagggtaggggcctccacagccagaatcgtagaaagcacctcagcagtaggcactggaattgtgctctcctccatcgcaggcctggggtgggaggagatctgctataacaatggtttctacgagggacaacacttgcaggcagggccagcttggtgacctggaagtggtctgcatgtgctattgctgagtgccccagagcctgcctcccctgagatcatggtgtagcgggaccctctccactccacctgcaggcatatctccaggcatttggagcacccacttgcccagattggcagcctgagttgctccatccttcctgtggagagatctaagtgcagggaggccctctctgcttcatgcccaggaagatttccaggtatctgaagcacctgctcacctggttcaaaagcctgagttgcccaccctttctgtgcagggatcacagtacatcttggtcatctctgctccatgcccaggcataagtccacgcattcaggagcacatgcttgcccagaccagcagcctgacttgcctcacccttcccacacggagatagcgcctctccactccatgccctggcagatctccagttattcagagcacctgtttgcctgaattaacatcctgagcatctccacccttcctctgcagagattgtggtgctggggagccgtctacacggcacacccagacagatctcctgacatctggagcactcactctcctggattaggagtttaggccagcaccttcaaaaccctctccctccccgaccccatagagaacttggggctgaggaggtttcccagttccatgcctaggcacgcagctggtgcttggtggccacccattgaattttcctttggtgctggttcttgtgcctaccactgggagacttgcaggcaggcaggcctgcccagtctggccccacccatttggctccctgctaggactaagcagggagctcagatcactgtgcactccatgatcagcccattgcctgagacaataggagcttctcccagtaaacaaggatctagtacatacctggccacattggccactgccagctcccacccataagtgttagctactggcttgtcagtcaaactgcacagcgcaaaataaaacctcccaactgaaatgcgtaaagctgtggaagcaaagcaaaaagattccaccaaacatttgctacagtcacaccccctagaaatgggggaaaagggcagaagaaaaaacaataatgttatagggaaagaaagaaagaaaaattctgtctgcactaaaattacaaaaattagaaatgccagaatcttcagatgttaaggaacctgtgtaagaattctgattaccatgaaagatccaaatgtattgacatcaccaaaggataacactaggtctccagcaatggtcattaaacaaaatggaaatttagtaatgacagataaagaattcaaagcatggattgcaaagaacctcagtgagatccaagaaaggttgaaaatcaatacaaagaaacttctaaaggaatccaggaaatgaaagaaaagataaacatcttaaaaagaaatcaatcacagcttctggagttgaaaacctcacttaagaaacttcaaaatacaattaaaagcttaatcaatagactagaccaatcagaagaaagaatatcagagcttgaagactggatttttgaactaacacagacaaaaataaagagatttttttttaaaaaatgaacacacacttcaagaaatatggtattatgtaaagcaagcaaaccaatgaattatttacattcctgagagagaaggagaaaaagtaaacaaactggaaaatatatttgagagaagaatttgagaaaatttccctaaccttgctagagatgtgaatatcaagataaagaaaacccaaagaacacctgtaagatactatacaaaaagaacatcaccaagatgtaaggtcagcaaactgtccaaagtcaatgctaaagaaaaggcagccagagaaaaaggtcagatcacatatgaagggaaccctatcaggctaactgcagacttaaaagctaggagagattggggccatattttcaggcttcttaaagaaaagaaattccaaccaagaatttaatatcctgccaagctaagcttcataagcaaaggagaaataaaatattttccagacaagaaagcactaagggaattcattaccactatatcagccttacgagagactcttaagggagttctaaacatggaaatgaaagaatgatacctattaccacaaaaacacacttaagtacatagcccacacatcctataaagtaattatacaattgaactccaaagcaaccagctaacaacttcacaatagaatcaaaacctcacatatcaatattgaccttgaatgtaaacagtctaaatcctcaacttaaaagacagagagcagcaagttgaacagaaaaacaagacccgtccgtctgctgtcttcaagagacccacctcacatgtgacaacactcacaggctcaaagtaaagggatggagagagatctatcacagaaacagaaaacaaaagaaagcaggggtcactatacttacatcagataaaacagactttaaagcaacaacagtaaaaaaggagaaagaaaggcctttaccattacataatgataaagtgttcaacatgaagatttaacttcctaaacccatatatggaaccaacattggagcacccagaaacaaatacttctagagctgtgagaagacatagacagccgtgcaataatcatgggtgacttcaatatcccattgaaaacattagacagattatcgaagcagaaaactaacaaagaaattctggacttgtattcaatgcttgatcaattgaacctagtaaacatctacagaattctctattcatcagtctctgaatatatattcttctaatctgcacatggaatataactctaagatcaaccacatgcccagccataaagtaagtctcaataaattttttaaaaaaatcaaaatcatgccaaacatattattggactgcagtggaatgaaaacagaaatcaataccaagaggatctctctaaaccacacagttacatgaaaaattaaatgacttgctcctgaataacttttgtgcaaacaataaaattaaggcagaaatcaaaaagttctctaaataaatgaaatcagagacacagcatgccaaaatctctgggatacagcaaaaacagtgttaagaggaaagtttatagtgctatatgcctacataaaaaaattagaaagatcttatattcatgatctaacctcacatctagaggagctggaaaaacaagaacatactaatcccaaagccagcagaagaaaataaataactaaaatcaaagcagaactgaatgaaatggagactcaaaaatccatacaaagaatcaacaagcccaaaatttagttctctgaaagggtaaacaaaattgatagaacactagctagagtaacaaaggaaaaaagagagacgatccaaataagcacaatcaaaaatgacaaaggtcacaatacaactgatcctgcagaaatacaaaagatcctcagagactattatgaacagctgtatacaaaaactagaaaatttagaggaaatggataaattcccagaaacatacatcctcccaagattgaatcacgaagaaactgaaaacctgaatagaccaatattaagttctgaaactgaatcagtaataaaaaaacctaccaatccaaaaaaagccacagaccagatggattcatggctgaattctactagatgtacaaggaggaggtggcaccaattctactagaactattctgaaaaatcaaggaggaggactccacttcattctataaggccagcatcaccttgataccaaaacctggcaaagacgcaccagaaacaactgaacaaaaactataggccaatatccctgatgaacatagatgcaaatatcctcagcaaaatactgtttaccatgatcacgtaggctttattcctgggatgcaaggttggttcaacatatgcaaatcagaaaatatgattcaccacataaacagaattaaaaacaaaaagcatatgatcatctcaatagatgtagaaaaagcttctgataaaatccaacaatgtttcctggcaaaatctctcaagaaactaggaattgaataaacataccacaaaataatgggagccatctatgacaaactcacagccaacatcatactgaacagggaaaagctgcacacattccacttaagaatcaggacaaaacaaggatgcccactcttgccactcccattcaacatagtcctcgctacagtaatcccacaagggaaaaaattaaaaggcatcaaaagaggaaaagaagaaatcaaattatctctcttaactgccaatatgattctatatctgaaaaatcctaaaaactctgccagaaggctcctagaactgataaatgactttagaaaagtttcaggatacaaaatctaagtacaaaaatcagtagcatttctatacacctataatgttcaagctgagagccaaatcaagaatgtgatgtcaattacaatgtgcacaaaaaataaaataaaatatctaggaatacacctaaccaaagaggtaaaagatccctacaaggagaactacaacacactgctgaaagaaattatagatggcacaaacaaatggaaaaacattccatgcgcatggattggaagaatcagtatcattaaaatggccatactgcccaaagcaatctaaagattcaacaccattccattcaaactaccaatgtcatttttcacagaattaaacaaatctattccaagattcatatggaataaaaaacagagccataaaggcaaaggaatcataagcaataagaacaaagtaggaggtatcatattatcgattattcaactgtacttcaaggctgcagtaagcaaaacagcacgatactagttcaaaagcagacacatagatcaatggaacagaggagagaatgcagaaataaagctatacacctgcagtcatctgatgtttgacaaagttgacaaaaaataagcaatggggaaataattcactagccacatgcagaagaatgaaactggagccctgcctttcaccatatatacagattatatcaagacagattacagatttaaatgtaagaccttaaataagaatcctgaaagaaaatctagtaaattgtggacatctgccttggagaagaattcatgactaaatcctcaaaagcaattgcaccaaacaaaaattgggaagtgggacctaattaaagagcttctgcacagcaacagaaactaccaacagagtaaacagacaacctgcagaagggcagaagatacttgaaaactatgcctctgccaaaggtctgatatccaacatctataaggatcttaaagaattcaacaagcaaaaaacaaattaccccattaaaaagtgggcaaaagacatgacagacacttctcaagagaagacatttaagcagccaataaacaaatgaaaaaatgctcaatctcactaagcatcagagaaatgcaaatcaaaaccacaagaagatatcaacccactccggtcagaatggctactgttaaaaagtcaaaaaagaacagattgctggtgagactgcagagaaaaggaaatgcttatatagtattggtaggaatgtaaattagttcagcccctgtggaaagcagcttagagatttctcaaataactaccatttaacccagcagtctcattactgagtatatactcaaagtaaaagaaatccctctactaaatgagtacttgtatgttcgtcacagcactattcacaagagtaaagacatggaatcaagctagatgcccatcaacagtggactggatgaagaaaatgtagtgcatataccctgaggcactacatggccataaaaaagaacgaaatcatgtccattgcaacaacatggactgacctggagctcattattctaagcgaattaccgcagaaacagaaaacaaaataccacatgttctcacttgtaagtgagagctaagcactgggtacacataaatataaacatgacaacagacactggggactactagagaggggagaaggagaagggagatagggctaagaaactacttgttgggtactaagcccaaacctcagtattacacaataggctcatttaacaagtcttcacatgtctcccctgaatctaaaa

SEQ ID NO: 686 - DNA, 1335 bp, Homo sapiens
  source 1..1335: mol_type = other DNA
agaggatcctgggataatggcagagcaggaagctgtgtccccacctagaccacagttgcaccagaaggacctgtctgatgtaaccattttggaactctggaagctactgaaggcttgcaacttccaggggaggcttggatggcaaattggggttaattttggtttcagctcttggcacagcagcggctacccatgccccacagacagccatgcacatgttcttggagcacctcgcacacagcttgaggggttcagggtgagcaagaaggatccttttctccaaatagtgggtatctgtgctcaggatccctgattgctgcttctgatcacagaggtgcagacaaagaggtgcgctgcgctgccgttgttatcacacctccctcagtcgttacaagcccctccccctccagctgaagtatcttcaagagtatttaaagggccagcaccaattgcccccctctttcatttttctctttttccccttttgggagccagacattaaaagactaggaaattcaaaaacaactatggggaaaataagaaaatttagaaaattagacagtgactgcatgctcagggaaaggtacagctcaaaaaagatctggaaagaccttaaatttccatcttgggttgatcctctgcacagaaacagcctgcaacaatcaaaacaagaacaataaataaaaataacaaaaacagcaaacctagggcaaggggaggaagaatctaatttctagagttaccacattattagacttaacatgtccagtgttcagcaaaaaaaaaaaaaaaaaaaaaaaagcctacaaagagacaggaaaatatggccatttaaagggaaaacaaaatcagcagaaactatccctaaaagaaaggccagatgatagatctactagacagagactctaaaacatctgccttaaagatgctgagaaaactaaaggaaaacctgcagaaagtcaagaaaatcatgcatgaacaaaatggcagtatcaatgaagagatagaaaacctataaagagaaacaaacaaaaaaaggaattgttgagcctgagaaacagaaaagaagattgaagaaaagtgaacggatcataaggggtatgtgggctaccaccaagcagaccaatatatctattgtgggagtcccagatggtgaagagagaaagaggcagagacaactttgaaaaaataatggctgaaaaattcccaggtttgatgaaacacacaaatataaacatctaaagaagctcaataaactccagatgatcaaactttcgaaaaccagaaaaagaatcttgaaaaccgcaagaggaaagctactcattacatgcaagg

SEQ ID NO: 687 - DNA, 6030 bp, Homo sapiens
  source 1..6030: mol_type = other DNA
ggggaggagccaagatggccgaataggaacagctccggtctacagctcccagcgtgagcgacgcagaagacggtgatttctgcatttccatctgaggtaccgggttcatctcactagggagtgccagacagtgggcgcaggccagtgtgtgtgcgcaccgtgcgcgagccgaagcagggcgaggcattgcctcacctgggaagcgcaaggggtcagggagttccctttccgagtcaaagaaaggggtgacggacgcacctggaaaatcgggtcactcccacccgaatattgcgcttttcagaccggcttaagaaacggcgcaccacgagactatatcccacacctggctcggagggtcctacgcccacggaatctcgctgattgctagcacagcagtctgagatcaaactgcaaggcggcaacgaggctgggggaggggcgcccgccattgcccaggcttgcttaggtaaacaaagcagccgggaagctcgaactgggtggagcccaccacagctcaaggaggcctgcctgcctctgtaggctccacctctgggggcagggcacagacaaacaaaaagacagcagtaacctctgcagacttaagtgtccctgtctgacagctttgaagagagcagtggttctcccagcacgcagccggagatctgagaacgggcagactgcctcctcaagtgggtccctgactcctgacccccgagcagcctaactgggaggcaccccccagcaggggcacactgacacctcacacggcagggtattccaacagacctgcagctgagggtcctgtctgttagaaggaaaactaacaaccagaaaggacatctacaccgaaaacccatctgtacatcaccatcatcaaagaccaaaagtagataaaaccacaaagatggggaaaaaacagaacagaaaaactggaaactctaaaacgcagagcgcctctcctcctccaaaggaacgcagttcctcaccagcaacagaacaaagctggatggagaatgattttgatgagctgagagaagaaggcttcagacgatcaaattactctgagctacgggaggacattcaaaccaaaggcaaagaagttgaaaactttgaaaaaaatttagaagaatgtataactagaataaccaatacagagaagtgcttaaaggagctgatggagctgaaaaccaaggctcgagaactacgtgaagaatgcagaagcctcaggagccgatgtgatcaactggaagaaagggtatcagcaatggaagatgaaatgaatgaaatgaagcgagaagggaagtttagagaaaaaagaataaaaagaaatgagcaaagcctccaagaaatatgggactatgtgaaaagaccaaatctacgtctgattggtgtacctgaaagtgatgtggagaatggaaccaagttggaaaacactctgcaggatattatccaggagaacttccccaatctagcaaggcaggccaacgttcagattcaggaaatacagagaacgccacaaagatactcctcgagaagagcaactccaagacacataattgtcagattcaccaaagttgaaatgaaggaaaaaatgttaagggcagccagagagaaaggtcgggttaccctcaaaggaaagcccatcagactaacagcggatctctcggcagaaaccctacaagccagaagagagtgggggccaatattcaacattcttaaagaaaagaattttcaacccagaatttcatatccagccaaactaagcttcataagtgaaggagaaataaaatactttatagacaagcaaatgttgagagattttgtcaccaccaggcctgccctaaaagagctcctgaaggaagcgctaaacatggaaaggaacaaccggtaccagccgctgcaaaaccatgccaaaatgtaaagaccatcgagactaggaagaaactgcatcaactaatgagcaaaatcaccagctaacatcataatgacaggatcaaattcacacataacaatattaactttaaatataaatggactaaattctgcaattaaaagacacagactggcaagttggataaagagtcaagacccatcagtgtgctgtattcaggaaacccatctcacgtgcagagacacacataggctcaaaataaaaggatggaggaagatctaccaagccaatggaaaacaaaaaaaggcaggggttgcaatcctagtctctgataaaacagactttaaaccaacaaagatcaaaagagacaaagaaggccattacataatggtaaagggatcaattcaacaagaggagctaactatcctaaatatttatgcacccaatacaggagcacccagattcataaagcaagtcctcagtgacctacaaagagacttagactcccacacattaataatgggagactttaacaccccactgtcaacattagacagatcaacgagacagaaagtcaacaaggatacccaggaattgaactcagctctgcaccaagcagacctaatagacatctacagaactctccaccccaaatcaacagaatatacatttttttcagcaccacaccacacctattccaaaattgaccacatagttggaagtaaagctctcctcagcaaatgtaaaagaacagaaattataacaaactatctctcagaccacagtgcaatcaaactagaactcaggattaagaatctcactcaaagccgctcaactacatggaaactgaacaacctgctcctgaatgactactgggtacataacgaaatgaaggcagaaataaagatgttctttgaaaccaacgagaacaaagacaccacataccagaatctctgggacgcattcaaagcagtgtgtagagggaaatttatagcactaaatgcctacaagagaaagcaggaaagatccaaaattgacaccctaacatcacaattaaaagaactagaaaagcaagagcaaacacattcaaaagctagcagaaggcaagaaataactaaaatcagagcagaactgaaggaaatagagacacaaaaaacccttcaaaaaatcaatgaatccaggagctggttttttgaaaggatcaacaaaattgatagaccgctagcaagactaataaagaaaaaaagagagaagaatcaaatagacacaataaaaaatgataaaggggatatcaccaccgatcccacagaaatacaaactaccatcagagaatactacaaacacctctacgcaaataaactagaaaatctagaagaaatggatacattcctcgacacatacactctcccaagactaaaccaggaagaagttgaatctctgaatcgaccaataacaggctctgaaattgtggcaataatcaatagtttaccaaccaaaaagagtccaggaccagatggattcacagccgaattctaccagaggtacaaggaggaactggtaccattccttctgaaactattccaatcaatagaaaaagagggaatcctccctaactcattttatgaggccagcatcattctgataccaaagccgggcagagacacaaccaaaaaagagaattttagaccaatatccttgatgaacattgatgcaaaaatcctcaataaaatactggcaaaccgaatccagcagcacatcaaaaagcttatccaccatgatcaagtgggcttcatccctgggatgcaaggctggttcaatatacgcaaatcaataaatgtaatccagcatataaacagagccaaagacaaaaaccacatgattatctcaatagatgcagaaaaagcctttgacaaaattcaacaacccttcatgctaaaaactctcaataaactaggtattgatgggacgtatttcaaaataataagagctatctatgacaaacccacagccaatatcatactgaatgggcaaaaactggaagcattccctttgaaaaccggcacaagacagggatgccctctctcaccgctcctattcaacatagttttggaagttctggccagggcaatcaggcaggagaaggaaataaagggtattcaattaggaaaagaggaagtcaaattgtccctgtttgcagacgacatgattgtttatctagaaaaccccatcgtctcagcccaaaatctccttaagctgataagcaacttcagcaaagtctcaggatacaaaatcaatgtacaaaaatcacaagcattcttatacaccaacaacagacaaacagagagccaaatcatgggtgaactcccattcacaattgcttcaaagagaataaaatacctaggaatccaacttacaagggatgtgaaggacctcttcaaggagaactacaaaccactgctcaaggaaataaaagaggagacaaacaaatggaagaacattccatgctcatgggtaggaagaatcaatatcgtgaaaatggccatactgcccaaggtaatttacagattcaatgccatccccatcaagctaccaatgactttcttcacagaattggaaaaaactactttaaagttcatatggaaccaaaaaagagccctcattgccaagtcaatcctaagccaaaagaacaaagctggaggcatcacactacctgacttcaaactatactacaaggctacagtaaccaaaacagcatggtactggtaccaaaacagagatatagatcaatggaacagaacagagccctcagaaataatgccgcatatctacaactatctgatctttgacaaacctgagaaaaacaagcaatggggaaaggattccctatttaataaatggtgctgggaaaactggctagccatatgtagaaagctgaaactggatcccttccttacaccttatacaaaaatcaattcaagatggattaaagatttaaacgttaaacctaaaaccataaaaaccctagaagaaaacctaggcattaccattcaggacataggcgtgggcaaggacttcatgtccaaaacaccaaaagcaatggcaacaaaagacaaaattgacaaatgggatctaattaaactaaagagcttctgcacagcaaaagaaactaccatcagagtgaacaggcaacctacaacatgggagaaaatttttgcaacctactcatctgacaaagggctaatatccagaatctacaatgaactcaaacaaatttacaagaaaaaaacaaacaaccccatcaaaaagtgggcgaaggacatgaacagacacttctcaaaagaagacatttatgcagccaaaaaacacatgaagaaatgctcatcatcactggccatcagagaaatgcaaatcaaaaccactatgagatatcatctcacaccagttagaatggcaatcattaaaaagtcaggaaacaacaggtgctggagaggatgcggagaaataggaacacttttacactgttggtgggactgtaaactagttcaaccattgtggaagtcagtgtggcgattcctcagggatctagaactagaaataccatttgacccagccatcccattactgggtatatacccaaatgagtataaatcatgctgctataaagacacatgcacacgtatgtttattgcggcactattcacaatagcaaagacttggaaccaacccaaatgtccaacaatgatagactggattaagaaaatgtggcacatatacaccatggaatactatgcagccataaaaaatgatgagttcatatcctttgtagggacatggatgaaattggaaaccatcattctcagtaaactatcgcaagaacaaaaaaccaaacaccgcatattctcactcataggtgggaattgaacaatgagatcacatggacacaggaaggggaatatcacactctggggactgtggtggggtcgggggaggggggagggatagcattgggagatatacctaatgctagatgacacattagtgggtgcagcgcaccagcatggcacatgtatacatatgtaactaacctgcacaatgtgcacatgtaccctaaaacttagagtataataaaaaaaaaaaaa

SEQ ID NO: 688 - DNA, 315 bp, Homo sapiens
  source 1..315: mol_type = other DNA
gccaggcttagtggctcacacctataatcccagcactctgggaggtcgaggcgggcagatcacttgaggccaggagttcaagaccagcctgaccaacatggtgaacatggtgaaatcctgtctctactaaaaatacaaaaattagctgggcgtggtggtgcacgcctgtagtctcagctactagggaggctgaggcatgagaatcgctttaacccaggaggcagaggttgcagtgagccaagactgcaccactgcactccagcctgggcaactgagtgagaatctgtctcaaaaaaaaaaaaaaaaaaaaaaaaa

SEQ ID NO: 689 - DNA, 1139 bp, Homo sapiens
  source 1..1139: mol_type = other DNA
aaacctaaaaccataaaaactctagaagaaaacctaggcattaccattcaggacataggcgtgggcaaggacttcatgtccaaaacaccaaaagcaatggcaacaaaagacaaaattgacaaatggaatctaattaaactaaagagcttctgcacagcaaaagaaactaccatcagagtgaacaggcaacctacaacatgggagaaaattttcgcaacctactcatctgacaaagggctaatatccagaatctacaatgaactcaaacaaatttacaagaaaaaaacaaacaaccccatcaaaaagtgggcgaaggacatgaacagacacttctcaaaagaagacatttatgcagccaaaaaacacatgaagaaatgctcatcatcactggtcatcagagaaatgcaaatcaaaaccactatgagatatcatctcacaccagttagaatggcaatcattaaaaagtcaggaaacaacaggtgctggagaggatgtggagaaataggaacacttttacactgttggtgggactgtaaactagttcaaccattgtggaagtcagtgtggcgattcctcagggatctagaactagaaataccatttgacccagccatcccattactgggtatatacccaaaggactataaatcatgctgctataaagacacatgcacacgtatgtttattccggcactattcacaatagcaaagacttggaaccaacccaaatgtccaacaatgatagactggattaagaaaatgtggcacatatacaccatggaatactatgcagccataaaaaatgatgagttcatatccttggtagggacatggatgaaattggaaaccatcattctcagtaaactatcgcaagaacaaaaaaccaaacaccgcatattctcactcataggtgggaattgaacaatgagatcacatggacacaggaaggggaatatcacactctggggactgtggtggggtcgggggaggggggagggatagcattgggagatatacctaatgctagatgacacattagtgggtgcagcgcaccagcatggcacatgtatacatatgtaactaacctgcacaatgtgcacatgtaccctaaaacttagagtataataaaaaaaaaaaaa

SEQ ID NO: 690 - DNA, 5699 bp, Homo sapiens
  source 1..5699: mol_type = other DNA
gaggaggagccaagatggccgaataggaacagctcgagtctacagctcccagcatgaatgatgcagaagaccggtgatttctgcatttccatttgaggtactgggttcatctcactagggagtgccagacagtgggcgcaggacagtgggtgaagtgcactgctcactagctgaagcagggcgagtcattgcctcactcaggaagtgcaaggggtcagggagttagctccctttcctggtcaaggaaaggggtgacagacggcacctggaaaatcgggtcactcccaccctaacactgtgcttttctgacgggcataggaaacggcacaccaggagattatatctggcacctggctcggagggtcctacgcatacggagtctcactgattgctaacacagcagtatgagatcaaactgcaaggcagcagcaaggctggggaggggcaccggctattgcacaggctctcttaggtaaacaaagcagccaggaagctcgaactgggtggagcccaccacagctcaaggaggccgtcctgcctctgcaggctccacctctgggggcagggcacagacaaacaaaaagacagcagtaacctctgcagacttaaatgtccctgtctgacagctttgaggagagcagtggttctcccagcacgcagctggagatctgagaatgggcagactgcctcctcaagtgggtccctgacccctgacccccaagcagcctaactgggaggcaccccccagtaggggcagactgacacctcacacgaccaggtactcctctgagacaaaacttccagaggaacgatcagacagcagcattcgcggatcacgaaaatccatggttttgcagacaccactgctgatagtcaggcaaacagggtctggaatggggctctagcaaactccaacagacctgaagctgagggtcatgtctgttagaaggaaaactaacaaacagaaaggacatccacaccaaaaacccacctgtacatcaccatcatcaaagaccaaaagtagataaaaccacaaagatggggaaaaaacagagcagaaaaactggaaactctgaaaagcagagcacctctcctccgccaaaggaacgctgttcctcaccagcaatggaacaaagctggacagagaatgactttgacgagttgagagaagagggcttcagacgatcaaactactccgagctacaggaggaaattcaaaccaaaggcaaagaagttgaaaactttgaaaaaactttagacgaatgtataactagaataaccaatatagagaagtgcttaaaggagctaatggagctgaaagccaaggctcgagaactatgtgaagaatgcagaagcctcaggagatgatgagatcaactggaagaaagtgtatcagtgatgaaagatgaaatgaatgaaatgaagcaagaagggaagtttagaaaaaaaagaataagaagaaatgaacaaagcctccaagaaatatgggactatgtgaaaagaccaaatctgcatctgattggtgtacctgaaagtgacggggagaatggaaccaagttggaaaacactctgcaggatattatcctggagaacttccccaatccagcaaagccagccaacattcagattcaggaaatagagagaacgccacaaagatactcctcgagaacagcaactccaagacacataattgtcagattcaccaaagttgaaatgaaggaaaaaatgttaagggcaaccagagagaaaggtcaggttacccataaagggaagcccatcaagataactgctgatctcttcgcagaaactctacaagaaagaagagagtaggggccaatattcaacattcttacagaaaagaattttcaacccagaatttcatatccagccaaactaagcttcataagtgaaggagaaataaaatactttacagaaaagcaaatgctgagcgattttgtcaccaccaggcctgccctaaaagagctcctgaaggaagcactaaacatggaaaggcacaatcggtaccagctactgcaaaaacatgccaaattgtaaagaacatcaagactaggaagaaactgcgtcaattaacgagcaaaataaccagctaacatcataatgacaggatcaaattcacacataacaatattaactttaaatgtaaatggactaaatgctccaattaaaagacacagactggataattggataaagagtcaagacccatcagtgtgctgtattcaggaaacccatgtcacgtgcagagacacacataggctcaaaataaaaggatggaggaagatctaccaagcaaatggaaaacaaaaaaaggcaggggttgcaatcctagactctgatgaaacagactgtaaaccaacaaagatcaaaagagacaaagaagaccattacataatggtaaagggatcaattcaacaagaagagctaactatcctaaatatatatgcacccaatacaggagcacccagattcataaagcaagtcctgagtgacctacaaagagacttagactcccacacaataataatgggagactttaacaccccactgtcaacattagacagatcaataagacagaaagttcacaagtataccaaggaattgaactcagctctgcaccaagtggacctaacagacatctacagaactctccaccccaaatcaacagaatatacatttttttcagcaccacaccacacctattccaaaattgaccacatacttggaagtaaggccctcttcagcaaatgtaaaagaacagaaattaaactgtctctcagaccacagtgcaatcaaactagaactcggcattaagaaactcactgaaaactgctcaactacatggaaactgaacaacctgctcctgaatgactactgggtacataataaaatgaaggcagaaataaagatgttctttgaaaccaacgataacaaagacacaacataccggaatctctgggacacattcaaagcagtgtgtacagggaaatttatagcactaaatgcccacaagggaaagcaggaaagatccaaaattgacaccctaacatcacaattaaaagaactagaaaagtaagagcaaacacattcaaaagctagcagaaagcaagaaataactaaaatcagagcagaactgaaggaaatagcaacaaaaaaatgcttcaaaaaattaatgaatccaggagctggttttatgaaaggatcaacaaaattgatacactgctggcaggactaataaagaaaaaaagagagaagaatcaaatagacacaataaaaatgataaaggggatatcaccactgatccctcagaaatacaaactaccatcagagaatactacaaacacctctacacaaataaactagaaaatctagaagaaatggataaattcctccacacatacactctcccaagactaaaccaggaagaagttgaatctctgaatagaccaataacaggatctgaaattgtggcaataatcaatagtttaccaaccaaaaagagtccaggaccagatggatttacagccaaattctaccagaggtacaaggaggaactggtaccattccttctgaaactattccaatcaataaaaaaagaaggagtcctccctaactcaatttatgaggccagcatcatcctgataccaaagccaggaagagacacaaccaaaaaaatagaattttagaccaatatccttgacgaacattgatgcaaatatcctcaataaaatactggcaaaccgaatccagcagcacatcaaaaagcttatccaccatgatcaagtgggtttcatccctgggatgcaaggctggttcaatatacgcaaatcaataaatgtaatccagcatataaacagaaccaaagacaaaaaccacatgattatctcaatagatgcagaaaagacctttgacaaaattcaacaatgcttcatgctaaaaactctcaataaattaggtattgatgggacttatctcaaaataataagagctatctatgaaaaacccacagtcaatatcatactgaatgggcaaaaactagaagcattccctttgaaaacgggcacaagacagggatgccctctctcctcactcctattcaatatagtgttggaagttctggccagggcaatcaggcaggagaaggaaataaagggtattcaattaggaaaagaagaagtgaaattgtccctgtttgcagatgacatgattgtatatctagaaaaccccattgtctcagcccaaaatctccttaagctgataagtaacctcagcaaagtctcaggatacaaaatcaatgtacaaaaatcacaagcattcttatacaccaataacagacaaacagagagccaaatcatgagtgaactcccatttgcaattgctacaaagagactaaaatacttaggaatccaatttacaagggacatgaaggacctcttcaaggagaactacaaaccactgctcaatgaaataaaagaggatacaaacaaatggaagaacattccatactcatggataggaagaatcaatatcatgaaaatggccatactgcccaaggtaatgtatggattcaatgccatccccatcaagctaccaatgactttcttcacagaattggaaaaaattactttaaagttcatatggaaccaaaaagagcatgcatcaccaagtcaatcctaagccaaaagaacaaagctggagacatcaccctacctgacttcaaactattctacaaggctacagtaaccaaaacagcatggtacgggtaccaaaacagagatatagaccaatggaacagaacagagccatcagaaataatgccgcatatctacaactatctgatctttgacaaacctgacaaaaacaaggagtggatcccctatttaataaatggtgctgggaaaactggctagccatatgtagaaaactgaaactggattccttccttacaccttatacaaaaattaattcaagatggattaaagacttaaatgttagacctgaaaccataaaaaccctagaagtaaaactaggcattaccattcaggacataggcatgggcaaggacttcatatctaaaacaccagaagcaatggcaacaaaagccaaaattgacaaatgggatctaattaaactaaagaacttctgcacagcaaaagaaactgccatcagagtgaacaggcaacctacaaaatgggagaaaatttttgcaacctactcatctgacaaagggctaatatccagaatctacaacgaacttaaacaaatttacaagaaaagaaatacaaccccatcaaaaagtgggtgaaggatatgaacagacacttctcaaaagaagacctttatgcagccaaaagacacatgaaaaaatgctcatcatcactggccatcagagaaatgcaaatcaaaaccacaatgagataccatctcacaccagttagaatcacaatcattaaaaagtcaggaaacaacaggtgctggagaggatgtggagaaatagaaacacttttaaactgttggtgggactgtaaactagttcaacgattgtggaagtcattgtggtgattcctcaagtatctggaactagaaataccatttgatccagccatcccattagtgggtatataaccaaaggactataaaacatgctgctataaacacacatgcacacgtatgtttattgc

SEQ ID NO: 691 - DNA, 296 bp, Homo sapiens
  source 1..296: mol_type = other DNA
gccaggcgtggtggctcacacctgtaatcccagcactttgggaggccaaggcaggcagatcacgaggtcaagagattgagaccatcctggccaacatggtgaaaccccgtctctactaaaaatacaaaaattagccgggaactgtggcacatgcctgtagtcccaggtactcgggaggctgaggcaggagaatcgcttgaacctgggaggcagaggttgcagtgagccgagagccgagattgtgccactgcactccagcctggcgacagaacaagactctgtctcaaaaaaataaa

SEQ ID NO: 692 - DNA, 6114 bp, Homo sapiens
  source 1..6114: mol_type = other DNA
gggggtggagccaagatggccaaataggaacagctccagtctacagctcccagcgtgagtgatgcagaagatgggtggtttctgcatttccaactgaggtaccgggttcatctcacgagggaatgccggacagcgggtgcaggacactgggtgcagtgcaccgtgcatgagccaaagcaggtcgaggcatcgcctcacctgggaagtgcaaggggtcagggagtttcctttcctagtcaaagaaaggggtgacagacagcacctggaaaatcgggtcactcccaccctaatactgtgctcttccaatgggcttaacaaacggcacaccaggagattatatcccacacctggctcagagggtcctgcgcccgcggagcctctccctcattgctagcacagcagactgagatcaaactgcaaggcggcagcgaggctgggggaggggtgcccgccattgctcaggcctcagtaggtaaacaaagcgacagggaagctcgaactgggaggagcccaccacagctcaaggaggcctgcctgcctctgtaggctccacctctgggggcagggcacagacaaacaaaagacagcaataacctctgcagtcttaaatgtccctgtctgacagctttgaagagagtagtggttctcccagcacgcagcttgagatctgagaaccggcagaatgcctcctcaagtgggtccctgacccccgagtagcctaactgggaggcacctcccagtaggggcagactgacacctcacacggccgggtactcctctgagacaaaactttcagaggaacgatcaggcagcagcatttgcggttcaccaatatccactgttctgcagccaccgctgctcatacccaggcaaacagtggacctccagtaagctccaatagacctgcagctgacagtcctgactgttagaaggaaaactaacaaacagaaaggacatccacaccaaaaacccatctgtacgtcaccatcatcaaagaccaaaggtagataaaaccacaaagatggggaaaaaacagagcagaaaaaccagaaactcgaaaaatcagagcgcctctcctcctccaaaggaacgcagctcctcaccagcaacggaacaaaactggacggagaatgactttgacgagttgagagaggaaggctgcagaagatcaaactactccgagctaaaggaggaagttcaaacccatggcaaagcagttaaaaactttgaaaaaaaattagacaaatgtataactacaataaccaatgcagagaagtccttaaaggacctgatggagctgacaaccacggcacgagaactacgtgacgaatgcacaagcctaagtaaccgatgcgatcaactggaaaaaagggtatcagcgatggaagatgaaatgaatgaaatgaagcatgaagagaagtttagagaaaaaagaataaaaagaaatgaacaaagcctccaagaaatatgggactatatgaaaagaccaaatctacgtctaactgatgtacctgaaagtgacgggaagaatggaaccaagttggaaaacactctgcaggatattatccaggagaacttccccaatctagcaaggcaggccaacattcaaattcaggaaatacagggaacgccacaaagatactcctcgagaagagcaactccaagacacataattgtcagattcaccaaagttgaaatgaaggaaaaaatgttcagggcagccagagagaaaggtcgggttacccacaaagggaagcccatcagactaacagcagatctctccgcagaaactccacaagccagaagagagtgggggccagtattcaacattcttaaagaaaagaattttcaacccagaatttcatatccagccaaactaagcttcataagtgaaggagaaataaaatcctttacagacaaacaaatgctgagagattttgtcaccaccaggcctgccctaaaagagctcctgaaagaagcactaaacatggaaaggaacaaccggtaccagccactgcaaaaacatgccaaattgtaaagactatcgaggctaggaagaaactgcatcaactaaagagcaaaataaccagctaacatcataatgacaggatcaaattcacacattacaatactaaccttaaatgtaaatgggctacatgctccaattaaaaggtacagactggcaaatcggataaagagtcaagacccatcagtgtgctgtattcaggaaacccatctcacatgcagagacacacataggctcaaaataaagcgatggaggaagatctaccaagcaaatggaaaacaaaaaaaggcaagggttgcaatcctagtcttggataaaacagactctaaagcaacaaagatcaaaagagacaaggccattacatagtggtaaagggatcaatgcaacaagaagtgctaactatcctaaatatatatgcacccaatacaggagcacccagattcataaagcaagtccttagagacctacaaagagacttagactcccacacaataatagtgggagactttaacaccccactgtcaacattagacagatcaacaagacagaaaattcacaaggatatccaggaattgaactcagctctgcaccaagcagacctaatagacacctacagaactctccaccccaaatcaacagaatatgcattcttttcagcaccgcaccacacctattccaaaattgaccacatagttggaagtagaacactcctcagcaaatgtaaaagaacagaaattataacaaactgtccctcagaccacagtgcaatcaaactagaactcaggattaagaaactcactcaaaaccgctcagctacatggaaactgaacaacctgctggtgaataactactgggtgcataacgaaatgaaggcagaaataaagatgttctttgaaaccaatgagaacaaagacacaacataccggaatctctgggacacattcaaagcagtgtgtagaggaaaatttatagcactaaatgcccacaagagatagcaggaaagatctaaaattgacaccctaacatcacaattaaaagaactagagaagcaagagcaaacacattcaaaagctagcagaaggcaagaaataactaagatcagagcagaactgaaggaaatagagacacaaaaaacccttcaaaaaatcaatgaatccaggagctggttttttgaaaagatcaacaatgatagactgctagcaaaactaataaagaagaaaagagagaagaatcaaatagacgcaataacaaatgacaaaggggatatcaccaccaatcccacagaaatacaaactaccatcagagaatactataaacacctctgcgcaaataaactacaaaatctagaagaaatagataaattcctcgacacatacactctcccaagactaaaccaggaagaagttgaatctctgaatagaccaataacaggctgtgaaattgaggcaataattaatagcttaccaaccaaaaaaagtccaggaccagatggattcgcagttgaattctaccagaggtacaaggaggagctggtaccattccttctgaaactattccagtcaatagaaaaagagggaatcctccctaactcattttatgaggccagcagcatcctgacaccaaagcctggcagacacaacaaaaaaagagaattttagaccaatgtccttgatgaacattgatgcaaaaatcctcaataaaatactagcaaaccaaatccagcaacacatcaaaaagcttatccaccatgatcaactgggcttcatccctgggatgcaaggctggttcaacatatgaaaatcaataaacttaatccagcctataaacagaaccaaagacaaaaaccacatgattttctcaatagatgcagaaaagtcctttgacaaaattcaacaacacttcacactaaaagctctcaataaattaggtattgatgggacgtttctcaaaataataagagctatctatgacaaacccacagccaatatcatactgaatgggcaaaaactggaagcattccctttgaaaactggcacaagacagggatgccctctctcaccactcctgttcaacatagtgttggaagttctggccagggcaatcaggcaggagaaggaaataaagggtattcaattaggaaaagaggaagtcaaattgtccctgtttgcagatgacatgattgtatatctagaaaaccccatcgtctcagcccaaaatctccttcagctgataagtaacttcagcaaagtctcaggatacaaaatcaatgtgcaaaaatgacaagcattcttatacaccaataacagacagagagccaaatcatgagtgaactcccattcacaattgcttcaaagagaataaaatacgaggaatccaacttacaagggacgtttaggacctcttcaaggagaactacaaaccactgctcagtgaaataaaagaggatacaaacaaatggaagaacagtccatgctcatggataagaagaatcaatatcgtgaaaatggccatgctgcccaaggtaatttatagattcaatgtcatccccatcaagctaccaatgactttcttcacagaattggaaaaaactactttaaagttcatatggaaccaaaaaagagcccacatcgccaagtcaatcctaagccaaaagaacaaagctggaggcatcatgctacctgacttcaaactatactacaaggctacagtaaccaaaacagcgtggtactggtaccaaaacagagatatagaccaatggaacagaacagagccctcagaaataatgccgcatatctacaactatctgatctttgacaaacctgacaaaaacaagcaatggggaaaggatccctatttaataaatggtgctgggaaaactggctagccatatgtagaaagctgaaactggatcccttccttacaccttatacaaaaattaattcaagatggattaaagacttaaatgttagacctaaaaccataaaaacttagaagaaaacctaggcaataccattcaggacataggcatgggcaaggacttcatgtctaaaacaccaaaagcaatggcaacaaaagccaaaattgacaaatgggatctcattaaactaaagagcttctgcacagcaaaagaaactaccatcagagtgaacaggcaacctacagaatgggagaaaatttttgcaatctactcatctgacaaagggctaatatccagaatctacaatgaactccaacaaatttacaagaaaaaaacaaacaaccccatcaaaaagtgggccaagcatatgaacaaacacttctcaaaagaagacatttatgcagccaaaaaacacatgaaaaaatgctcatcaccactggccatcagagaaatgcaaatcaaaaccacagtgagatatcatctcacaccagttagaatggcgatcatttaaaagtcaggaaacaacaggtgctagagaggatgtggagaaataggaacacttttacacactgtaaactagtgcaaccactgtggaaatcggtgtgacgattcctcaggcatctagaactagaaataccatttgacccagccatcccattactaggtatatacccaaaggattagaaatcatgctgctataaagacacatgcacacgtgtgtttattgcggcactattcacaatagcaaagacttggaaccaacccaaatgtccaacaatgatagactggattaagcaaatgtggcacatatacaccatggaatactatgcagccataaaaaaggatgagttcatgtcctttgtagggacatggatgaagctggaaaccatcattctcagcaaagtatcacaaaggcaaaaaaccaaacaccgcatgttctcactcataggtgggaattgaacaatgagaacacaaggacacaggaaggggaacatcacacactggggactgttgtggggtaggggtaggggagagggatagcattaggagatatacctaatgctaaatgatgagttaatgggtgcagcacacccacatggcacacgtatacttatgtaacaaacctgtacgttgtgcacatgtatcctaaaacttaaagtataaaaaaaaa

SEQ ID NO: 693 - DNA, 1863 bp, Homo sapiens
  source 1..1863: mol_type = other DNA
gagattttagtaccactgtcttgataactgatagaactagtagacagaaaatccctacagatgtcagccaacttaacctaattgacatttataaaacactctaaccaacaataggcaaatacacattcttttcaagtacatacagatcactgagatagttcttattcaaagtaattaaacaagtcttaataaatttaaagggattcaaaacatacaaagtgggttatctgaccacaataaaattaaattaaaaatcagtaaatgaaaaatcgctagaaaattcccaaatatttgaaagctaaataaaatgcttctaaataactcattggtcaaagaaatcaaaagggaaatttaaaagcagaatgaattaaatgaagattaaaacacaaaatgtcaaaatttgtgtcatactactaaagcagtgttcaaggaaggaaatttataccactgaaagtctacactagaaagcctcaaatccatgacctctgttttcatcttaagaaattagaaaaacaagagcaaattaaatccaaagtaaggagggggaaaaaaataatggtcagactgaaacctatgaaatataaagcataaaatcaatagaaataatcaaacctttgagaagatcaataaaattaataaatctctagccagagtggggaaaagagaaagaaagagataaattaagtttcaggaatgaaacaggtgatgagactaagaggttttaaagatagtaaaagaatgattaatgaatactataaactgtatgcctgtaattcaacaccttaaagtggacaaattccttgaaaaacaaaaactgtaaagcttaaccaagataaaatagatgacttgaaaagtcccatatcaattaagtaaattgaatttgtaatttaaaaacttccaacaaagaaaattccaggcccagatgcctttactggtgtattcttacaaaatttaaggaagaagtaatgcctattctacacaaactcttctagaaaatcaagagaaaagaacccttcccagctcactttatgaggccatcgttaccctgaggccaaaaccagacagagatattctaaaagaaaagtctacagaaaaatgttcctcatgaacatagatataaaacttctaaacagacgtttagcctatcaagtccaacaaaaacatgaaaagaaagacacacatggccaagtacattgtccttcccaggaaggtaagtaaggttggtttaacatccaaaaatgcaatgaatgtaactcaacatatttctaaactaaaaagaaaaaccacacaacaatctctaaagtggcagaaaaagcatttgacaaaatccagcatgtatacttgattaacactctcacagcctaatagaataaaacttcctcaagctgataaaggacatctacaaaaaccctacaattaacatgacacttaataatgaaggtctgaatgcatttcttctaagatcaagaacaagccaagagtatgttctcactactactaatcaatgttattctggagattctagccagggcagtaaggcaagaaaaagcaacaagtatagtaataatactgtcttgatgggcagatgacatgtttgtctatgaagaaaattcaatagaatctttaaagaaactcttgaaactaacaggtgagtttagcaaagctataccctatcaacaaaaaataaaaaattaaaatgaaaaacaatttttaagtagcataaaaatgctaggtacttacagagaaagctgaaaaaaacatatataagacacactaaaatctacaaaataccactcagaaaaaaacttaaaagacttaagtaagtgggggaaaatattggttcttgtgtcagaagaggaaata

SEQ ID NO: 694 - DNA, 6127 bp, Homo sapiens
  source 1..6127: mol_type = other DNA
agccaagatggccgaataggaacagctccggtctacagctcccagcgtgagtgacgcagaagacaggtgatttctgcatttccatctgaggtaccgggttcatctcactagggagtgccagagagtgggcgcaggacagtgggtgcagcacactgcgtgagccgaagagggtgaggcattgcctcactcgggaagcgcaagggttcagggagttccctttcctagtcaaagaaaggggtgacagacggcacctggaaaatcgggtcacttccacactaatactgcgcttttgcaacgggcttaaaaaaaacggcgcaccaggagattatatcccacacctgcctcggagggtactacgcccacggagtctcgctgattgctagcacagcagtttgaaatcaaactgcaaggcggcagtgaggctgggggaggggcacctgccattgcccaggcttgcttaggtaaacaaagcagccgggaagcttgaactgggtggagcccaccacagctcaaggaggcctgcctgcctgcctctgtaggcgccacctctgggggcagggcacagacaaacaaaaagacagcagtaacctctgcagacttaaatgtccctgacagcttggaagagagcagtggttctcccagcatgcagctagagatgatctgagaacaggcagactgcctcaagtgggtccctgatccctgacccccgagcagcctaactgggaggcaccccccattaggggcagactgacacctcacacggccaggtactcctctgagacaaaacttccagaggaacgatcagacagcagcattcgtggttcacgaaaatccgctgttctgcagccactgctgctgatacccagacaaacggtctggagtggacctctagcaaactccaacagacctgcagctgagggccctatctgttagaaggaaaactaacaaacagaaaggacatccacaccaaaaactcatctgtacatcaccatcatcaaagaccaaaagtagataaaaccacaaagatggggaaaaaacagagcagaaaaactggaaactctaaaaagcagagcgcctctcctcctccaaaggaacacagttcctcaccagcaacagaacaaagctggacggagaatgactttgacgagttgagagaaggcttcagacgatcaaactactccgagctacaggaggaaattcaaaccaaaggcaaagaagttaaaaactttgaaaaaaatttagacaaatgtataactagaataaccaatacagagaagtgcttaaaggagctgatggagctgaaagccaaggctggagaactacgtgaagaatgcagaagcctcaggagccgatgcaatcaaatggaagaaagggtatcagccatggaagatgaaatgaatgaaatgaagcgagaagggaagtttagagaaaacagaatgaaatgaacaaagcctccaagaaatatgggactatgtgaaaagacaaaatctacgtctgattggtgtacctgaaagtgacagggagaatggaaccaagttggaaaacactctgcaggatattatccaggagaacttccccaatctagcaaggtaggccaacattcagattcaggaaatacagagaacaccacaaagatactcctcgagaggaacaactccaagacacataattgtcagattcaccaaagttgaaatgaaggaaaaaatgttaagggcagcctgagagaatggtcgggttacccacaaagggaagcccatcagactaacagcggatctctcggcagaaactctacaagccaggagagagtgggggccaatattcaacattcttaaagaaaagaattttcaacccagaatttcatatccagccaaactaagcttcataagtgaaggagaaataaaatactttacagacaagcaaatgctgagaaattctgtcaccaccaggtctgccctaaaagagcttctgaaggaagcactcaacatggaaaggaacaaccggtaccagccactgcaaaatcatgccaaattgtaaagaccatcaagcctaggaagaaactgcatcaactaatgagcaaaataaccagctaacatcataatgacaggatcaaattcacacataacaatattaactttaaatgtaaatggaccaaatgctccaattaaaagacacagactggcaaattggataaagagtcaagacccaccagtgtgctatatccaggaaactcatctcacgtgcagagacacacataggctcaaaataaaaggatggaggaagatctaccaagcaaatggaaaacaaaaaaaggcaggggttgcaatcctagtctcggataaaacagactttaatccaacaaagatcaaaagagacaaagaaggccattacataatggtaaagggatcaattcaacaagaagagctaactatcctaaatatatatgcacccaatacaggagcacccagattcataaagcaagtcctgagtgacctacaaagagacttagactcccacacaataataatggcagactttaacaccccactgtcaaccttagacagatcgagacagaaagttaacaaggatacccaggaattgaactcagcgctgcaccaagcggacctaatagacatctacagaactctccaccccaaatcaacagaatatacatttttttcagcaccacaccacacctattccaaaattgaccacatagttggaagtaaagcactcctcagcaaatgtaaaagaacagaaattataacaaactgtctctcagaccacagtgcaatcaaactagaactcaggattaagaaactcactcaaaactgctcaactacatggaaactgaacaacctgatcctgaatgactactgggtacataatgaaatgaaggcagaaatcaagatgttctttgaaaccaacgagaacaaagacacaacataccagaatctctgggacacattcaaagcagtgtgtagagggcaatttatagcactaaatgcccacaagagaaagcaggaaagatccaaaattgacaccctaacatcacaattaaaagaactagaaaagcaagagcaaacacattcaaaagctagcagaaggcaagaaataactcaaatcagagcagaactgaaggaaatagagacacaaaaaacccttcaaaaaattaatgaatccaggagctggttttctgaaaggatcaacaaaattgatagaccgctagcaagactaataaagaagaaaagagagaagaatcaaatagacgcaataaaaaatgataaaggggatatcactaccgatcccacagaaatacaaactaccatcagagaatactacaaacacctctacgcaaataaactagaaaatctagaagaaatggataaattcctcgacacatacaccctcccaagactaaaccaggaagaagttgaatcgctgaatagaccaataacaggctctgaaattgtggcaataatcaatagcttaccaaccaaaaagagtccaggaccagatggattcacagccgaattctaccagaggtacaaggaggaactggtaccattccttctgaaactattctaatcaatagaaaaagagggaatcctccctaactcattttatgaggccagcatcatcctgatagcaaagcctggcagagacacaaccaaaaaagagaattttagaccaatatccttgatgaacattgatgcaaaaatcctcagtaaaatactggcaaactgaatccagcagcacatcaacaagcttatccaccatgaacaagtgggcttcatccctgggatgcaaggctggttcaatatacgcaaatcaataaacataatccagcatataaacagaaccaaagacaaaaaccacatgattatctcaatagatgcagaaaaggcctttgacaaaattcaacaacccttcatgctaaaaactctcaataaattaggtattgatgggacatatctcaaaataataagagctatctatgacaaacccacagccaatatcatactgaatggacaaaaactggaagcattccctttgaaaactggcacaagacagggatgccctctctcaccactcctattcaacatagtgttggaagttctggtcagggcaattaggcaggagaaggaaataaagggtattcaattaggaaaagaggaagtcaaattgcccctgtttgcagatgacatgattgtatgtctagaaaaccctattgtctcagcccaaaatctccttaagctgataagcaacttcagcaaagtctcaggatacaaaatcgatgtacaaaaatcacaagcattcttatacaccaataacagacagccaaatcatgagtgaactcccactcacaattgcttcaaagagaataaaatacctaggaatccaacttacaagggaggtgaaggacctcttcaaggagaactacaaaccactgctcaatgaaataaaagaggatacaaacaaatggaagaacattccatgctcatgggtaggaagaatcaatatcgtgaaaatggccatactgcccaaggtaatttatagattcaatgccatccccatcaagctaccaatgacttcttcacagaattggaaaaaactactttaaagttcatatggaaccaaaaaagagcccgcatcaccaagtcaatcctaagccaaaagaacaaagctggaggcatcacgctacctgacttcaaactatactacaaggctacagtaaccaaagcagcatggtactggtaccaaaacagagatatagatcaatggaacagaacagagccctcagaaataatgccacatatctacaactatctgatctttgacaaacctgagaaaaacaagcaatggggaaaggattccctatttaataaatggtgctgggaagactggctagccatatgtagaaagctgaaactggatcccttccttacaccttatacaaaaattaattcaagatggattaaagacttaaacgttagacctaaaaccataaaaaccctagaagaaaacctaggcattaccattcaggacataggcatgggcaaggacttcatgtctaaaacaccaaaagccatggcaacaaaagccaaaattgacaaatgggatctaatcaaactaaagagcttctgcacagcaaaagaaactaccatcagagtgaacaggcaacttacaaaatgggagaaaattttcacaacctacttatctgacaaagggctaatatccagaatctacaatgaactcaaacaaatttacaagaaaaaaacaaacaacctcatcaaaaagtgggcaaaggacatgaacagacacctctcaaaagaagacatttatgcagccaaaaaacacatgaaaaaatgctcaccatcactggccatcagagaaatgcaaatcaaaaccacaatgagataccatctcacacgagttagaatggcaatcattaaaaagtcaggaaacaacaggtgctggagaggatgtggagaaataggaacacttttacactgttggtgggactgtaaactagttcaaccattgtggaagtcagtgtggcgattcctcagggatctagaactagaaataccatttgacccagccatcccattactgggtatatacccaaaggcctataaatcatgctgctataaagacacatgcacacgtatgtttattgcggcactattcgcaatagtaaagacttggaagcaacccaaatgtccaacaatgatagactagattaagaaaatgtggcacatatacaccatggaatactatgcagccatacaaaatgatgagttcatgtcctttgtagggacacggatgaaattggaaatcatcattctcagtaaactgtcggaaggacaaaaaaccaaacactgcatgttctcactcataggtgagaattgaacaatgagaacacaaggacacaggaaggggaacatcacactctggggactgttgtggggtggggggaggggggagggatagcattaggagatatacctaatgctaaatgacgagttaatgggtgcagcacaccagcatggcacatgtatacatatgtaactaacctgcacactgtgcacatgtaccctaaaacttaaagtataataataataaa

SEQ ID NO: 695 - DNA, 6030 bp, Homo sapiens
  source 1..6030: mol_type = other DNA
ggaggaggagccaagatggccgaataggaacagctccggtctacagctcccagcgtgagcgacgcagaagacaggtgatttctgcatttccatctgaggtaccgggttcatctcactagggagtgccagacagtgggcgcaggccagtgtgtgtgcgcaccgtgcgcgagccgaagcagggcgaggcattgcctcacctgggaagcgcaaggggtcagggagttccctttccgagtcaaagaaaggggtgacagatgcacctggaaaatcgggtcactcccacccgaatattgcgcttttcagaccggcttaagaaatggcgcaccacgagactatatcccacacctggctcagagggtcctacgcccacggaatctcactgattgctagcacagcagtctgagatcaaactgcaaggcggcaacgaggctgggggaggggcgcccgccattgcccaggcttgcttaggtaaacaaagcagccaggaagctcgaactgggtggagcccaccacagctcaaggaggcctgcctgcctctgtaggctccacctctgggggcagggcacagacaaacaaaaagacagcagtaacctctgcagacttacgtgtccctgtctgacagctttgaagagagcagtggttctcccagcacgcagctggagatctgagaacgggcagactgcctcctcaagtgggtccctgacccctgacccccgagcagcctaactgggaggcaccccccagcaggggcacactgacacctcacacggcagggtattccaacagacctgcagctgagggtcctgtctgttagaaggaaaactaacaaccagaaaggacatctacaccgaaaacccatctgtacatcaccatcatcaaagaacaaaagtagataaaaccacaaagatggggaaaaaacagaacagaaaaactggaaactctaaaacgcagagcacctctcctcctccaaaggaacgcagttcctcaccagcaacagaacaaagctggatggagaatgattttgacgagctgaaagaagaaggcttcagacgatcaaattactctgagctacgggaggacattcaaaccaaaggcaaagaagttgaaaactttgaaaaaaatttagaagaatgtataactagaataaccaatacagagaagtgcttaaaggagctgatggagctgaaaaccaaggctcgagaactacgtgaagaatgcagaagcctcaggagccgatgcgatcaactggaagaaagagtatcagcaatggaagatgaaatgaatgaaatgaagcgagaagggaagtttagagaaaaaagaataaaaagaaatgagcaaagcctccaagaaatatgggactatgtgaaaagaccaaatctacgtctgattggtatacctgaaagtgatgtggagaatggaaccaagttggaaaacactctgcaggatattatccaggagaacttccccaatctagcaaggcaggccaacgttcagattcaggaaatacagagaatgccacaaagatactcctcgagaagagcaactccaagacacataattgtcagattcaccaaagttgaaatgaaggaaaaaatgttaagggcagccagagagaaaggtcgggttaccctcaaaggaaagcccatcagactaacagcggatctctcggcagaaaccctacaagccagaagagagtgggggccaatattcaacattcttaaagaaaagaattttcaacccagaatttcatatccagccaaactaagcttcataagtgaaggagaaataaaatactttatagacaagcaaatgctgagagattttgtcaccaccatgcctgccctaaaagagctcctgaaggaagcgctaaacatggaaaggaacaaccggtaccagctgctgcaaaatcatgccaaaatgtaaagaccatcgagactaggaagaaactgcatcaactaatgagcaaaatcaccagctaacatcataatgacaggatcaaattcacacataacaatattaactttaaatataaatggactaaattctgcaattaaaagacacagactggcaagttggataaagagtcaagacccatcagtgtgctgtattcaggaaacccatctcatgtgcagagacacaaataggctcaaaataaaaggatggaggaagatctaccaagccaatggaaaacaaaaaaaggcaggggttgcaatcctagtctctgataaaacagactttaaaccgacaaagatcaaaagagacaaagaaggccattacataatggtaaagggatcaattcaacaagaggagctaactatcctaaatatttatgcacccaatacaggagcacccagattcataaagcaagtcctcagtgacctacaaagagacttagactcccacacattaataatgggagactttaacaccccactgtcaacattagacagatcaacgagacagaaagtcaacaaggatacccaggaattgaactcagctctgcaccaagcagacctaatagacatctacagaactctccaccccaaatcaacagaatatacatttttttcagcaccacaccacacctattccaaaattgaccacatagttggaagtaaagctctcctcagcaaatgtaaaagaacagaaattataacaaactatctctcagaccacagtgcaatcaaaccagaactcaggattaagaatctcactcaaagccgctcaactacatggaaactgaacaacctgctcctgaatgactactgggtacataacgaaatgaaggcagaaataaagatgttctttgaaaccaacgagaacaaagacaccacataccagaatctctgggacgcattcaaagcagtgtgtagagggaaatttatagcactaaatgcctacaagagaaagcaggaaagatccaaaattgacaccctaacatcacaattaaaagaactagaaaagcaagagcaaacacattcaaaagctagcagaaggcaagaaataactaaaatcagagcagaactgaaggaaatagagacacaaaaaacccttcaaaaaatcaatgaatccaggagctggttttttgaaaggatcaacaaaattgatagaccgctagcaagactaataaagaaaaaaagagaagagaatcacatagacacaataaaaaatgataaaggggatatcaccaccgatcccacagaaatacaaactaccatcagagaatactacaaacacctctacacaaataaactagaaaatctagaagaaatggatacattcctcgacacatacactctcccaagactaaaacaggaagaagttgaatctctgaatagaccaataacaggctctgaaattgtggcaataatcaatagtttaccaaccaaaaagagtccaggaccagatggattcacagccgaattctaccagaggtacaaggaggaactggtaccattccttctgaaactattccaatcaatagaaaaagagggaatcctccctaactcattttatgaggccagcatcattctgataccaaagccgggcagagacacaaccaaaaaagagaattttagaccaatatccttgatgaacattgatgcaaaaatcctcaataaaatactggcaaaccgaatccagcagcacatcaaaaagcttatccaccatgatcaagtgggcttcatccctgtgatgcaaggctggttcaatatacgcaaatcaataaatgtaatccagcatataaacagagccaaagacaaaaaccacatgattatctcaatagatgcagaaaaagcctttgacaaaattcaacaacccttcatgctaaaaactctcaataaattaggtattgatgggacatatctcaaaataataagaactatctatgacaaacccacagccaatatcatactgaatgggcaaaaactggaagcattccctttgaaaactggcacaagacagggatgccctctctcaccactcctattcaacatagtgttggaagttctggccagggcaatcaggcaggagaaggaaataaagggtattcaattaggaaaagaggaagtcaaattgtcgctgtttgcagacaacatgattgtttatctagaaaaccccattgtctcagcccaaaatctccttaagctgataagcaactccagcaaagtctcaggatacaaaatcaatgtacaaaaatcacaagcattcttatacaccaacaacagacaaacagagagccaaatcatgggtgaactcccattcacaattgcttcaaagagaataaaatacctaggaatccaacttacaagggatgtgaaggacctcttcaaggagaactgcaaaccactgctcaaggaaataaaagaggacacaaacaaatggaagaacattccatgctcatgggtaggaagaatcaatatcgtgaaaatggccatactgcccaaggtaatttacagattcaatgccatccccatcaagctaccaatgaatttcttcacagaattggaaaaaactactttaaagttcatatggaaccaaaaaagagcccgcattgccaagtcaatcctaagccaaaagaacaaagctggaggcatcatgctacctgacttcaaactatactacaaggctacagtaaccaaaacagcatggtactggtaccaaaacagagatatagatcaatggaacagaacagagccctcagaaataatgccgcatatctacaactatctgatctttgacaaacctgagaaaaacaagcaatggggaaaggattccctatttaataaatggtgctgggaaaactggctagccatatgtagaaagctgaaactggatcccttccttacaccttatacaaaaatcaattcaagatggattaaagatttaaacgttaaacctaaaaccataaaaaccctacaagaaaacctaggcattaccattcaggacataggcgtgggcaaggacttcatgtccaaaacaccaaaagcaatggcaacaaaagccaaaattgacaaatgggatctaattaaactaaagagcttctgcacagcaaaagaaactaccatcagagtgaacaggcaacctacaacatgggagaaaattttcgcaacctactcatctgacaaagggctaatatccagaatctacaatgaactcaaacaaatttacaagaaaaaacaaacaaccccatcagaaagtgggcaaaggacatgaacagacacttctcaaaagaagacatttatgcagccaaaaaacacatgaagaaatgctcatcatcactggccatcagagaaatgcaaatcaaaaccactatgagatatcatctcacaccagttagaatggcaatcattaaaaagtcaggaaacaacaggtgctggagaggatgcggagaaataggaacacttttacactgttggtgggactgtaaactagttcaaccattgtggaagtcagtgtggcgattcctcagggatctaggactagaaataccatttgacccagccatcccattactgggtatatacccaaatgagtataaatcatgctgctataaagacacatgcacacgtatgtttattgcggcactattcacaatagcaaagacttggaaccaacccaaatgtccaacaatgatagactggattaagaaaatgtggcacatatacaccatggaatactatgcagccataaaaaatgatgagttcatatcctttgtagggacatggatgaaattggaaaccatcattctcagtaaactatcgcaagaacaaaaaaccaaacaccacatattctcactcatgggtgggaattgaacaatgaggttacatggacacaggaaggggaatatcacactctggggactgtggtggggtcaggggaggggggagggatagcattgggagatatacctaatgctagatgacacattagtgggtgcagcgcaccagcatggcacatgtatacatatgtaactaacctgcacaatgtgcacatgtaccctaaaacttagagtataataaaaaaaaaaaa

SEQ ID NO: 696 - DNA, 6034 bp, Homo sapiens
  source 1..6034: mol_type = other DNA
ggaggaggagccaagatggccgaataggaacagctccagtctacagctcccagcgtgagcgacgcagaagacgggtgatttctgcatttccatctgaggtaccgggttcatctcactaaggagtgccagacagtgggcgcaggccagtgtgtgtgcgcaccgtgcgcgagccgaagcagggcgaggcattgcctcacctgggaagcgcaaggggtcagggagttccctttcagagtcaaagaaaggggtgacggacgcacctggaaaatcgggtcactcccacccgaatattgcgcttttcagaccggcttaagaaacggcgcaccacgagactatatcccacacctggctcagagggtcctacgcccacggaatctcgctgattgctagcacagcagtctgagatcaaactgcaaggtggcaacgaggctgggggaggggcgcccgccattgcccaggcttgcttaggtaaacaaagcagcctggaagctcgaactgggtggagcccaccacagctcaaggaggcctgcctgcctctgtaggctccacctctgggggcagggcacagacaaacaaaaagacagcagtaacctctgcagacttaagtgtccctgtctgacagctttgaagagagcagtggttctcccagcacgcagctggagatctgagaacgggcagactgcctcctcaagtgggtccctgacccctgacccccgagcagcctaactgggaggcaccccccagcaggggcacactgacacctcacacggcagggtattccaacagacctgcagctgagggtcctgtctgttagaaggaaaactaacaaccagaaaggacatctacaccgaaaacccatctgtacatcaccatcatcaaagaccaaaagtagataaaaccacaaagatggggaaaaaacagaacagaaaaactggaaactctaaaacgcagagcgcctctcctcctccaaaggaacacagttcctcaacagcaacagaacaaagctggatggagaatgattttgacgagctgagagaagaaggcttcagacgatcaaattactctgagctacaggaggacattcaaaccaaaggcaaagaagttgaaaactttgaaaaaaatttagaagaatgtataactagaataaccaatacagagaagtgcttaaaggagctgatggagctgaaaaccaaggctcgagaactacgtgaagaatgcagaagcctcaggagccgatgcgatcaactggaagaaagggtatcagcaatggaagatgaaatgaatgaaatgaagcgagaagggaagtttagagaaaaaagaataaaaagaaatgagcaaagcctccaagaaatatgggactatgtgaaaagaccaaatctacgtctgattggtgtacctgaaagtgatgtggagaatggaaccaagttggaaaacactctgcaggatattatccaggagaacttccccaatctagcaaggcaggccaacgttcagattcaggaaatacagagaacgccacaaagatactcctcgagaagagcaactccaagacacataattgtcagattcaccaaagttgaaatgaaggaaaaaatgttaagggcagccagagagaaaggtcgggttaccctcaaaggaaagcccatcagactaacagcggatctctcggcagaaaccctacaagccagaagagagtgggggccaatattcaacattcttaaagaaaagaattttcaacccagaatttcatatccagccaaactaagcttcataagtgaaggagaaataaaatactttatagacaagcaaatgctgagagattttgtcaccaccaggcctgccctaaaagagctcctgaaggaagcgctaaacatggaaaggaacaaccggtaccagccgctgcaaaatcatgccaaaatgtaaagaccatcgagactaggaagaaactgcatcaactaatgagcaaaatcaccagctaacatcataatgacaggatcaaattcacacataacaatattaactttaaatataaatggactaaattctgcaattaaaagacacagactggcaagttggataaagagtcaagacccatcagtgtgctgtattcaggaaacccatctcacatgcagagacacacataggctcaaaataaaaggatggaggaagatctaccaagccaatggaaaacaaaaaaaggcagaggttgcaatcctagtctctgataaaacagactttaaaccaacaaagatcaaaagagacaaagaaggccattacataatggtaaagggatcaattcaacaagaggagctaactatcctaaatatttatgcacccaatacaggagcacccagattcataaagcaagtcctcagtgacctacaaagagacttagactcccacacattaataatgggagactttaacaccccactgtcaacattagacagatcaacgagacagaaagtcaacaaggatacccaggaattgaactcagctctgcaccaagcagacctaatagacatctacagaactctccaccccaaatcaacagaatatacattttttttcagcaccacaccacacctattccaaaattgaccacatagttggaagtaaagctctcctcagcaaatgtaaaagaacagaaattataacaaactatctctcagaccacagtgcaatcaaactagaactcaggattaagaatctcactcaaagccgctcaactacatggaaactgaacaacctgctcctgaatgactactgggtacataacgaaatgaaggcagaaataaagatgttctttgaaaccaacgagaacaaagacaccacataccagaatctctgggacgcattcaaagcagtgtgtagagggaaatttatagcactaaatgcctacaagagaaagcaggaaggatccaaaattgacaccctaacatcacaattaaaagaactagaaaagcaagagcaaacacattcaaaagctggcagaaggcaagaaataactaaaatcagagcagaactgaaggaaatagagacacaaaaaacccttcaaaaaatcaatgaatccaggagctggttttttgaaaggatcaacaaaattgatagaccgctagcaagactaataaagaaaaaaagagagaagaatcaaatagacacaataaaaaatgataaaggggatatcaccaccgatcccacagaaatacaaactaccatcagagaatactacaaacacctctacgcaaataaactagaaaatctagaagaaatggatacattcctcgacacatacactctcccaagactaaaccaggaagaagttgaatctctgaatagaccaataataggctctgaaattgtggcaataatcaatagtttaccaaccaaaaagagtccaggaccagatggattcacagccgaattctaccagaggtacaaggaggaactggtaccattccttctgaaactattccaatcaatagaaaaagagggaatcctccctaactcattttatgaggccagcatcattctgataccaaagccgggcagagacacaaccaaaaaagagaattttagaccaatatccttgatgaacattgatgcaaaaatcctcaataaaatactggcaaaccgaatccagcagcacatcaaaaagcttatccaccatgatcaagtgggcttcatccctgggatgcaaggctggttcaatatacgcaaatcaataaatgtaatccagcatataaacagagccaaagacaaaaaccacatgattatctcaatagatgcagaaaaagcctttgacaaaattcaacaacccttcatgctaaaaaccctcaataaattaggtattgatgggacgtatttcaaaataataagagctatctatgacaaacccacagccaatatcatactgaatgggcaaaaactggaagcattccctttgaaaactggcacaagacagggatgccctctctcaccactcctattcaacatagtgttggaagttctggccagggcaatcaggcaggagaaggaaataaagggtattcaattaggaaaagaggaagtcaaattgtccctgtttgcagacgacatgattatttatctagaaaaccccatcgtctcagcccaaaatctccttaagctgataagcaacttcagcaaagtctcaggatacaaaatcaatgtacaaaaatcacaagcattcttatacaccaacaacagacaaacagagagccaaatcatgggtgaactcccattcacaattgcttcaaagagaataaaatacctaggaatccaacttacaagggatgtgaaggacctcttcaaggagaactacaaaccactgctcaatgaaataaaagaggacacaaacaaatggaagaacattccatgctcatgggtaggaagaatcaatatcgtgaaaatggccatactgcccaaggtaatttacagattcaatgccatccccatcaagctaccaatgactttcttcacagaattggaaaaaactactttaaagttcatatggaaccaaaaaagagcccgcatcgccaagtcaatcctaagccaaaagaacaaagctggaggcatcacactacctgacttcaaactatactacaaggctacagtaaccaaaacagcatggtactggtaccaaaacagagatatagatcaatggaacagaacacagccctcagaaataacaccgcatatctacaactatctgatctttcacaaacctgagaaaaacaagcaatggggaaaggattccctatttaataaatggtgctgggaaaactggctagccatatgtagaaagctgaaactggatcccttccttacaccttatacaaaaatcaattcaagatggattaaagatttaaacgttagacctaaaaccataaaaaccctagaagaaaacctaggcattaccattcaggacataggcgtgggcaaggacttcatgtccaaaacaccaaaagcaatggcaacaaaagccaaaattgacaaatgggatctaattaaactaaagagcttctgcacagcaaaagaaactaccatcagagtgaacaggcaacctacaacatgggagaaaattttcgcaacctactcatctgacaaagggctaatatccagaatctacaatgaactcaaacaaatttacaaggaaaaaacaaacaaccccatcaaaaagtgggcgaaggacatgaacagacacttctcaaaagaagacatttatgcagccaaaaaacacatgaagaaatgctcatcatcactggccatcagagaaatgcaaatcaaaaccactatgagatatcatctcacaccagttagaatggcaatcattaaaaagtcaggaaacaacaggtgctggagaggatgtggagaaataggaacacttttacactgttggtgggactgtaaactagttcaaccattgtggaagtcactgtggcgattcctcagggatctagaactagaaataccatttgacccagccatcccattactgggtatatacccaaaggactataaatcatgctgctataaagacacatgcacacgtatgtttattgcggcactattcacaatagcaaagacttggaaccaacccaaatgtccaacaatgatagactggattaagaaaatgtggcacatatacaccatggaatactatgcagccataaaaaatgatgagttcatatcctttgtagggacatggatgaaattggaaaccatcattctcagtaaactatcgcaagaacaaaaaaccaaacaccgcatattctcactcataggtgggaattgaacaatgagatcacatggacacaggaaggggaatatcacactctggggactgtggtggggtcgggggaggggggagggatagcattgggagatatacctaatgctagatgacacattagtgggtgcagcgcaccagcatggcacatgtatacatatgtaactaacctgcacaatgtgcacatgtaccctaaaacttagagtataataaaaaaattaaaaa

SEQ ID NO: 697 - DNA, 324 bp, Homo sapiens
  source 1..324: mol_type = other DNA
ggctcccaggaatcctaatgtcacgatctcactgcagccaatgtgacaaacacagcagtaattaagtctagagagctaaacacacctcaaaaagaattgtctcttggtatgagtggaatggaataaaatacatggaaacccacaaaagtttcgaggtgaacatattagcaaaaatgctctagcttatccaagcgacagttcaaagtgtcaaaggacttctagactcccaatctttccaccggcagaaagcaggctcagtagcccaaactggcgcattttaaaatgcccttttcagaagtgtgatggaaaaagaaggatgtgtca

SEQ ID NO: 698 - DNA, 1206 bp, Homo sapiens
  source 1..1206: mol_type = other DNA
tgagaggtgacagtgtgctggcagtcctcacagccctcgctcactctcggtgcctcctctgcctgggctcccactttggcagcacttgaggagcccttcagcccactgctgcactgtggaggcccctttctgggctggccaaggccagagccggctctctcagcttgcagggaggtgtggagggagaggcgcgagcgggcaccggggctgcacacggcgcttgcgggccagctggagttcagggtgggcgtgggcttggtgggccccgcactcggagcagccggctggccctgccagcccccggcaatgaggggcttagcacccgggccagcggctgcggagggtgtactgggtccctcagcagtgccagcccaccggcgctgtgctcgatttctcaccgggccttagctgcctttccgaggggcagggctcgggacctgcagcccgccatgcctgagcctcccaccccctccatgggctcctgtgctgcccgagcctcctcgacgagcaccaccccctgctccacggcgcccagtcccatcaccacccaagggctgaggagtgtgggcgcacggtgccgttctcgcaggcagctccacctgcagccctggtgtgggatccacttggtgaagccagctgggctcctgagtctggtggggatgtggagaacctttatgtctagctcagggattgtaaatacaccaatcagcaccgtgtgtctagctcagggtttgtgaatataccaatcgactctgctggggccttggagaacctttgtgtctagctcagggattgtaaacgcaccaatcagcaccctgtcaaaacagaccactcggctctaccaatcagcaggatgtgggtggggccagataagacaataaaagcaggctgccggagccagcagtggcaaccggctcaggtccccttctattgtggaagctttgttctttctctctttgcaataaatcctgctgctgctcactctttgggtccacactgcctttatgagccgtaacaggtctgcagtttcactcctgagccggcgagaccacgaacccaccagaaggaaaaaactccgaacacatccgaacatcagaaggaacaaactccagacgcgccactttaagagctgtaacactcaccgcgagggtccgtggcttcattcttgaagtcagtgagaccaagaacccaccaattccggacaca

SEQ ID NO: 699 - DNA, 2989 bp, Homo sapiens
  source 1..2989: mol_type = other DNA
taaaaaattaatgaatccaggagctggttttttgaaaggatcaacaaaatttttagaccactagcaagacaaataaagaaaaaaagagagaagaatcagatagacacaataaaaatgatcaaggggatatcaccaccaatcccacagaaatagaaactaccatcagagaatactacaaacacctctatgcaaataaactagaaaatctagaagaaatggataaattcctcaacgcatacacactcccaagactaaaccaggaagaagttgaatctctgattagaccaataacaggatctgaaattgtggcaataatcaatagcttaccaacaagaaagagtccaggaccacatggattcacagccgaattctaccagaagtacaatgaggaactggtaccattccttctgaaaatattccaatcaatagaaaaagagggaatcctccctaactcattttatgaggccagcatcatcctgataccacagctgggcagagacacaaccaaaaaagagaattttagaccaatatccttgatgaacattgatgcaaaaatcctcaataaaatactggcaaaccaaatccagcggcacatcaaaaagcttatccaccatgatcaagtgggcttcatccctgggatgcaagcctggttcaatatacgcaaatcaataaatgtaatccagcatataaacagaaccgaagacaaaaaccacatgattatctcaatagatgcagaaaaggcctttgacaaaattcaacaacccttcatgctaaaaactctcaataaattaggtgttgatgggacgtatctcaaaataataagagctatctatgacaaacccacagccaatatcatactgaatgggcaaaaactggaagcactccctttgaaaactggcacaagacagggatgccctctctcaccactcctattcaacatagtgttggaaattctggccagggcaattaggcagcagaaggaaataaagggtattcaattaggaaaagaggaagtcaaattgtccctgtttgcagatgacatgattctgtatctagaaaaccccattgtctcacctaaaatctccttaagctggtaaacaacttcagtaaagtctcaggatataaaatcaatgtacaaaaatcataagcattcttatacagcaataacagacagagagccaaatcatgactgaattcccattcacaattgcttcaaagagaataaaatagttaggaatccaacctacaagggatgtgaaggacctcttcaaggagaactacaaacaactgctcaatgaaataaaagaggacacaaacaaatggaagaacattccatgctcatgaatatgaagaatcaatattgtgaaaatggccatactgcccaaagtaatttattgattcaatgccatccccatcaagctaccaatgactttcttcacagaattggaaaaaactactttaaagttcacatggaagcaaaaaggagccggcattgccaagacaatcctaagccaaaagaacaaagctggaggcatcacgctacctgactccaaactatactacaaggctacagttaccaaaacagcatggtactggtaccaaaacagagatacagaccaatggaacagaacagaaccctcagaagtaataccacacatctactgccatctcatcttggcaagcctgacaaaaacaagaaatggggaaaggattacctatttaataaatggtgctgggaaaactggctagccatacgtagaaagctgaaactggatcccttccttacaccttatacaaaaattaattcaagatggactaaaaacttaaatgttagacctaaaaccataaaaaccctagatgaaaacctaggcaataccattcaggacataagcatgggaaaggacttcatgactaaaacaccaaaagcaatggcaacaaaagccacagttgacaaatgggatgtaattaaactaaagagcttctgcacagcaaaagaaactaccatcagagtgaacaggcaactgagagaatgggagaaaatttctacaatctacccatctgacaaagagctaatatccagaatctacaaagaacttaaacaaatttacaagaagaaatcaaatcaccccatcaaaaagtgggcagaggatatgaacagacacttctcaaaagaagacatttatgcagctaaaagacacaagaaaaaatgctcatcatcacgggccatcagagaaatgcaaatcaaaaaccacaattggataccatctcacaacagttagaaaggcaatccttaaaaagtcaggaaacaacaggtgctggagaggatgtggagaaataggaactcttttacactgttggtgggactgtaaactagttcaaccattgtgcaagacagtgttgcaattcctcaaggatctacaactagaaataccatttgacccagccatcccattactgggtatatgcccaaaggattataaatcacgctgctttaaagacacatgcacacgtatgtttactgtggtgctattcacaatagcaaagacttggaaccaactcaaatgtccatcaatgatagactgggctaagaaaatgtggcacatatacaccatggaatactatgcagccataaaaaatgatgagttcatgtcatttgcaaggacatggatgaagctggaaaacactattctgagcaaactatcgcaaggacagaaaaccaaacaatgcatattctcacacataggtgggaattgaacaaggagaacacttggacacagggaacatcacgcactagagcctgtagttagtggagtcgggggaggagggagtggtagcattaggagatatacctaatgtaaatgacgagttaacgggtgcagctaacaggtgcagcacaccaacatggcacatatatacatatgtaacaaacctgcacgttgtgcacatgtgccctagaacttaaattataatttaaaaaataaaaaaaaaa

SEQ ID NO: 700 - DNA, 2194 bp, Homo sapiens
  source 1..2194: mol_type = other DNA
tctcaataaactaggtattgatgagatgtatctcagaataatagctatctatgacaaacccacagccaatatcatactgaatgggaaaaaactggaagcattccctttgaaaactggcacaagacagggatgccttctctcaccactcctgttcaatgttgtgttggaagttcagggctatcagtcaggagaaagaaataaagggtattcaattaagaaaaggggaagccaaattgtcccgtatgcagatgacatgattgcaaagttagaaaaccccatcatttcagcccaaaatctccttaagctgataaacaacttcagcaaagtctcaagatacaaaatcaatgtgcaaaaatcacaagcattcatatatacaaagaacagacaaacagagagccaaatcatgagtgaactcccattcacaattgcttcaaagagaataaaatacctaggaatccaacttacaagggatgtgaaggacctcttcaaggagaactacaaaccactgctcaacgaaataaaaggacacaaacaaatggaagaacattccatgctcatggataggagaaatcaatattgtgaaaatggctatactgcccaaagtaatttatagattcaatgccatccccatcaagctaccaatgactttcttcacagaattggaaaaaactactttaaagttcacatggaagcaaaaaagagccggcattgccaagacaatcctaagccaaaacaacaaagctggaggcatcatgctacctgacttcaaactatactacaagactacagtaaccaaaacagcatggtactggtaccaaaacagagatacagaccaatggaacagaatagaaacctcagaagtaataccacacatctacaaccatctgatctttggctagcctgacaaaaacaagaaatggggaaaggattccctatttaataaacagtgctgggaaaactggctagccatatgtagaaagctgaaactggatcccttccttacactttatacaaaaattaattcaagatcgattaaagacttacatgttagacctaaaatcatcaaaaccctaggtgaaaacctaggcaataccattcaggacataggcatgggcaaggacttcatgactaaaacaccaaaagcaatggtaacaaaagccacagttgacaaatggtgtcttattaaactcaagagcttctgcacagcaaaagaaactaccatcagagtgaacaggcaactgacagaatgggagaaaatttttacaatttacccatctgacacagggctaatatccagaatctacaaagaacttaaacaaatttgcaagaagaaatcaaaccaccccatcaaaaagtgggcagaggatatgaacagacacttctcaaaagaagacacttatgcagccaaaagacacaagaaaaaatgctcatcatcactggccatcagagaaatgcaaatcaaaaaccacaatgagataccatctcacaacagttaaaaggcaatcattaaaaaatcaggaaacaacaggtgctggagaggatgtggagaaataggtacccctttacactgttggtgggactgtaaactagttcaaccattttggaagacagtgtggcaattcctcaaggatctacaactagaaataccatttgacccagccatcccattactgggtatatgcccaaaggattataaatcacgctgctttaaagacacatgcacacatatgtttactgtggtgctattcacaatagcaaagacttgaaaccgactcaaatgtcaatcaatgatagactgggttaagaaaatgtggcacatatacatcatgaaataataagcagccataaaaaacgatgagttcatgtcatttgcaaggacatggatgaagctggaaaacaccattctgagcaaactgtcgcaaggacagaaaaccaaacaatgcatgttgtcacacacaggtgggaattgaacaaggagaacacttgaacacagggaacatcatccaccagagccagtagttagtggagtggggggaggggggagtggtagcattaggagacatacctaatgtaaatgacgagttaacgggtgcagctaacaggtgcagcacaccaacatggcacatatatacatatgtaacaaacctgcacgttgtgcacatgtgccctagaacttaaaggataatttaaaaaa

SEQ ID NO: 701 - DNA, 5400 bp, Homo sapiens
  source 1..5400: mol_type = other DNA
agcagtggttctcccagcacgcagctggagatctgagaacgggcagactgcctcctcaagtgggtccctgacccctgacccccgagcagcctaactgggaggcaccccccagcaggggcacactgacacctcacacggcagtgtattccaacagacctgcagctgagggtcctgtctgttagaaggaaaactaacaaccagaaaggacatctacaccgaaaacccatctgtacatcaccatcatcaaagaccaaaagtagataaaaccacaaagatggggaaaaaacagaacagaaaaactggaaactctaaaacgcagagcgcctctcctcctccaaaggaacgcagttcctcaccagcaacagaacaaagctggatggagaatgattttgacgagctgagagaagaaggcttcagacgatcaaattactctgagctacgggaggacattcaaaccaaaggcaaagaagttgaaaactttgaaaaaaatttagaagaatgtataactagaataaccaatacagagaagtgcttaaaggagctgatggagctgaaaaccaaggctcgagaactacgtgaagaatgcagaagcctcaggagccgatgcgatcaactggaagaaagggtatcagcaatggaagatgaaatgaatgaaatgaagcgagaagggaagtttagagaaaaaagaataaaaagaaatgagcaaagcctccaagaaatatgggactatgtgaaaagaccaaatctacgtctgattggtgtacctgaaagtgatgtggagaatggaaccaagttggaaaacactctgcaggatattatccaggagaacttccccaatctagcaaggcaggccaacgttcagattcaggaaatacagagaacgccacaaagatactcctcgagaagagcaactccaagacacataattgtcagattcaccaaagttgaaatgaaggaaaaaatgttaagggcagccagagagaaaggtcgggttaccctcaaaggaaagcccatcagactaacagcggatctctcggcagaaaccctacaagccagaagagagtgggggccaatattcaacattcttaaagaaaagaattttcaacccagaatttcatatccagccaaactaagcttcataagtgaaggagaaataaaatactttatagacaagcaaatgctgagagattttgtcaccaccaggcctgccctaaaagagctcctgaaggaagcgctaaacatggaaaggaacaaccggtaccagccgctgcaaaatcatgccaaaatgtaaagaccatcgagactaggaagaaactgcatcaactaatgagcaaaatcaccagctaacatcataatgacaggatcaaattcacacataacaatattaactttaaatataaatggactaaattctgcaattaaaagacacagactggcaagttggataaagagtcaagacccatcagtgtgctgtattcaggaaacccatctcacgtgcagagacacacataggctcaaaataaaaggatggaggaagatctaccaagcaaatggaaaacaaaaaaaggcaggggttgcaatcctagtctctgataaaacagactttaaaccaacaaagatcaaaagagacaaagaaggccattacataatggtaaagggatcaattcaacaagaggagctaactatcctaaatatttatgcacccaatacaggagcacccagattcataaagcaagtcctcagtgacctacaaagagacttagactcccacacattaataatgggagactttaacaccccactgtcaatattagacagatcaacgagacagaaagtcaacaaggatacccaggaattgaactcagctctgcaccaagcagacctaatagacatctacagaactctccaccccaaatcaacagaatatacatttttttcagcaccacaccacacctattccaaaattgaccacatagttggaagtaaagctctcctcagcaaatgtaaaagaacagaaattataacaaactgtctctcagaccacagtgcaatcaaactagaactcaggattaagaatctcactcaaagccgctcaactacatggaaactgaacaacctgctcctgaatgactactgggtacataacgaaatgaaggcagaaataaagatgttctttgaaaccaacgagaacaaagacaccacataccagaatctctgggacgcattcaaagcagtgtgtagagggaaatttatagcactaaatgcctacaagagaaagcaggaaagatccaaaattgacaccctaacatcacaattaaaagaactagaaaagcaagagcaaacacattcaaaagctagcagaaggcaagaaataactaaaatcagagcagaactgaaggaaatagagacacaaaaaacccttcaaaaaatcaatgaatccaggagctggttttttgaaaggatcaacaaaattgatagaccgctagcaagactaataaagaaaaaaagagagaagaatcaaatagacacaataaaaaatgataaaggggatatcaccaccaatcccacagaaatacaaactaccatcagagaatactacaaacacctctacgcaaataaactagaaaatctagaagaaatggatacattcctcgacacatacactctcccaagactaaaccaggaagaagttgaatctctgaatagaccaataacaggatctgaaattgtggcaataatcaatagtttaccaaccaaaaagagtccaggaccagatggattcacagccgaattctaccagaggtacaaggaggaactggtaccattccttctgaaactattccaatcaatagaaaaagagggaatcctccctaactcattttatgaggccagcatcattctgataccaaagccaggcagagacacaaccaaaaaagagaattttagaccaatatccttgatgaacattgatgcaaaaatcctcaataaaatactggcaaaccgaatccagcagcacatcaaaaagcttatccaccatgatcaagtgggcttcatccctgggatgcaaggctggttcaatatacgcaaatcaataaatgtaatccagcatataaacagagccaaagacaaaaaccacatgattatctcaatagatgcagaaaaggcctttgacaaaattcaacaacccttcatgctaaaaactctcaataaattaggtattgatgggacgtatttcaaaataataagagctatctatgacaaacccacagccaatatcatactgaatgggcaaaaactggaagcattccctttgaaaactggcacaagacagggatgccctctctcaccgctcctattcaacatagtgttggaagttctggccagggcaatcaggcaggagaaggaaataaagggtattcaattaggaaaagaggaagtcaaattgtccctgtttgcagacgacatgattgtttatgtagaaaaccccatcgtctcagcccaaaatctccttaagctgataagcaacttcagcaaagtctcaggatacaaaatcaatgtacaaaaatcacaagcattcttatacaccaacaacagacaaacagagagccaaatcatgggtgaactcccattcacaattgcttcaaagagaataaaatacctaggaatccaacttacaagggatgtgaaggacctcttcaaggagaactacaaaccactgctcaaggaaataaaagaggacacaaacaaatggaagaacattccatgctcatgggtaggaagaatcaatatcgtgaaaatggccatactgcccaaggtaatttatagattcaatgccatccccatcaagctaccaatgactttcttcacagaattggaaaaaactactttaaagttcatatggaaccaaaaaagagcccgcattgccaagtcaatcctaagccaaaagaacaaagctggaggcatcacactacctgacttcaaactatactacaaggctacagtaaccaaaacagcatggtactggtaccaaaacagagatatagatcaatggaacacaacagagccctcagaaataatgccgcatatctacaactatctgatctttgacaaacctgagaaaaacaagcaatggggaaaggattccctatttaataaatggtgctgggaaaactggctagccatatgtagaaagctgaaactggatcccttccttacaccttatacaaaaatcaattcaagatggattaaagatttaaacgttaaacctaaaaccataaaaaccctagaagaaaacctaggcattaccattcaggacataggcgtgggcaaggacttcatgtccaaaacaccaaaagcaatggcaacaaaagacaaaattgacaaatgagatctaattaaactaaagagcttctgcacagcaaaagaaactaccatcagagtgaacaggcaacctacaacatgggagaaaattttcgcatcctactcatctgacaaagggctaatatccagaatctacaatgaactcaaacaaatttacaagaaaaaaacaaacaaccccatcaaaaagtgggcgaaggacatgaacagacacttctcaaaagaagacatttatgcagccaaaaaacacatgaagaaatgctcatcatcactggccatcagagaaatgcaaatcaaaaccactatgagatatcatctcacaccagttagaatggcaatcattaaaaagtcaggaaacaacaggtgctggagaggatgtggagaaataggaacacttttacactgttggtgggactgtaaactagttcaaccattgtggaagtcagtgtggcgattcctcagggatctagaactagaaataccatttgacccagccatcccattactgggtatatacccaaatgagtataaatcatgctgctataaagacacatgcacacgtatgtttattgcggcactattcacaatagcaaagacttggaaccaacccaaatgtccaacaatgatagactggattaagaaaatgtggcacatatacaccatggaatactatgcagccataaaaaatgatgagttcatatcctttgtagggacatggatgaaattggaaaccatcattctcagtaaactatcgcaagaacaaaaaaccaaacaccgcatattctcactcatagatgggaattgaacaatgagatcacatggacacaggaaggggaatatcacactctggggactgtggtggggttgggggaggggggagggatagtattgggagatatacctaatgctagatgacacattagtgggtgcagcgcaccagcatggcacatgtatacatatgtaactaacctgcacaatgtgcacatgtaccctaaaacttagagtataataaaaaaaataaaa

SEQ ID NO: 702 - DNA, 6517 bp, Homo sapiens
  source 1..6517: mol_type = other DNA
tggcaaaatggccaaataggaagagctccagtctgtagctcccagcgagaccaatgcagaaggcgggtgattgctgcatttccaactgaggtagccagttcatctcactgggactggttagacagggggtgcagcccatggagggtgagcagaagcagagggggttgtcgcctcacccaggaagtgcaaggggccgggggactccctcccctagccaaggaaagccgtgagggactgtgctatctggcccagatactacgcttctcccatggtttttgcaatccgcagaccaggagattcccttgtgtgcctacaccaccagggctctgggtttcaagcacaaaactgggctgctgtttggatagatgccaggctagctgcacgtgtgtttttttcgtaccccagtagttcctggaaccccagtggtgcctaggaaccccagtgagacaaaaccgttttctcccctagaaagggggctgaagccagggagccaagtgatctcctgcagtggatcctactcccacagagcccagcaagctaagaaccactggcttgaaattcttgctgccagcacagcagtctgaagtcgacctgggacgctcaagcttggtggaggcaggggcatccaccattactgaggcttgagtaggtggctttcccctgaccatgctaaggactggacgtaactcaacacagcacagcaaagtggctgtggctagactgcctttctagattcctcttcactgggcagggcatctctgaaagaaaggcaagagccccagtcaggggcttataaataaaactcccatctccctagggcagagcacctgggagaaggggtggctgtgggtgcagcttcagtggacttaaacattcctgcctgccggctctgaagagaccagtggatcctgacaaggagggttctcccagcgtggtacttgagctctgctaagggacagactgcctcctcacgtgggtccctgacctgcatgcctcctgactgagagagacctcccaacaggggttgacagacacctcatacaggaggaaggagcaggcaggaatctttgctgttctgcagactccgctggtgataccaggcaaatagggtctggaatggacctccagcaaactccagcagacctagaggagaggggcctggctgttggaatgaaaactaacaaaacaagaagcaataacgtcaacatcaacaaaaaggacccccacacacagaaaccccatccaaatgtcatcagtctcaaggatcaaaggcagataaatccatgaagatgaggaaaaaccagcgcaaaaatgctgaaaattcccaaaaccagaatgcctcttctccttcaaatgatcgcaactcctttccagcaagggcacaaaatgggacaccgaatgagtttgatgaattgacagaagtaggcttcagaaagtgggtaataataaacccctctgagctaaagaagcatgttctaacccaatgcaaggactctaagaaccttgacaaaaggttacaggaactactaactagaataaccagtttagagaagaacataaatgacctgatggatctgagaaacacagcacgagaacttcgtgaagcatatacaagtatccatagccaaatcaatcaagcagaagaaaggatatcagagattgaagatgaacttaatgaaataaagcatgaagacaagattagagaaaaaagaatgaaaaggaatgaacaaaacctccaagaaatatgggactctgtgaaaagaccaaacctatgattgattggggtccctgaaagtgatggggagaatggaaccaaattggaaaacatacttaaggatattatccaggagaacctccccaacctagcaagacagaccaacattcaaattcaggaaatacaaagaacactactaagatactcttcaagaagagcaaccccaagacacataattgtcagattctctaagcttgaaatgaaggaaaaaagaatgttaaagggcagccagagagaaaggtctggttacctacaaaaggaaacctatcagactaacagcagatctctctgcagaaaccctacaagccagaagagagtggggcccaatattcaatagttttaaagaaaagaattttcaacccagaatttcatatccagccaaactaagtttcataagcaaaggagaaataaaatcctttgcataaatgctgagggattttgtcaccaccaggcctgccttacaggagctcctgaagaaagcactaaatatggaaaagaaaaatcggtactagccactgcaaaaacacaccaaaatatagagaccagggacactatgaagaaactgcattaactaatgtgcaaaataaccagctagcatcatgatgacaagatcaaattcacacataacaatattaaccttaaatgtaaatgggctaagtgccccaaaaggcacagactgccaaattggataaagagtcaagacccattggtgtgctatattcaggagacccatctcatgtgcaaagacacacatacgctcaaaataaagggatggaggaatatttaccaagcaaatggaaagcaaaaaacaaacaaacaacaaaacttaggggttgcaatcgtagtctctgataaaacaggctttaagccaaaaaagatcaaaaaagacaaagaagggcattacataatggtaaagggatcaatgcaacaagaagagctaactatcctaaatatatatgcacccaatacaggagcacccagatttataaaacaagttcttagagacttacaaagagacttagactcccacacagtaatagtgggagactttaacaccccactgtcaatattagacagatcaacgagacagaaaattaacaaggatattcacaacttgaactcagctatggaccaagcagacctaatagacatctacaaaactctccaccccaaattaacagaatatacattcttctgagcaccacgtagcacttactctaaaatcgatcacataattggaagtaaaacactccttagcaaatgcaaaagaatggaaatcataacagtctctcagaccacagtgcaatcaaattagaactcaggatgaagaaactcactcaaaaccatgtatgtggaaactgaacaacctgctcctgaatgactacttgggtaaataacgaaattaaggcagaagtaaagttctttgaaacctatgagaacaaagacaaaacatactggaatctctgggacacagctaaagcagtgtttagagggaaatttatagcactcaatgcccaaaggagaaagcgggaaagatctaaaattgataccctaacatcacaattaaaagaactagagaagcgagagcaaacaaatttaaaagctagcagaagaaaagaaataactaagatcagagcagaactgccctcactcagcaatgaggagcctgagcaaatgtgcaaggctgtgagagagagagagagagagagagagagagagagagagagagagaaggagatagagacacgaaaaacccttcaaaaaatcaatgattgcgggagctggttttttgaaaagattaacaaaatacattgactgctagccagaccaataaagaagaaaagagagaagaatcaaatagacacaataaaaattgataaaggggatatcaccactgatctcacagaaataccaactaccatcagagaatactataaacacctctagcaaataaactagaaaatctagaagaaatggataaattcctggacatgtacagcctcctaagattaaatcagggagaagttgagtccctgaatagaccaataacaagttctgaaattggaggcagtaattaatagcctgcaaaccaaaaaaagcccaggacctgacggattcacagctgaattctaccagaggtacaaagaggagctggtaccattccttctgaaattattacaaacaatagaagaagagggactcctccctaactcattttataaggccagcatcatcctgattcgaaaacctggcagagacacaacaagaaaagaaaatttcaggccaatatccctgatgaacattgaggtgaaaatcctcagtaaaatactggcaaaccaaatcaagcagcacatcaaaaagctcatccaccatgatcaagttggcttcatccctgggatgcaaggctggttcaacatatgcaaatcaatgaatgtaatccatcacataaacagaaccaatgacaaaaaccacatgattatctcaatagatgcagaaaaggcctttgaaaaaattcaacaccccttcatactaaaaactctcaataaagtaggtatcgatgggacatatttcaaaataatgagagctatttatgataaacccatagccagtatcatactgaatgggcaaaagctggaagcattccctttgaaaactggcacaagacaaggatgccctctctcaccactcctattcaacatagtattggaatttctggccagggcaatcaggcaagagaaggaaataaagggtattcaattcaaataggaaaagaggaagtcaaattgtctctgtttgcagatgacatgattgtgtatttagaaaaccccatggtctcagcccaaaaactccttaagctgataaggaacttcagcaaagtctcaggatacaaaatcaatgtgcaaaaatcacaagcattcccatacaccaaaaatagacaaacagagagtcaaatcatgagtgaactttcattcacaattgctacaaagagaataaaataccgaggaatacaacttacaagggacatgaaggacctcttcgaggagaactacaaaccactgctcaaggaaataagagaggacagaaacaaatggaacaacattccatgctcatggatacaagaatcaatatcgtgaaaatggccatatggcccagagtaatttatagattcagtgctatccacatcaagccaccactgactttcttcacagaattagaaaaaaactactttaaattccatatggaaccaaaaaagcccacatagccaagacaatcccaagcaaaaagaacaaagctggaggcatcatgctacctgacttcaaactacaaggctacagtaaccaaaacagcatgttactgataccaaaacagatatatagaccaatggaacagaacagaggcctcagaaataacaccacgtatctacagccatctgatctttgagactgtacaaaaacaagcaatggggaaaggattccctatttaataaacggtgctgggaaaactggctagccatatgaagaaaacagaaactgcaccccttccttacaccttatacaaaaattaactcagatggattaaagacttaaatgtaaaacctaaaactgtaaaaaccccagaagaaaacctagggaataccattcaggacataggcatgggcaaagatttcatgagtaaaacactaaaagcaattgcaacaaaagccaaaattgataaatgggatctaattaaactaaagagcttctgcacagcaaaagaaattatcaccagagtgaacaggcatcctacagaatgggagaaaatttttgcaatctatccatctgacaaaggtctaatttccagaatctacaaggaacttaaacaaatttacaagaaaaaaaaaccaacaaccccatcaaaaagtgggcaaaggatatgaacagacacttctcaaaagaaggcatttatgtggccaagaaacatataaaaaaagctcatcatcactggtcattagagaaatgcaaatcaaaatcacaatgagataccatctcatgccagttagaatggtgatcactaaaaagtctggaaacaacagatgctaatgaggatgtggagaattaggaatgcttttacactgttggtggagtgtaaattagttccactgtggaagatggtgtggcgattcctcaaggatctagaaccagaaataacatttgacccagcaatcccattactgggtatatacccaaaggattataaaacattgtactataaagacacatgcacacgtatgtttattgcagtactgtttacaatagcaacaacttggaaccaacccaaatgaccatcagtgattgactggatatagaaaatgtggcacatatacagcatggaatactgtgcagccataaaaaagaatgagttcatgtcctttgcagagacatggatgaagctggaaaccatcatcctcagcaaactaacaggggaacagaagacccaacactgcatattttcactcgtaagtgggagttgaataatgataacacatggatgcagggagtggaacaacacacactggggcctttcggggagtggggtgcaaggggagggagagcattaggacaaattcctaatgcatgtggggcttaaaaccaaatgacgggttgacaggtgcagcaaaccaccatggcacatgtatacctatgtaacaaacctgatgttcagcacatgtatcccagaacttaaagtaaaataaaataaaataaa

SEQ ID NO: 703 - DNA, 5173 bp, Homo sapiens
  source 1..5173: mol_type = other DNA
catcttggctcctcaccatcatcaaagaccaaaagtagataaaaccacaaagatgggggaaaaacagagcagaaaaactagaactctaaaaagcagagcacctctcctcctccaaaggaaagcagttcctcaccagcagtggaacaaagctggacggagaatgactttgacgagttgagagaagaaggcttcagacgatcaaacaacgagctaccggaggaaattcaaaccaaaggcaaagaagttaaaaactttgaaacaaatttagacgaatgtataactagaataaccaatacagagaagtacttaaaggagctgatggagctgaaagccaaggctccagaactacgtgaagaatgcagaagcctcaggagccaatgcaatcaactggaagaaagggtatcagtgatggaagatgaaatgaatgaaatgaagcaagaagggaaatttagagaaaaaagaataaaaagaaacgaacaaagcctccaagaaatatgggactatgtgaaaagaccaaatctatctctgattggtgtacctgaaagtgatggggagaatggaaccaagttggaaaacactctgcaggatattatccaggagaacttccccaatctagcaaggcaggccaacattcagattcaggaaatacagagaacgccacaaagatactcctcgagaagagcaactccaagacacataattgtcagattcaccaaagttgaaatgaaggaaaaatgttaagggcagccagagagaaaggtcgggttactcacaaagggaagcccatcagactaacagcggatctctcatcagaaaccctacaagccagaagagagtgggggccaatattcaacattcttaaagaaaagaattttcaacccagaatttcatatccagccaaactaagcttcataagtgaaggagaaataaaatactttacagacaagcaaatgctgagagattttgtcaccaccaggcctgccctaaaagagctcctgaaggaagcactaaacatggaaaggaacaaccggtaccagccgctgcaaaatcatgccaaaatgtaaagaccattgagactaggaagaaactgcatcaactaacgagcaaaataaccagctaacatcataatgacaggatccaattcacacataacaatattaactttaaatgtaaatggactaaatgctccaattaaaagacacagactggcaaattggataaagagtcaagacccatcagtgtgctgtattcaggaaacccatctcacgtgcagagacacacataggctcaaaataaaaggatggaggaagatctaccaagcaaatggaaaacaaaaaaaggtaggggtttcaatcctagtctctgataaaacagactttaaaccaacaaagatcaaaagagacaaagaaggccattacataatgttaaagagattaattcaacaagaagagctaactatcctaaatatatatgcacccaatacaggagcacccagattcataaagcaagtcctgagtgacctacaaagagactgagactcccacacattaataatgggagactttaacaccccactgtcaacattagacagatcatcgagacagaaagttaacaaggatatccaggaattgaattcagctctgcaccaggcggacctaatagacatctacagaactctccaccccaaatcaacagaatatacatttttttcagcaccacaccacacctattccaaaattgaccacatacttggaagtaaagctctcctcagcaaatgttaaagaacagaaattataacaaacgatctctcagaccacaatgcaatcaaactagaactcaggattaagaaactcactcaaaacccctcaacttcatggaaactgaacaacctgctcctgaatgactactgggtacataacaaaaggaaggcagaaataaagatgttctttgaaaccaatgagaaaaaagacacaacataccagaatctctgggacacattcaaagcagtgtgtagagggaaatttatagcactaaatgcccacaagagaaagcaggaaagatccaaaattgacaccctaacatcacaattaaaggaactagaaaagcaagagcaaacacattcaaaagctagcagaaggcaagaaataactaagatcagagcagaacggaaggaaatagagacacaaaaaacccttcaaaaaattaatgaatccaggagctggttttttgaaaggatcaacaaaattgatagaccgctagcaagactaataaagaaaaaaagagagaagaatcaaatagacacaataaaaaatgataaaggggatatcaccaccgatcccacagaaatacaaactaccatcagagaatactacaaacacctctacgcaaataaactagaaaatctagaagaaatggataaattcctcgacacatacactctcccaagactaaaccaggaagaagttgaatctctgaatagaccaataacaggatctgaaattgtggcaataatcaatagcttaccaaccaaaaagagtccaggaccagatggattcacagccgaattctaccagaggtacaaggaggagctggtaccattccttctgaaactattccaatcaatagaaaaagagggaatcctccctaactcattttatgaggccagcatcatcctgataccaaagttgggcagagacacaaccaaaaaagagaattttagaccaatatcctttatgaacattgatgcaaaaatcctcaataaaatactggcaaaccaaatccagcagcacatcaaaaagcttatccaccgtgatcaagtgggcttcatccctgggatgcatggctggttcaatatacgcaaatcaataaatgtaatccagcatataaacagagccaaagacaaaaaccacatgattgtctcaatagatgcagaaaaggcctttgacaaaattcaacaacccttcatgctgaaaactctcaataaattaggtattgatgggatgtatttcaaaataataagagctatctatgacaaacccacagccaatatcatactgaatgggcagaaactggaagcattccctttgaaaactggcacaagacagggctgccctctctcaccactcctattcaacatagtgttggaagttctggccagggcaattaggcaggagaaggaaataaagggtattctattaggaaaagaggaagtcaaattgtccctgtttgcagacgacatggttgtatatctagaaaaccccattgtctcagcccaaaatctccttaagctgataagcaacttcagcaaagtctcaggatacaaagtcaatgtacaaaaatcacaagcgttcttatacaccaataacagacaaacagagagccaaatcatgagtgaactcccattaacaattgcttcaaagagaataaaatacctaggaatccaccttacaagggatgtgaaggacctcttcaaggagaactacaaaccactgctcaatgaaataaaagaggatacaaacaaatggaagaacattccatgctcatgggtaggaagaatcaatatcgtgaaaatggccatactgcccaaggtcatttatagattcaatgccatgcccatcaagctaccaatgactttcttcacagaattgaaaaaacttgatcttgaaagttcatatggaaccaaaaaagagcccgcatcgccaagtcaatcctaagccaaaagaacaaagctggaggcatcacactacctgacttcaaactatactacaaggctacagtaaccaaaacagcatggtactggtaccaaaacagagatctagatcaatggaacagaacagagccctcagaaataacgccgcatatctacaactgtctgatctttgacaaacctgagaaaaacaagcaatggggaaaggattccctatttaataaatggtgctgggaaaactggctagccatatgtagaaagctgaaattggctcccttccttacaccttatgcaaaaatcaattcaagatggattaaagacttaaacattagacctaaaaccataaaaaccctagaagaacgcctaggcattaccattcaggacataggcatgggcaaggacttcatgtctaaaacaccaaaagcaatggcaacaaaagccaaaattgacaaatgggatctagttaaactaaagagcttctgcacagcaaaagaaactaccatcagagtgaacaggcaacccacaaaatgggggaaaattttcgcaacctactcttctgacaaagggctaatatccagaatctacaatgaactcaaacaaatttacaagaaaaaacaaacaaccccatcaaaaagtgggcaaaggacatgaacagacacttctcaaaagaagacatttatgcagccaaaagacacatgaaaaaatgctcaccatcactggccatcagagaaatgcaaatcaaaaccacaatgagatatcatctcacaccagtttgaatggcaatcgttaaaaagtcaggaaacaacaggtgctggagaggatgtggagaaataggaacacttttacactgttggtgggactgtaaactagttcaaccattgtggaagtcagtgtggcgattcctcagggatctagaactagaaataccatttgacccagccatcccattagtgggtatatacccaaaggactataaatcatgctgctataaagacacatgcacacgtatgtttattgtggcactattcacaatagcaaagacttggaaccaacccaaatgtccaacaatgatagactgaattaagaaaatgtggcacatatacaccatggaatactatgcagccataaaaaatgatgagttcatatccgttgtagggacatggatgaaattggaaatcatcattctcagtaaactatcgcaagaacaaaaaaccaaacaccgcatattctcactcataggtgggaattgaacaatgagaacacgtggacacaggaaggggaacatcacactgtggggactgttgtggagtggcgggggagggagggatagcattgggagatatacctaatgctagatgacgagttagtgggtgcaatgcaccaacatggcacatgtatacatatgtaactaacctgcaccttgtgcacgtgtaccctaaaacttaaagtataataataataaaaaaa

SEQ ID NO: 704 - DNA, 6030 bp, Homo sapiens
  source 1..6030: mol_type = other DNA
agaggagccaagatggccgaataggaacagctccggtctacagctcccagcgtgagcgacgcagaagacggtgatttctgcatttccatctgaggtaccgggttcatctcactagggagtgccagacagtgggcgcaggccagtgtgtgtgcgcaccgtgcacgagccgaagcagggcgaggcattgcctcacctgggaagcgcaaggggtcagggagttccctttccgagtcaaagaaaggggtgacggtcgcacctggaaaatcgggtcactcccacccgaatattgcgcttttcagaccggcttaagaaacggcgcaccacgagactatatcccacacctggctcggagggtcctacgcccacggaatctcgctgattgctagcacagcagtctgagatcaaactgcaaggcggcaacgaggctgggggaggggcgcccgccattgcccaggcttgcttaggtaaacaaagcagccgggaagctcgaactgggtggagcccaccacagctcaaggaggcctgcctgcctctgtaggctccacctctgggggcagggcacagacaaacaaaaagacagcagtaacctctgcagacttaagtgtccctgtctgacagctttgaagagagcagtggttctcccagcacgcagctggagatctgagaacgggcagacagactgcctcctcaagtgggtccctgactcctgacccccgagcagcctaactgggaggcaccccccagcaggggcacactgacacctcacacggcagggtattccaacagacctgcagctgagggtcctgtctgttagaaggaaaactaacaaccagaaaggacatctacaccgaaaacccatctgtacatcaccatcatcaaagaccaaaagtagataaaaccacaaagatggggaaaaaacagaacagaaaaactggaaactctaaaacgcagagcgcctctcctcctccaaaggaacgcagttcctcaccagcaacagaacaaagctggatggagaatgattttgacgagctgagagaagaaggcttcagacgatcaaattactctgagctacgggaggacattcaaaccaaaggcaaagaagttgaaaactttgaaaaaaatttagaagaatgtataactagaataaccaatacagagaagtgcttaaaggagctgatggagctgaaaaccaaggctcgagaactacgtgaagaatgcagaagcctcaggagccgatgcgatcaactggaagaaagggtatcagcgatggaagatgaaatgaatgaaatgaagcgagaagggaagtttagagaaaaaagaataaaaagaaatgagcaaagcctccaagaaatatgggactatgtgaaaagaccaaatctacgtctgattggtgtacctgaaagtgatgtggagaatggaaccaagttggaaaacactctgcaggatattatccaggagaacttccccaatctagcaaggcaggccaacgttcagattcaggaaatacagagaacgccacaaagatactcctcgagaagagcaactccaagacacataattgtcagattcaccaaagttgaaatgaaggaaaaaatgttaagggcagccagagagaaaggtcgggttaccctcaaaggaaagcccatcagactaacagcggatctcttggcagaaaccctacaagccagaagagagtgggggccaatatacaacattcttaaagaaaagaattttcaacccagaatttcatatccagccaaactaagcttcataagtgaaggagaaataaaatactttatagacaagcaaatgttgagagattttgtcaccaccaggcctgccctaaaagagctcctgaaggaagcactaaacatggaaaggaacaaccggtaccagccgctgcaaaatcatgccaaaatgtaaagaccatcgagactaggaagaaactgcatcaactaatgagcaaaatcaccagctaacatcataatgacaggatcaaattcacacataacaatattaactttaaatataaatggactaaattctgcaattaaaagacacagactggcaagttggataaagagtcaagacccatcagtgtgctgtattcaggaaacccatctcacgtgcagagacacacataggctcaaaataaaaggatggaggaagatctaccaagccaatggaaaacaaaaaaaggcaggggttgcaatcctagtctctgataaaacagactttaaaccaacaaagatcaaaagagacaaagaaggccattacataatggtaaagggatcaattcaacaagaggagctaactatcctaaatatttatgcacccaatacaggagcacccagattcataaagcaagtcctgagtgacctacaaagagacttagactcccacacattaataatgggagactttaacaccccactgtcaacattagacagatcaacgagacagaaagtcaacaaggatacccaggaattgaactcagctctgcaccaagcagacctaatagacatctacagaactctccaccccaaatcaacagaatatacatttttttcagcaccacaccacacctattccaaaattgaccacatagttggaagtaaagctctcctcagcaaatgtaaaagaacagaaattataacaaactatctctcagaccacagtgcaatcaaactagaactcaggattaagaatctcactcaaagccgctcaactacatggaaactgaacaacctgctcctgaatgactactgggtacataacgaaatgaaggcagaaataaagatgttctttgaaaccaacgagaacaaagacaccacataccagaatctctgggacgcattcaaagcagtgtgtagagggaaatttatagcactaaatgcctacaagagaaagcaggaaagatccaaaattgacaccctaacatcacaattaaaagaactagaaaagcaagagcaaacacattcaaaagctagcagaaggcaagaaataactaaaatcagagcagaactgaaggaaatagagacacaaaaaacccttcaaaaaatcaatgaatccaggagctggttttttgaaaggatcaacaaaattgatagaccgctagcaagactaataaagaaaaaaagagagaagaatcaaatagacacaataaaaaatgataaaggggatatcaccaccgatcccacagaaatacaaactaccatcagagaatactacaaacacctctacgcaaataaactagaaaatctagaagaaatggatacattcctcgacacatacactctcccaagactaaaccaggaagaagttgaatctctgaatagaccaataacaggctctgaaattgtggcaataatcaatagtttaccaaccaaaaagagtccaggaccagatggattcacagccgaattctaccagaggtacatggaggaactggtaccattccttctgaaactattccaatcaatagaaaaagagggaatcctccctaactcattttatgaggccagcatcattctgataccaaagccgggcagagacacaaccaaaaaagagaattttagaccaatatccttgatgaacattgatgcaaaaatcctcaataaaatactggcaaaccgaatccagcagcacatcaaaaagcttatccaccatgatcaagtgggcttcatccctgggatgcaaggctggttcaatatacgcaaatcaataaatgtaatccagcatataaacagagacaaagacaaaaaccacatgattatctcaatagatgcagaaaaagcctttgacaaaattcaacaacccttcatgctaaaaactctcaataaattaggtattgatgggacgtatttcaaaataataagagctatctatgacaaacccacagccaatatcatactgaatgggcaaaaactggaagcattccctttgaaaaccggcacaagacagggatgccctctctcaccgctcctattcaacatagtgttggaagttctggccagggcaatcaggcaggagaaggaaataaagggtattcaattaggaaaagaggaagtcaaattgtccctgtttgcagacgacatgattgtatatctagaaaaccccatcatctcagcccaaaatctccttaagctgataagcaacttcagcaaagtctcaggatacaaaatcaatgtacaaaaatcacaagcattcttatacaccaacaacagacaaacagagagccaaatcatgggtgaactcccattcacaattgcttcaaagagaataaaatacctaggaatccaacttacaagggatgtgaaggacctcttcaaggagaactacaaaccactgctcaaggaaataaaagaggagacaaacaaatggaagaacattccatgctcatgggtaggaagaatcaatatcgtgaaaatggccatactgcccaaggtaatttacagattcaatgccatccccatcaagctaccaatgactttcttcacagaattggaaaaaactactttaaagttcatatggaaccaaaaaagagcccgcattgccaagtcaatcctaagccaaaagaacaaagctggaggcatcacactacctgacttcaaactatactacaaggctacagtaaccaaaacagcatggtactggtaccaaaacagagatatagatcaatggaacagaacagagccctcagaaataatgccgcatatctacaactatctgatctttgacaaacctgagaaaaacaagcaatggggaaaggattccctatttaataaatggtgctgggaaaactggctagccatatgtagaaagctgaaactggatcccttccttacaccttatacaaaaatcaattcaagatggattaaagatttaaacgttaaacctaaaaccataaaaaccctagaagaaaacctaggcattaccattcaggacataggcgtgggcaaggacttcatgtccaaaacaccaaaagcaatggcaacaaaagacaaaattgacaaatgggatctaattaaactaaagagcttctgcacagcaaaagaaactaccatcagagtgaacaggcaacctacaacatgggagaaaattttcgcaacctactcatctgacaaagggctaatatccagaatctacaatgaactcaaacaaatttacaagaaaaaaacaaacaaccccatcaaaaagtgggcgaaggacatgaacagacacttctcaaaagaagacatttatgcagccaaaaaacacatgaagaaatgctcatcatcactggccatcagagaaatgcaaatcaaaaccactatgagatatcatctcacaccagttagaatggcaatcattaaaaagtcaggaaacaacaggtgctggagaggatgcggagaaataggaacacttttacactgttggtgggactgtaaactagttcaaccattgtggaagtcagtgtggcgattcctcagggatctagaactagaaataccatttgacccagccatcccattactgggtatatacccaaatgagtataaatcatgctgctataaagacacatgcacacgtatgtttattgcggcactattcacaatagcaaagacttggaaccaacccaaatgtccaacaatgatagactggattaagaaaatgtggcacatatacaccatggaatactatgcagccataaaaaatgatgagttcatatcctttgtagggacatggatgaaattggaaaccatcattctcagtaaactatcgcaagaacaaaaaaccaaacaccgcatattctcactcataggtgggaattgaacaatgagatcacatggacacaggaaggggaatatcacactctggggactgtggtggggtcgggggaggggggagggatagcattgggagatatacctaatgctagatgacacattagtgggtgcagcgcaccagcatggcacatgtatacatatgtaactaacctgcacaatgtgcacatgtaccctaaaacttagagtataataaaaaaaaaaa

SEQ ID NO: 705 - DNA, 6028 bp, Homo sapiens
  source 1..6028: mol_type = other DNA
ggggaggagccaagatggctgaataggaacagctccggtctacagctcccagcgtgagcgacgcagaagatgggtgatttctgcatttccatctgaggtaccgggtgcatctcactagggagtgccagacagtgggcgcaggccagtgggtgcgcgcaccgtgcgcgagccgaagcagggcgaggcattgcctcacctgggaagcacaaggggtcagggagttccctttccgagtcaaagaaacgggtgacagacgcacctggaaaatcgggtcactcccacccgaatattgcacttttcagaccggcttaaaaagcagcgcaccacgagactatatcccacacctggctcggagggtcctacgcccacggaatctcgctgattgctagcacagcagtctgagatcaaactgcaaggccccaggagggctgggggaggggcgcccgccattgcccaggcttgcttaggtaaacaaagcagcctggaaactcgaactgggtggagcccaccacagctcaaggaggcctgcctgccactgtaggccccacctctgggggcagggcacagacaaacaaaaagacagcagtaacctctgcagacttaaatgcccctgtctgacagctttgaagagagcagtggttctcccagcacgcagctggagatctgagaatgggcagactgcctcctcaagtgggtccctgacccctgacccccgagaagtctaactgggaggcatcccccagcaggggcacactgccacctcacacagcagggtattccaacagacctgcagctgagggtcctgtctgttagaaggaaaactaacaaacagaaaggacatccacactgaaaacccatctgtacatcactatcatcaaagaccaaaagtagataaaaccacaaagatggggaaaaaacagaacagaaaaactggaaactctaaaacgcagagcatctctcctcctccaaaggaacacagttcctcaccagcaacagaacaaagctggatggagaatgactttgacgagctgagagaagaaggcttcagatgatcaaattactctgagctacgggaggacattcaaaccaaaggcaaagaagttaaaaactttgaaaaaaatttagaagaatgtataactagaataaccaatacagagaagtgcttaaaggagctgatggagctgaaaaccaaggctcgagaactatgtgaggaatgcagaagcctcaggagccgatgcgatcaactggaagaaagggtatcagtgatggaagatgaaatgaatgaaatgaagcgagaagggaagtttagagaaaaaagaataaaaagaaatgagcaaagcctccaagaaatatgggactatatgaaaagaccaaatctaggtctgattggtgtacctgaaagtgatgaggagaatggaaccaagttggaaaacactctgcaggatattatccaggagaacttccccaatctagcaaggcaggccaacgttcagattcaggaaatacagagaacgccacaaagatactcctcgagaagagcaactccaagacacataattgtcagattcaccaaagttgaaatgaaggaaaaaatgttaagggcagccagagagaaaggtcgggttaccctcaaagggaagcccatcagactaacagcggatctctcggcagaaaccctacaagccagaagagagtgggggctaatattcaacattcttaaagaaaagaattttcaacccagaatttcatatcaggccaaactgagcttcataagtgaaggagaaataaaatactttacagacaagcaaatgctgacagattttgtcaccaccaggcctgccctaaaagagctcctgaaggaagcgctaaacatggaaaggaacaaccagtaccagccactgcaaaatcatgccaaaatgtaaagaccatcgagactaggaagaaactgcatcaactaacgagcaaaatcaccagctaacatcatgatgacagaatcaaattcacacataacaatattaactttaaatgtaaatggactaaatgctccaattaaaagacacagactggcaaattggataaagagtcaagatccatcagtgtgctgtattcaggaaacccatctcacgtgcagagacacacataggctcaaaataaaaggatggaggaagatctaccaagccaatggaaaacaaaaaaggcaggggttgcaatcctagtctctgataaaacagactttaagccaacaaagatcaaaagagacaaagaaggtcattacataatggtaaagggatcaattcaacaagaagagctaactatcctaaatatatatgcacccaatacaggagcacccagattcataaagcaagtcctgagtgacctacaaagagacttagactcccacacattaataatgggagactttaacaccccactgtcaacattagacagatcaacgagacagaaagtcaacaaggatacccaggaattgaactcagctctgcaccaagcggacctaatagacatctacagaactcaccaccccaaatcaacagaatatacatttttttcagcaccacaccacacctattccaaaattgaccacatagttggaagtaaagctctcctcagcaaatgtaaaagaacagaaattataacaaactatctctcagaccacagtgcaatcaaactagaactcaggattaagaatcccactcaaaaccactcaactacatggaaactgaacaacctgctcctgaatgactactgggtacataacgaaatgaaggcagaaataaagatgttctttgaaaccaacgagaacaaagacacaacataccagaatctctgggatgcattcaaagcagtgtgtagagggaaatttatagcactaaatgcccacaagagaaagcaggaaagatccaaaattgacaccctaacatcacaattaaaagaactagaaaagcaagagcaaacacattcaaaagctagcagaaggcaagaaataacaaaaatcagagcagaactgaaggaaatagagacacaaaaaacccttcaaaagatcagtgaatccaggagctggttttttgaaaggatcaacaaaattgatagaccgctagcaagactaataaagaaaaaaagagagaagaaccaaatagacacaataaaaaatgataaaggggatatcaccaccgatcccacagaaatacaaactaccatcagagaatactacaaacacctctacgcaaataaactagaaaatctagaagaaatggataaattcctcgacacatacactctcccaagactaaaccaggaagaagttgaatctctgaatagaccaataacaggagctgaaattgtggcaataatcaatagtttaccaaccaaaaagagtcaaggaccagatggattcacagccgaattctaccagaggtacaaggaggaactggtaccattccttctgaaactattccaatcaatagaaaaagagggaatcctccctaactcattttatgaggccagcatcattctgataccaaagccgggcagagacacaaccaaaaaagagaattttagaccaatatcctcgatgaacatcgatgcaaaaatcctcaataaaatactggcaaaccgaatccagcagcacatcaaaaagcttatccaccatgatcaagtgggcttcatccctgggatgcaaggctggttcaatatacgcaaatcaataaatgtaatccagcatataaacagagccaaagacaaaaaccacatgattatcccaatagatgcaggaaaagcctttgacaaaattcaacaacccttcatgctaaaaactctcaataaattaggtattgatgggacgtatttcaaaataataagagctatctatgacaaacccacagccaatatcatactgaatgggcaaaaactggaagcattccctttgaaaactggcacaagacagggatgccctctctcaccactcctattcaacatagtgttggaagttctggccagggcaattagacaggagaaggaaataaacggtattcaattaggaacagaggaagtcaaattgtccctgtttggagacgacatgattgtatatctagaaaaccccatcgtctcagcccaaaatatccttaagctgataagcaacttcagcaaagtctcaggatacaaaatcaatgtacaaaaatcacaagcattcttatacaccaacaacagacaaacagagagccaaatcaagagtgaactcccattcacaattgcttcaaagagaataaaagacctaggaatccaacttacaagggatgtgaaggacctcttcaaggagaactacaaaccactgctcaaggaaataaaagaggatacaaacaaatggaagaacattccatgctcatgggtaggaagaatcaatatcgtgaaaatggccatactgcccaaggtaatttacagattcaatgccatccccatcaagctaccaatgcctttcttcacagaattggaaaaaactactttaaagttcatatggaaccaaaaaagagcccgcattgccaagtcaatcctaagccaaaagaacaaagctggaggaatcacactacctgacttcaaactatactacaaggctacagtaaccaaaacagcatggtactggtacctaaacagagatatagatcaatggaacagaacagagccctcagaaataacgccgcatacctacaactatctgatctttgacaaacctgagaaaaacaacaatggggaaaggattccctatttaataaatggtgctgggaaaactggctagccatatgtaggaagctgaaactggatcccttccttacaccttatacaaaaatcaattcaagatggattaaagacttaaacgttagacctaaaaccataaaaaccctagaagaaaacctaggcattaccattcaggacataggcatgggcaaggacttcatgtccaaaacaccaaaagcaacggcaacaaaagacaaaattgacaaatgggatctaattaaactaaagagcttctgcacagcaaaagaaactaccatcagagtgaacaggcaacctacaaaatgggagaaaatgttcgcaacctactcatctgacaaagggctaatatccagaatctacaatgaactcaaacaaatttacaagaaaaaaacaaacaaccccattaaaaagtgggcgaaggtcatcaacagagacttctcaaaagaagacatttatgcagccaaaaaacacatgaaaaaatgctcatcatcactggccatcagagaaatgcaaatcaaaaccactatgagataccatctcacaccagttagaatggcaatcattaaaaagtcaggaaacaacaggtgctggagaggatgtggagaaatagcaacacttttacactgttggtgggactgtaaactggttcaaccattgtggaagtcagtgtggcgattcctcagggatctagaactagaaataccatttgacccagccatcccattactgggtatatacccaaatgactataaatcatgctgctataaagacacatgcacacgtatttttattatggcattattcacaatagcaaagacttggaaccaacccaaatgtccaacaatgatagactggattaagaaaatgtggcacatatacaccatggaatactatgcagccataaaaaatgatgagttcatgtcctttgtagggacatggatgaaactggaaatcatcattctcagtaaactattgcaagaacaaaaaaccaaacaccgcatattctcactcataggtgggaattgaacaatgagatcacatggacacaggaaggggaatatgacactctggggactgtggtggggtggggggaggggggaaggatagcattgggagatatacctaatgctagatgacgagttagtgggtgcagcgcaccagcatggcacatgtatacatatgtaactaacctgcacaatgtgcacatgtaccctaaaacttaaagtataataaaaaaaagaaa

SEQ ID NO: 706 - DNA, 6022 bp, Homo sapiens
  source 1..6022: mol_type = other DNA
gagggaggagccaagatggccgaataggaacagctccggtctacagctcccagcgtgagcgacgcagaagacggtgatttctgcatttccatctgaggtaccgggttcatctcactagggagtgccagacagtgggcgcaggccagtgtgtgtgcgcaccgtgcgcgagccgaagcagggcgaggcattgcctcacctgggaagcgcaaggggtcagggagttccctttccgagtcaaagaaaggggtgacggacgcacctggaaaatcgggtcactcccacccgaatattgcgcttttcagaccggcttaagaaacggcgcaccacgagactatatcccacacctggctcggagggtcctacgcccacggaatctcgctgattgctagcacagcagtctgagatcaaactgcaaggcggcaacgaggctgggggaggggcgcccgccattgcccaggcttgcttaggtaaacaaagcagccgggaagctcgaactgggtggagcccaccacagctcaaggaggcctgcctgcctctgtaggctccacctctgggggcagggcacagacaaacaaaaagacagcagtaacctctgcagacttaagtgtccctgtctgacagctttgaagagagcagtggttctcccagcacgcagctggagatctgagaacgggcagactgcctcctcaagtgggtccctgactcctgacccccgagcagcctaactgggaggcaccccccagcaggggcacactgacacctcacacggcagggtattccaacagacctgcagctgagggtcctgtctgttagaaggaaaactaacaaccagaaaggacatctacaccgaaaacccatctgtacatcaccatcatcaaagaccaaaagtagataaaaccacaaagatgggggaaaaacagaacagaaaaactggaaactctaaaacgcagagcgcctctcctcctccaaaggaacgcagttcctcaccagcaacagaacaaagctggatggagaatgattttgacgagctgagagaagaaggcttcagacgatcaaattactctgagctacgggaggacattcaaaccaaaggcaaagaagttgaaaactttgaaaaaaatttagaagaatgtataactagaataaccaatacagagaagtgcttaaaggagctgatggagctgaaaaccaaggctcgagaactacgtgaagaatgcagaagcctcaggagccgatgcgatcaactggaagaaagggtatcagcaatggaagatgaaatgaatgaaatgaagcgagaagggaagtttagagaaaaaagaataaaaagaaatgagcaaagcctccaagaaatatgggactatgtgaaaagaccaaatctacgtctgattggtgtacctgaaagtgatgtggagaatggaaccaagttggaaaacactctgcaggatattatccaggagaacttccccaatctagcaaggcaggccaacgttcagattcaggaaatacagagaacgccacaaagatactcctcgagaagagcaactccaagacacataattgtcagattcaccaaagttgaaatgaaggaaaaaatgttaagggcagccagagagaaaggtcgggttaccctcaaaggaaagcccatcagactaacagcggatctctcggcagaaaccctacaagccagaagagagtgggggccaatattcaacattcttaaagaaaagaattttcaacccagaatttcatatccagccaaactaagcttcataagtgaaggagaaataaaatactttatagacaagcaaatgttgagagattttgtcaccaccaggcctgccctaaaagagctcctgaaggaagcgctaaacatggaaaggaacaaccggtaccagccgctgcaaaatcatgccaaaatgtaaagaccatcgagactaggaagaaactgcatcaactaatgagcaaaatcaccagctaacatcataatgacaggatcaaattcacacataacaatattaactttaaatataaatggactaaattctgcaattaaaagacacagactggcaatttggataaagagtcaagacccatcagtgtgctgtattcaggaaacccatctcacgtgcagagacacacataggctcaaaataaaaggatggaggaagatctaccaagccaatggaaaacaaaaaaaggcaggggttgcaatcctagtctctgataaaacagactttaaaccaacaaagatcaaaagagacaaagaaggccattacataatggtaaagggatcaattcaacaagaggagctaactatcctaaatatttatgcacccaatacaggagcacccagattcataaagcaagtcctcagtgacctacaaagagacttagactcccacacattaataatgggagactttaacaccccactgtcaacattagacagatcaacgagacagaaagtcaacaaggatacccaggaattgaactcagctctgcaccaagcagacctaatagacatctacagaactctccaccccaaatcaacagaatatacatttttttcagcaccacaccacacctattccaaaattgaccacatagttggaagtaaagctctcctcagcaaatgtaaaagaacagaaattataacaaactatctctcagaccacagtgcaatcaaactagaactcaggattaagaatctcactcaaagccgctcaactacatggaaactgaacaacctgctcctgaatgactactgggtacataacgaaatgaaggcagaaataaagatgttctttgaaaccaacgagaacaaagacaccacataccagaatctctgggacgcattcaaagcagtgtgtagagggaaatttatagcactaaatgcctacaagagaaagcaggaaagatccaaaattgacaccctaacatcacaattaaaagaactagaaaagcaagagcaaacacattcaaaagctagcagaaggcaagaaataactaaaatcagagcagaactgaaggaaatagagacacaaaaaacccttcaaaaaatcaatgaatccaggagctggttttttgaaaggatcaacaaaattgatagaccgctagcaagactaataaagaaaaaaagagagaagaatcaaatagacacaataaaaaatgataaaggggatatcaccaccgatcccacagaaatacaaactaccatcagagaatactacaaacacctctacgcaaataaactagaaaatctagaagaaatggatacattcctcgacacatacactctcccaagactaaaccaggaagaagttgaatctctgaatcgaccaataacaggctctgaaattgtggcaataatcaatagtttaccaaccaaaaagagtccaggaccagatggattcacagccgaattctaccagaggtacaaggaggaactggtaccattccttctgaaactattccaatcaatagaaaaagagggaatcctccctaactcattttatgaggccagcatcattctgataccaaagccgggcagagacacaaccaaaaaagagaattttagaccaatatccttgatgaacattgatgcaaaaatcctcaataaaatactggcaaaccgaatccagcagcacatcaaaaagcttatccaccatgatcaagtgggcttcatccctgggatgcaaggctggttcaatatacgcaaatcaataaatgtaatccagcatataaacagagccaaagacaaaaaccacatgattatctcaatagatgcagaaaaagcctttgacaaaattcaacaacccttcatgctaaaaactctcaataaattaggtattgatgggacgtatttcaaaataataagagctatctatgacaaacccacagccaatatcatactgaatgggcaaaaactggaagcattccctttgaaaaccggcacaagacagggatgccctctctcaccgctcctattcaacatagtgttggaagttctggccagggcaatcaggcaggagaaggaaataaagggtattcaattaggaaaagaggaagtcaaattgtccctgtttgcagacgacatgattgtttatctagaaaaccccatcgtctcagcccaaaatctccttaagctgataagcaacttcagcaaagtctcaggatacaaaatcaatgtacaaaaatcacaagcattcttatacaccaacaacagacaaacagagagccaaatcatgggtgaactcccattcacaattgcttcaaagagaataaaatacctaggaatccaacactgtgaaggacctcttcaaggagaactacaaaccactgctcaaggaaataaaagaggagacaaacaaatggaagaacattccatgctcatgggtaggaagaatcaatatcgtgaaaatggccatactgcccaaggtaatttacagattcaatgccatccccatcaagctaccaatgactttcttcacagaattggaaaaaactactttaaagttcatatggaaccaaaaaagagcccgcattgccaagtcaatcctaagccaaaagaacaaagctggaggcatcacactacctgacttcaaactatactacaaggctacagtaaccaaaacagcatggtactggtaccaaaacagagatatagatcaatggaacagaacagagccctcagaaataatgccgcatatctacaactatctgatctttgacaaacctgagaaaaacaagcaatggggaaaggattccctatttaataaatggtgctgggaaaactggctagccatatgtagaaagctgaaactggatcccttccttacaccttatacaaaaatcaattcaagatggattaaagatttaaacgttaaacctaaaaccataaaaaccctagaagaaaacctaggcattaccattcaggacataggcgtgggcaaggacttcatgtccaaaacaccaaaagcaatggcaacaaaagacaaaattgacaaatgggatctaattaaactaaagagcttctgcacagcaaaagaaactaccatcagagtgaacaggcaacctacaacatgggagaaaatttttgcaacctactcatctgacaaagggctaatatccagaatctacaatgaactcaaacaaatttacaagaaaaaaacaaacaaccccatcaaaaagtgggcgaaggacatgaacagacacttctcaaaagaagacatttatgcagccaaaaaacacatgaagaaatgctcatcatcactggccatcagagaaatgcaaatcaaaaccactatgagatatcatctcacaccagttagaatggcaatcattaaaaagtcaggaaacaacaggtgctggagaggatgcggagaaataggaacacttttacactgttggtgggactgtaaactagttcaaccattgtggaagtcagtgtggcgattcctcagggatctagaactagaaataccatttgacccagccatcccattactgggtatatacccaaatgagtataaatcatgctgctataaagacacatgcacacgtatgtttattgcggcactattcacaatagcaaagacttggaaccaacccaaatgtccaacaatgatagactggattaagaaaatgtggcatatatacaccatggaatactatgcagccataaaaaatgatgagttcatatcctttgtagggacatggatgaaattggaaaccatcattctcagtaaactatcgcaagaacaaaaaaccaaacaccgcatattctcactcataggtgggaattgaacaatgagatcacatggacacaggaaggggaatatcacactctggggactgtggtggggtcgggggagtggggagggatagcattgggagatatacctaatgctagatgacacattagtgggtgcagcgcaccagcatggcacatgtatacatatgtaactaacctgcacaatgtgcacatgtaccctaaaacttagagtataataaaaaaaaaaaa

SEQ ID NO: 707 - DNA, 6030 bp, Homo sapiens
  source 1..6030: mol_type = other DNA
gagggaggagccaagatggccgaataggaacagctccggtctacagctcccagcgtgagcgacgcagaagacggtgatttctgcatttccatctgaggtaccgggttcatctcactagggagtgccagacagtgggcgcaggccagtgtgtgtgcgcaccgtgcgcgagccgaagcagggcgaggcattgcctcacctgggaagcgcaaggggtcagggagttcccttttcgagtcaaagaaaggggtgacggacgcacctggaaaatcgggtcactcccacccgaatattgcgcttttcagaccggcttaagaaacggcgcaccacgagactatatcccacacctggctcggagggtcctacgcccacggaatctcgctgattgctagcacagcagtctgagatcaaactgcaaggcggcaacgaggctgggggaggggcgcccgccattgcccaggcttgcttaggtaaacaaagcagccgggaagctcgaactgggtggagcccaccacagctcaaggaggcctgcctgcctctgtaggctccacctctgggggcagggcacagacaaacaaaaagacagcagtaacctctgcagacttaagtgtccctgtctgacagctttgaagagagcagtggttctcccagcacgcagctggagatctgagaacgggcagactgcctcctcaagtgggtccctgactcctgacccccgagcagcctaactgggaggcaccccccagcaggggcacactgacacctcacacggcagggtattccaacagacctgcagctgagggtcctgtctgttagaaggaaaactaacaaccagaaaggacatctacaccgaaaacccatctgtacatcaccatcatcaaagaccaaaagtagataaaaccacaaagatggggaaaaaacagaacagaaaaactggaaactctaaaacgcagagcgcctctcctcctccaaaggaacgcagttcctcaccagcaacagaacaaagctggatggagaatgattttgacgagctgagagaagaaggcttcagacgatcaaattactctgagctacgggaggaaattcaaaccaaaggcaaagaagttgaaaactttgaaaaaaatttagaagaatgtataactagaataaccaatacagagaagtgcttaaaggagctgatggagctgaaaaccaaggctcgagaactacgtgaagaatgcagaagcctcaggagccgatgcgatcaactggaagaaagggtatcagcaatggaagatgaaatgaatgaaatgaagcgagaagggaagtttagagaaaaaagaataaaaagaaatgagcaaagcctccaagaaatatgggactatgtgaaaagaccaaatctacgtctgattggtgtacctgaaagtgatgtggagaatggaaccaagttggaaaacactctgcaggatattatccaggagaacttccccaatctagcaaggcaggccaacgttcagattcaggaaatacagagaacgccacaaagatactcctcgagaagagcaactccaagacacataattgtcagattcaccaaagttgaaatgaaggaaaaaatgttaagggcagccagagagaaaggtcgggttaccctcaaaggaaagcccatcagactaacagcggatctctcggcagaaaccctacaagccagaagagagtgggggccaatattcaacattcttaaagaaaagaattttcaacccagaatttcatatccagccaaactaagcttcataagtgaaggagaaataaaatactttatagacaagcaaatgttgagagattttgtcaccaccaggcctgccctaaaagagctcctgaaggaagcgctaaacatggaaaggaacaaccggtaccagccgctgcaaaatcatgccaaaatgtaaagaccatcgagactaggaagaaactgcatcaactaatgagcaaaatcaccagctaacatcataatgacaggatcaaattcacacataacaatattaactttaaatataaatggactaaattctgcaattaaaagacacagactggcaagttggataaagagtcaagacccatcagtgtgctgtattcaggaaacccatctcacgtgcagagacacacataggctcaaaataaaaggatggaggaagatctaccaagccaatggaaaacaaaaaaaggcaggggttgcaatcctagtctctgacaaaacagactttaaaccaacaaagatcaaaagagacaaagaaggccattacataatggtaaagggatcaattcaacaagaggagctaactatcctaaatatttatgcacccaatacaggagcacccagattcataaagcaagtcctcagtcacctacaaagagacttagactcccacacattaataatgggagactttaacaccccactgtcaacattagacagatcaacgagacagaaagtcaacaaggatacccaggaattgaactcagctctgcaccaagcagacctaatagacatctacagaactctccaccccaaatcaacagaatatacatttttttcagcaccacaccacacctattccaaaattgaccacatagttggaagtaaagctctcctcagcaaatgtaaaagaacagaaattataacaaactatctctcagaccacagtgcaatcaaactagaactcaggattaagaatctcactcaaagccgctcaactacatggaaactgaacaacctgctcctgaatgactactgggtacataacgaaatgaaggcagaaataaagatgttctttgaaaccaacgagaacaaagacaccacataccagaatctctgggacgcattcaaagcagtgtgtagagggaaatttatagcactaaatgcctacaagagaaagcaggaaagatccaaaattgacaccctaacatcacaattaaaagaactagaaaagcaagagcaaacacattcaaaagctagcagaaggcaagaaataactaaaatcagagcagaactgaaggaaatagagacacaaaaaacccttcaaaaaatcaatgaatccaggagctggttttttgaaaggatcaacaaaattgatagaccgctagcaagactaataaagaaaaaaagagagaagaatcaaatagacacaataaaaaatgataaaggggatatcaccaccgatcccacagaaatacaaactaccatcagagaatactacaaacacctctacgcaaataaactagaaaatctagaagaaatggatacattcctcgacacatacactctcccaagactaaaccaggaagaagttgaatctctgaatcgaccaataacaggctctgaaattgtggcaataatcaatagtttaccaaccaaaaagagtccaggaccagatggattcacagccgaattctaccagaggtacaaggaggaactggtaccattccttctgaaactattccaatcaatagaaaaagagggaatcctccctaactcattttatgaggccagcatcattctgataccaaagccgggcagagacacaaccaaaaaagagaattttagaccaatatccttgatgaacattgatgcaaaaatcctcaataaaatactggcaaaccgaatccagcagcacatcaaaaagcttatccaccatgatcaagtgggcttcatccctgggatgcaaggctggttcaatatacgcaaatcaataaatgtaatccagcatataaacagagccaaagacaaaaaccacatgattatctcaatagatgcagaaaaagcctttgacaaaattcaacaacccttcatgctaaaaactctcaataaattaggtattgatgggatgtatttcaaaataataagagctatctatgacaaacccacagccaatatcatactgaatgggcaaaaactggaagcattccctttgaaaactggcacaagacagggatgccctctctcaccgctcctattcaacatagtgttggaagttctggccagggcaatcaggcaggagaaggaaataaagggtattcaattaggaaaagaggaagtcaaattgtccctgtttgcagacgacatgattgtttatctagaaaaccccatcgtctcagcccaaaatctccttaagctgataagcaacttcagcaaagtctcaggatacaaaatcaatgtacaaaaatcacaagcattcttatacaccaacaacagacaaacagagagccaaatcatgggtgaactcccattcacaattgcttcaaagagaataaaatacctaggaatccaacttacaagggatgtgaaggacctcttcaaggagaactacaaaccactgctcaaggaaataaaagaggagacaaataaatggaagaacattccatgctcatgggtaggaagaatcaatatcgtgaaaatggccatactgcccaaggtaatttacagattcaatgccatccccatcaagctaccaatgactttcttcacagaattggaaaaaactactttaaagttcatatggaaccaaaaaagagcccgcatcgccaagtcaatcctaagccaaaagaacaaagctggaggcatcacactacctgacttcaaactatactacaaggctacagtaaccaaaacagcatggtactggtacaaaaacagagatatagatcaatggaacagaacagagccctcagaaataatgccgcatatctacaactatctgatctttgacaaacctgagaaaaacaagcaatggggaaaggattccctatttaataaatggtgctgggaaaactggctagccatatgtagaaagctgaaactggatcccttccttacaccttatacaaaaatcaattcaagatggattaaagatttaaatgttaaacctaaaaccataaaaaccctagaagaaaacctaggcattaccattcaggacataggcgtgggcaagcacttcatgtccaaaacaccaaaagcaatggcaacaaaagacaaaattgacaaatgggatctaattaaactaaagagcttctgcacagcaaaagaaactaccatcagagtgaacaggcaacctacaacatgggagaaaatttttgcaacctactcatctgacaaagggctaatatccagaatctacaatgaactcaaacaaatttacaagaaaaaaacaaacaaccccatcaaaaagtgggcgaaggacatgaacagacacttctcaaaagaagacatttatgcagccaaaaaacacatgaagaaatgctcatcatcactggccatcagagaaatgcaaatcaaaaccactatgagatatcatctcacaccggttagaatggcaatcattaagaagtcaggaaacaacaggtgctggagaggatgcggagaaataggaacacttttacactgttggtgggactgtaaactagttcaaccattgtggaagtcagtgtggcgattcctcagggatctagaactagaaataccatttgacccagccatcccattactgggtatatacccaaatgagtataaatcatgctgctataaagacacatgcacacgtatgtttattgcggcactattcacaatagcaaagacttggaaccaacccaaatgtccaacaatgatagactggattaagaaaatgtggcacatatacaccatggaatactatgcagccataaaaattgatgagttcatatcctttgtagggacatggatgaaattggaaaccatcattctcagtaaactatcgcaagaacaaaaaaccaaacaccgcatattctcactcataggtgggaattgaacaatgagatcacatggacacaggaaggggaatatcacactctggggactgtggtggggtcgggggaggggggagggatagcattgggagatatacctaatgctagatgacacattagtgggtgcagcgcacaagcatggcacatgtatacatatgtaactaacctgcacaatgtgcacatgtaccctaaaacttagagtataataaaaaaaaaaaa

SEQ ID NO: 708 - DNA, 1842 bp, Homo sapiens
  source 1..1842: mol_type = other DNA
caaaatcaatgaacacaaattagtagcactactatacaccaacaatgaccaagctgagaatcaaatcaagaactcaactccttttatgatagctgtaaaaaataaaataaaatacttaggaatatacctaaactgggaggtgtaagatctctacaaggaaaaccacaaaactctgctgaaaaaatcatagatgacacagacaaatggaaatacataccatgctggtgaatggctagaatcaatattgtgaaaatgaccatattgccaaaagcaatctacaaattcaatgtaattcccatccaaatatcatcatcgttcttcacagaactagaaaaaacaatcctaaaattcatatggaaccacaaaagagtctgtatagacaaagcaaggctaagaaaaaagaacaaatctggagggatcacattacctgacttcaaactatactgcaaagctacagttaccaaaacagtgtagtactgatataaaaacaggcacatagaccaatggaacagaatagagaacccagaaataaagccaaatatttaaagccaactgatcttcaacaaagcaaataaaagcataaagtgggggaaagaacaccctatgcaacaaatggtgctgagataattggcaaaccacatgtagaagaatgaagctggatcctcacctctcatcgtacacaaaaatcaactcgagatggatcaaaaacttaaatctaagacctgaaaccataaaaattctagaatataacattggaaaaactctcctagacattggcttaggcaaagagttcatgatcaagaatccaaaagcaaatgcaacaaaaacaaagataaatacatgggacctaattaaactaaaaagcttctgcaaagcaaaagaaataatcagtagagtaaacagatatcccacagtgtgggagaaaatattcataaactatgcatctgacaaaggactaacatccagaatctacatgaaactcgaaccagcaagaaaaaaacaaataatcccattgaaaagtgggcaaagggcatgaatagacaattctcaaaagaagataaacaaatagccaacaaacatatgaaaaaaatgttcaacatcactaattaccagggaaatgcaaattaaaaccacaatgagatacaaccttactcctgcaaaaatgatcatgattaaaaaatttaaaaataagagatgttggcatggatgtggtgaaaagggaacaactagtatactgctggtgagaatgtaaactagtacaaccgctatagaagacactatggaaattccttatagaactaaaagtagaactaccatttgatccagcaataccgctcctgtgtatctacccagagggaaaaaaaagttattatatgaaaaagccacatgtacacacctgtttatagcagcacaattcacagttgcaaaaatataaaaccagcccaaatgcccatcaaccaaagaaaacatggagcatatatatatatatataaacatggaatactactaagccataaaaaaatgaaacaatggcattcacagtaatctggatggagctggaggcggttattctaagtgaaataattcaggaatggacaaccaaacattgtatttcccacttataagcaggaactaagctacaaggatgcaaaggcagaagaatgatataatggactttggggactctgtgggatgggtgggaaggggtgagggataaaagactacacaccgggtacagtgtacactgctcaggtaataggtgcaccaaaatctcagaaatcaccactaaagaacttttctatgcaagcaaaaaccacctgttcccctaaaactactgaaata

SEQ ID NO: 709 - DNA, 6027 bp, Homo sapiens
  source 1..6027: mol_type = other DNA
gagggaggagccaagatggccgaataggaacagctccggtctacagctcccagcgtgagcgacgcagaagacgggtgatttctgcatttccatctgaggtaccgggttcatctcactagggagtgccagacagtgggcgcaggccagtgtgtgtgcgcaccgtgcgcgagccgaagcagggcgaggcattgcctcacctgggaagcgcaaggggtcagggagttccctttccgagtcaaagaaaggggtgacggacgcacctggaaaatcgggtcactcccacccgaatattgcgcttttcagactggcttaagaaatggcgcaccacgagactatatcccacacctggctcagagggtcctacgcccacgaaatctcgctgattgctagcacagcagtctgagatcaaactgcaaggcggcaacgaggctgggggaggggcgcccgccattgcccaggcttgcttaggtaaacaaagcagccagtaagctcgaactgggtggagcccaccacagctcaaggaggcctgcctgcctctgtaggctccacctctgggggcagggcacagacaaacaaaaagacagcagtaacctctgcagacttaagtgtccctgtctgacagctttgaagagagcagtggttctcccagcacgcagctggagatctgagaacgggcagactgcctcctcaagtgggtccctgacccctgacccccgagcagcctaactgggaggcaccccccagcaggggcacactgacacctcacacggcagggtattccaacagacctgcagctgagggtcctgtctgttagaaggaaaactaacaaccagaaaggacatctacaccgaaaacccatatgtacatcaccatcatcaaagaccaaaagtagataaaaccacaaagatggggaaaaaacagaacagaaaaactggaaactctaaaacgcagagcgcctctcctcctccaaaggaacgcagttcctcaccagcaacagaacaaagctggatggagaatgattttgacgagctgagagaagaagccttcagacgatcaaattactctgagctacgggaggacattcaaaccaaaggcaaagaagttgaaaactttgaaaaaaatttagaagaatgtataactagaataaccaatacagagaagtgcttaaaggagctgatggagctgaaaaccaaggctcgagaactacgtgaagaatgcagaagcctcaggagccgatgcgatcaactggaagaaagggtatcagcaatggaagatgaaatgaatgaaatgaagcgagaagggaagtttagagaaaaaagaataaaaagaaatgagcaaagcctccaagaaatatgggactatgtgaaaagaccaaatctacgtctgattggtgtacctgaaagtgatgtggagaatggaaccaagttggaaaacactctgcaggatattatccaggagaacttccccaatctagcaaggcaggccaacgttcagattcaggaaatacagagaacgccacaaagatactcctcgagaagagcaactccaagacacataattgtcagattcaccaaagttgaaatgaaggaaaaaatgttaagggcagccagagagaaaggtcgggttaccctcaaaggaaagcccatcagactaacagcggatctctcggcagaaaccctacaagccagaagagagtgggggccaatattcaacattcttaaagaaaagaattttcaacccagaatttcatatccggccaaactaagcttcataagtgaaggagaaataaaatactttatagacaagcaaatgctgagagattttgtcaccaccaggcctgccctaaaagagctcctgaaggaagcactaaacatggaaaggaacaaccggtaccacccgctgcaaaatcatgccaaaatgtaaagaccatcgagactaggaagaaactgcatcaactaatgagcaaaatcaccagctaacatcataatgacaggatcaaattcacacataacaatattaactttaaatataaatggactaaattctgcaattaaaagacacagactggcaagttggataaagagtcaagacccatcagtgtgctgtattcaggaaacccatctcacgtgcagagacacacataggctcaaaataaaaggatggaggaagatctaccaagccaatggaaaacaaaaaaaggcaggggttgcaatcctagtctctgataaaacagactttaaaccaacaaagatcaaaagagacaaagaaggccattacataatggtaaagggatcaattcaacaagaggagctaactatcctaaatatttatgcacccaatacaggagcacccagattcataaagcaagtcctgagtgacctacaaagagacttagactcccacacattaataatgggagactttaacaccccactgtcaacattagacagatcaccgagacagaaagtcaacaaggatacccaggaattgaactcagctctgcaccaagcagacctaatagacatctacagaactctccaccccaaatcaacagaatatacatttttttcagcaccacaccacacctattccaaaattgaccacatagttggaagtaaagctctcctcagcaaatgtaaaagaacagaaattataacaaactatctctcagaccacagtgcaatcaaactagaactcaggattaagaatctcactcaaagccgctcaactacatggaaactgaacaacctgctcctgaatgactactgggtacataacgaaatgaaggcagaaataaagatgttcttcgaaaccaacgagagcaaagacaccacataccagaatctctgggacgcattcaaagcagtgtgtagagggaaatttatagcactaaatgcctacaagagaaagcaggaaagatccaaaattgacaccctaacatcacaattaaatgaactagaaaagcaagagcaaacacattcaaaagctagcagaaggcaagaaataactaaaatcagagcagaactgaaggaaatagagacacaaaaaacccttcaaaaaatcaatgaatccaggagctggttttttgaaaggatcaacaaaattgatagaccgctagcaagactaataaaaaaagagagaagaatcaaatagacacaataaaaaatgataaaggggatatcaccaccgatcccacagaaatacaaactaccatcagagaatactacaaacacctctacgcaaataaactagaaaatctagaagaaatggatacattccttgacacatacactctcccaagacaaaaccaggaagaagttgaatctctgaatagaccaataacaggctctgaaattgtggcaataatcaatagtttaccaaccaaaaagagtccaggaccagatggattcacagccgaattctaccagaggtacaaggaggaactggtaccattccttctgaaactattccaatcaatagaaaaagagggaatcctccctaactcattttatgaggccagcatcattctgataccaaagccgggcagagacacaaccaaaaaagagaattttagaccaatatccttgatgaacattgatgcaaaaatcctcaataaaatactggcaaaccaaatccagcagcacatcaaaaagcttatccaccatgatcaagtgggcttcatccctgggatgcaaggctggttcaatatacgcaaatcaataaatgtaatccagcatataaacagagccaaagacaaaaaccacatgattatctcaatagatgcagaaaaagcctttgacaaaattcaacaacccttcatgctaaaaactctcaataaattaggtattgatgggacgtatttcaaaatataagagctatctatgacaaacccacagccaatatcatactgaatgggcaaaaactggaagcattccctttgaaaactggcacaagacggggatgccctctctcacggctcctattcaacatagtgttggaagttctggccagggcaatcaggcaggagaaggaaataaagggtattcaattaggaaaagaggaagtcaaattgtccctgtttgcagacgacatgattgtttatctagaaaaccccatcgtctcagcccaaaatctccttaagctgataagcaacttcagcaaagtctcaggatacaaaatcaatgtacaaaaatcacaagcattcttatacaccaacaacagacaaacagagagccaaatcataggtgaactcccattcacaattacttcaaagagaataaaatacctaggaatccaacttacaagggatgtgaaggacctcttcaaggagaactacaaaccactgctcaaggaaataaaagaggacacaaacaaatggaagaacattccatgctcatgggtaggaagaatcaatattgtgaaaatggccatactgcccaaggtaatttacagattcaatgccatccccatcaagctaccaatgactttcttcacagaattgtaaaaaactactttcaagttcatatggaatcaaaaaagagcccacattgccaagtcaatcctaagccaaaagaacaaagctggaggcatcacactacctgacttcaaactatgctacaaggctacagtaaccaaaacagcatggtactggtaccaaaacagagatatagatcaatggaacagaacagagccctcagaaataatgccgcatatctacaactatctgatctttgacaaacctgagaaaaacaagcaatggggaaaggattccctatttaataaatggtgctgggaaaactggctagccatatgtagaaagctgaaactggatcccttccttacaccttatacaaaaatcaattcaagatggattaaagatttaaacgttaaacctaaaaccataaaaaccctagaagaaaacctaggcattaccattcaggacataggcgtgggcaaggacttcatgtccaaaacaccaaaagcaatggcaacaaaagacaaaattgacaaatgggatctaattaaactaaagagcttctgcacagcaaaagaaactaccatcagagtgaacaggcaacctacaacatgggagaaaattttcgcaacctactcatctgacaaagggctaatatccagaatctacaatgaactcaaacaaatttacaagaaaaaaacaaacaaccccatcaaaaagtgggcgaaggacatgaacagacacttctcaaaagaagacatttatgcagccaaaaaacacatgaaaaaatgctcatcatcactggccatcagagaaatgcaaatcaaaaccactatgagatatcatctcacaccagttagaatggcaatcattaaaaagtcaggaaacaacaggtgctggagaggatgtggagaaataggaacacttttacactgttggtgggactgtaaactagttcaaccattgtggaagtcagtgtggcgattcctcagggatctagaactagaaataccatttgacccagccatcccattactgggtatatacccaaatgagtataaatcatgctgctataaagacacatgcacacgtatgtttattgcggcactattcacaatagcaaagtcttggaaccaacccagatgtccaacaatgatagactggattaagaaaatgtggcacatatacaccatggaatactgtgcagccataaaaaatgatgagttcatatcctttgtagggacatggatgaaattggaaaccatcattctcagtaaactatcgcaagaacaaaaaaaccaaacaccgcatattctcactcataggtgggaattgaacaatgagatcacatggacacaggaaggggaatatcacactctggggactgtggtggggtcgggggaggggggagggatagcattgggagatatacctaatgctagacgacacattagtgggtgcagcgcaccagcatggcacatgtatacatatgtaactaacctgcacaatgtgcacatgtaccctaaaacttagagtataataaaaaaaaaaaa

SEQ ID NO: 710 - DNA, 6028 bp, Homo sapiens
  source 1..6028: mol_type = other DNA
gggaggagccaagatggccgaataggaacagctccagtctacagctcccagcgtgagcgacgcagaagacggtgatttctgcatttccatctgaggtaccgggttcatctcactagggagtgccagacagtgggcgcaggccagtgtgtgtgcgcaccatgcgcgagccgaagcagggcgaggcattgcctcacctgggaagcgcaaggggtcagggagttccctttccgagtcaaagaaaggggtgacggacgcacctggaaaatcgggtcactcccacccgaatattgcgcttttcagaccggcttaagaaacggcgcaccacgagactatatcccacacctggctcggagggtcctacgcccacggaatctcgctgattgctagcacagcagtctgagatcaaactgcaaggcggcaacgaggctgggggaggggcgcccgccattgcccaggcttgcttaggtaaacaaagcagccgggaagctcgaactgggtggagcccaccacagctcaaggaggcctgcctgcctctgtaggctccacctctgggggcagggcacagacaaacaaaaagacagcagtaacctctgcagacttaagtgtccctgtctgacagctttgaagagagcagtggttctcccagcacgcagctggagatctgagaacgggcagactgcctcctcaagtgggtccctgactcctgacccccgagcagcctaactgggaggcaccccccagcaggggcacactgacacctcacacggcagggtattccaacagacctgcagctgagggtcctgtctgttagaaggaaaactaacaaccagaaaggacatctacaccgaaaacccatctgtacatcaccatcatcaaagaccaaaagtagataaaaccacaaagatggggaaaaaacagaacagaaaaactggaaactctaaaacgcagagcgcctctcctcctccaaaggaacgcagttcctcaccagcaacagaacaaagctggatggagaatgattttgatgagctgagagaagaaggcttcagacgatcaaattactctgagctacgggaggacattcaaaccaaaggcaaagaagttgaaaactttgaaaaaaatttagaagaatgtataactagaataaccaatacagagaagtgcttaaaggagctgatggagctgaaaaccaaggctcgagaactacgtgaagaatgcagaagcctcaggagccgatgcgatcaactggaagaaagggtatcagcaatggaagatgaaatgaatgaaatgaagcgagaagggaagtttagagaaaaaagaataaaaagaaatgagcaaagcctccaagaaatatgggactatgtgaaaagaccaaatctacgtctgattggtgtacctgaaagtgatgtggagaatggaaccaagttggaaaacactctgcaggatattatccaggagaacttccccaatctagcaaggcaggccaacgttcagattcaggaaatacagagaacgccacaaagatactcctcgagaagagcaactccaagacacataattgtcagattcaccaaagttgaaatgaaggaaaaaatgttaagggcagccagagagaaaggtcgggttaccctcaaaggaaagcccatcagactaacagcggatctctcggcagaaaccctacaagccagaagagagtgggggccaatattcaacattcttaaagaaaagaattttcaacccagaatttcatatccagccaaactaagcttcataagtgaaggagaaataaaatactttatagacaagcaaatgttgagagattttgtcaccaccaggcctgccctaaaagagctcctgaaggaagcgctaaacatggaaaggaacaaccggtaccagccgctgcaaaatcatgccaaaatgtaaagaccatcgagactaggaagaaactgcatcaactaatgagcaaaatcaccagctaacatcataatgacaggatcaaattcacacataacaatattaactttaaatataaatggactaaattctgcaattaaaagacacagactggcaagttggataaagagtcaagacccatcagtgtgctgtattcaggaaacccatctcacgtgcagagacacacataggctcaaaataaaaggatggaggaagatctaccaagccaatggaaaacaaaaaaaggcaggggttgcaatcctagtctctgataaaacagactttaaaccaacaaagatcaaaagagacaaagaaggccattacataatggtaaagggatcaattcaacaagaggagctaactatcctaaatatttatgcacccaatacaggagcacccagattcataaagcaagtcctcagtgacctacaaagagacttagactcccacacattaataatgggagactttaacaccccactgtcaacattagacagatcaacgagacagaaagtcaacaaggatacccaggaattgaactcagctctgcaccaagcagacctaatagacatctacagaactctccaccccaaatcaacagaatatacatttttttcagcaccacaccacacctattccaaaattgaccacatagttggaagtaaagctctcctcagcaaatgtaaaagaacagaaattataacaaactatctctcagaccacagtgcaatcaaactagaactcaggattaagaatctcactcaaagccgctcaactacatggaaactgaacaacctgctcctgaatgactactgggtacataacgaaatgaaggcagaaataaagatgttctttgaaaccaacgagaacaaagacaccacataccagaatctctgggacgcattcaaagcagtgtgtagagggaaatttatagcactaaatgcctacaagagaaagcaggaaagatccaaaattgacaccctaacatcacaattaaaagaactagaaaagcaagagcaaacacattcaaaagctagcagaaggcaagaaataactaaaatcagagcagaactgaaggaaatagagacacaaaaaacccttcaaaaaatcaatgaatccaggagctggttttttgaaaggatcaacaaaattgatagaccgctagcaagactaataaagaaaaaaagagagaagaatcaaatagacacaataaaaaatgataaaggggatatcaccaccgatcccacagaaatacaaactaccatcagagaatactacaaacacctctacgcaaataaactagaaaatctagaagaaatggatacattcctcgacacatacactctcccaagactaaaccaggaagaagttgaatctctgaatcgaccaataacaggctctgaaattgtggcagtaatcaatagtttaccaaccaaaaagagtccaggaccagatggattcacagccgaattctaccagaggtacaaggaggaactggtaccattccttctgaaactattccaatcaatagaaaaagagggaatcctccctaactcattttatgaggccagcatcattctgataccaaagccgggcagagacacaaccaaaaaagagaattttagaccaatatccttcatgaacattgatgcaaaaatcctcaataaaatactggcaaaccgaatccagcagcacatcaaaaagcttatccaccatgatcaagtgggcttcatccctgggatgcaaggctggttcaatatacgcaaatcaataaatgtaatccagcatataaacagagccaaagacaaaaaccacatgattatctcaatagatgcagaaaaagccttggacaaaattcaacaacccttcatgctaaaaactctcaataaattaggtattgatgggacgtatttcaaaataataagagctatctatgacaaacccacagccaatatcatactgaatgggcaaaaactggaagcattccctttgaaaaccggcacaagacagggatgccctctctcaccgctcctattcaacatagtgttggaagttctggccagggcaatcaggcaggagaaggaaataaagggtattcaattaggaaaagaggaagtcaaattgtccctgtttgcagacgacatgattgtttatctagaaaaccccatcgtctcagcccaaaatctccttaagctgataagcaacttcagcaaagtctcaggatacaaaatcaatgtacaaaaatcacaagcattcttatacaccaacaacagacaaacagagagccaaatcatgggtgaactcccattcacaattgcttcaaagagaataaaatacctaggaatccaacttacaagggatgtgaaggacctcttcaaggagaactacaaaccactgctcaaggaaataaaagaggagacaaacaaatggaagaacattccatgctcatgggtaggaagaatcaatatcgtgaaaatggccatactgcccaaggtaatttacagattcaatgccatccccatcaagctaccaatgactttcttcacagaattggaaaaaactactttaaagttcatatggaaccaaaaaagagcccgcattgccaagtcaatcctaagccaaaagaacaaagctggaggcatcacactacctgacttcaaactatactacaaggctacagtaaccaaaacagcatggtactggtaccaaaacagagatatagatcaatggaacagaacagagccctcagaaataatgccgcatatctacaactatctgatctttgacaaacctgagaaaaacaagcaatggggaaaggattccctatttaataaatggtgctgggaaaactggctagccatatgtagaaagctgaaactggatcccttccttacaccttatacaaaaatcaattcaagatggattaaagatttaaacgttaaacctaaaaccataaaacccctagaagaaaacctaggcattaccattcaggacataggcgtgggcaaggacttcatgtccaaaacaccaaaagcaatggcaacaaaagacaaaattgacaaatgggatctaattaaactaaagagcttctgcacagcaaaagaaactaccatcagagtgaacaggcaacctacaacatgggagaaaatttttgcaacctactcatctgacaaagggctaatatccagaatctacaatgaactcaaacaaatttacaagaaaaaaacaaacaaccccatcaaaaagtgggcgaaggacatgaacagacacttctcaaaagaagacatttatgcagccaaaaaacacatgaagaaatgctcatcatcactggccatcagagaaatgcaaatcaaaaccactatgagatatcatctcacaccagttagaatggcaatcattaaaaagtcaggaaacaacaggtgctggagaggatgcggagaaataggaacacttttacactgttggtgggactgtaaactagttcaaccattgtggaagtcagtgtggcgattcctcagggatctagaactagaaataccatttgacccagccatcccattactgggtatatacccaaatgagtataaatcatgctgctataaagacacatgcacacgtatgtttattgcggcactattcacaatagcaaagacttggaaccaacccaaatgtccaacaatgatagactggattaagaaaatgtggcacatatacaccatggaatactatgcagccataaaaaatgatgagttcatatcctttgtagggacatggatgaaattggaaaccatcattctgagtaaactatcgcaagaacaaaaaaccaaacaccgcatattctcactcataggtgggaattgaacaatgagatcacatggacacaggaaggggaatatcacactctggggactgtggtggggtcgggggaggggggagggatagcattgggagatatacctaatgctagatgacacattagtgggtgcagcgcaccagcatggcacatgtatacatatgtaactaacctgcacaatgtgcacatgtaccctaaaacttagagtataataaaaaaaaaaaa

SEQ ID NO: 711 - DNA, 740 bp, Homo sapiens
  source 1..740: mol_type = other DNA
ccccacccggccagccgccccgtccgggaggtgaggggcgcctctgcccggccgcccctactgggaagtgaggagcccctctgcccggccagccgccccgtccgggagggaggtgggggtgtcagccccccgcctggccagccgccccgtccgggagggaggtggggggagtcagcccccccgcccggccagccgccccgtccgggaggtgaggggcgcctctgcccggccgcccctactgggaagtgaggagcccctctgcccggccagccgccccgtccgggagggaggttggggggtcagccccccgcccggccagccgccccgtccgggagggaggtggggggggggtcagcccccctgcccggccagccgccccgtccgggaggtgaggggcgcctctgcccggccacccctactgggaggtgaggagcccctctgcccggccaccaccccgtctgggaggtgtgcccaacagctcattgagaacgggccaggatgacaatggcggctttgtggaatagaaaggcgggaaaggtggggaaaagattgagaaatcggatggttgccgtgtctgtgtagaaagaagtagacatgggagacttttcattttgttctgcactaagaaaaattcctctctcttgggatcctgttgatctgtgaccttacccccaaccctgtgctctctgaaacatgtgctgtgtccactcaggattaaatggattaagggcggtgcaaaa

SEQ ID NO: 712 - DNA, 309 bp, Homo sapiens
  source 1..309: mol_type = other DNA
ggccaggcgcagtggctcatgcctgtaatcccaaaactttgggaggccaaggcaggcagatcacctgaggtcaggagatcgagaccagcctggccaacatggtgaaatcccatctctactaaaaatacaaaaattagccggacgcggtggggcgtgcctgtaatcccagctacccgggaggctgagacatgagaattgcttgaacctaggaggtggaggttgcaggagccaagattgcgccactgcactctagcctgggcgacaggaagactcttatctcaaaaaaaaaaaaaaaaaaaagaagaaaaa

SEQ ID NO: 713 - DNA, 451 bp, Homo sapiens
  source 1..451: mol_type = other DNA
tgatataaagattattctaaagacatttgaaattcaacagatgcagaaaaaagccttctcagaacttaccttatctcactaaatgcagaaactactgggagtgaggctgccataaatctcttctggagaattttactggccataaagaagacagagaagaccgcttgcacctgcataaacaaacattatcacaaaccttcttctttttcatttcttcccctaaatactcatttgttcttccctacatagagggctttactccccccttcttctcccccattaagtaacctctcccctattaggtatataaacccccatctttagttgtttagagtcacatttttctgtgtgctcctgcgtgaataaaaatctatgttttgtctaagtttaattcccaggccctcaagaactgaacctaagagggtagaggaaaagattttcctctccaaca

SEQ ID NO: 714 - DNA, 315 bp, Homo sapiens
  source 1..315: mol_type = other DNA
ggctgggcacagtggcttatgcccataataatcccagcactttgggaggccgaggtgagcagatcacctgaggttaggagtttgagaccagcctggccaacacgatgaaaccccgtctctactaaaaatacaaacaaaattagctgggcatggtggcggacatctgtaatcccagctactcaggaggctgaagcagaagaactgcttgaacctgggaggtggaggttgcagtgagccaagatcgcaccattgcactccatcctgggcgacaaaaatgaaacaccgtctcaaaaaaaataaaaataataaaataaa

SEQ ID NO: 715 - DNA, 1270 bp, Homo sapiens
  source 1..1270: mol_type = other DNA
gaggggcgcctctgcccggccgcccctactgggaagtgaggagcccctctgcccggccagccgccccgtccgggagggaggtgggggggtcagccccccgcccggccagccgccccatccgggagggaggtgggggggtcagccccccgcccggccagccgccccgtccgggagggaggtggggggggtcagccccccgcccggccagccgccccgtccgggagggaggtggggggatcagccccccgcctggccagccgccccgtccgggaggtgaggggcgcctctgcccggctgcccctactgggaagtgaggagcccctctgcccggccagccgccccgtccgggagggaggcgcgggggggggtcggccagccgccctgtccgggagggaggtgggggggtcagccccccgcccggctggctgccccgtccgggaggtgaggggcgcctctgcccagccgcccctactgggaagtgaggagcccctctgcctggcgagccgccccgtccgggagggtggtgggggggtcagccccccgcccggccagccgccctatccaggaggtgaggggcgcctctgcccggccgcccctactgggaagtgaggagcccctctgcctggccagccgccccgtccgggagggtggggggggggtcagccccccgcccggccagccgccccatccgggaggtgaggggcgcttctgcccggccgcccctactgggaagtgaggagcccctctgcccggccacgaccccgtctgggaggtgtgcccagcggctcattggggatgggccatgatgacaatggcggttttgtggaatagaaaggcgggaagggtgggggaaaaattgagaaatcggatggttgccaggtctgtgtggatagaagtagacatgggagacttttcattttgttctgtactaagaaaaattcttctgccttgggatcctgttgatctgtgaccttatccccaaccctgtgctctctgaaacatgtgctgtgtccactcagggttaaatggattaagggcggtgcaagatgtgctttgttaaacagatgcttgaaggcagcatgctcgttaagagtcatcaccactccctaatcttaagtacccagggacacaaacacttcggaaggccgcagggacctctgcctaggaaaaccagagacctttgttcacttgtttatctgctgaccttccctccactattgtcctatgaccctgccaaatccccctctgcgagaaacacccaagaatgatc

SEQ ID NO: 716 - DNA, 980 bp, Homo sapiens
  source 1..980: mol_type = other DNA
gattaatctaacaacatggcctctcagtccctaagtctttacctctactcctgtttttcagtcattaatgccctggctacatattgtactttttccccaccaagaaactgttctatgatataataatttcagctatctccctctgagtgcacaattgtctatgcctataaccttctcattctgctgtttctatcacatcttgtctttgaccttatcagagctccattccatggtgctgttactacctatcaaacgctcctgttttaatttccttcctattcagctgatttcctggtttaccactcccagttgctctcatgcccatattctcaattcccttgttcaattttccttcactaaaaccacctgatgaaactccagcccagatgaatatagtcctcctcctctcttacacatggggtgctgcactctataagaccaaacttacaaaattagcaataccactgccactataaatgtataatattcaaacctaattgggcttctgagaccaagaactccttttataatttttctaacgagctttctcttctacgctccacaacaactattttaaacctacgtatcttactttaaacttcttaccctaccacttagatacccccttttatccgatgaacttgcctgataccttattgagaaaatagaatccatcagctagaaattcattttcctgtcccctactccacagctttaacagcatctgtatctatacttttcacctgctgaggtccgtcccactggtctaaatccaaacacttcatacattgcctggatcccatctttaacaacctttctaggggacttgcattatcccttctgtatcttaattttctccttccctactgaacattacacattggcattttaaatatattcaagtttctctagtctttaaaatactctctgagtctgaattcttctccagataccaatgtatttcttattccttttacagc

SEQ ID NO: 717 - DNA, 286 bp, Homo sapiens
  source 1..286: mol_type = other DNA
tttgggaggctgaggtgggtggatcataagatcaggagtttgagaccagcctggccaatatggtgaaaccccgtctctactaaaaatgcaaacattagctgggcatggtggcgcatacctgtagtcccagctactctagaggctgaggcggaagcatcagtgagggagaatcagtgaacccaggatgtggaagtttcagtgagcccagatcacaccactgcactccagcctgggcgacagagcgagactccacctcaaaaacaaaaagaaagaaagaaaaaagaaa

SEQ ID NO: 718 - DNA, 1071 bp, Homo sapiens
  source 1..1071: mol_type = other DNA
ttcagcaattccaccttctttcttcttcatcgttatttttttcctggcagttggaactttcccaccagcatataaacatgctgttatttctatgacactgtgaaagtactctcttgatcccactttccttaccatctttcacctcatttctttgctactcttcaaggagttgtacatagtcaccatctccaattcctctcctcccattctctctgaaacctactccgatcaagttttatggccaccatcccatagaaactatacattactcaaagttaaaaatgagctccacagtactaagcttaaagttttactctaaacttttagcttgcctatgagcagtatttgacatggttggtcacttgtctgaacttcacttggtttccaggacattacgtttctttgattttcttattatctcactggtcattctctttgtttttttccctggattttcttcttctgtccccaactttttcaatgttggagtgccctactgttcagctcttggtcctcttcatttattttaatgcactcactccccaagacctcatctggtcttgttgctttaaacactatctgaatgctaataactcccaaatttatatcaccagctcaatcccctctcctgaactccaaattcttatttccagttatctcctcaacatctgtacttataaacctctcacatttcacatgcataaaactgaacatctggtcctcaaaaagcctgctttactcacaatattctcagtgatggcaactctaacatgccagttgctgagaccaaaaactttgggatcatccttgattcttgtattttttcaaaccctataatcaatccatcagcaaatcctcacaggtcaactttcaatatcatccagaaaatagccagttctcttcacctccacagcctacaccatggtttatctccccttgattatctcaatacacttcccaattctacctcagccctctacagtctgttatcaacactgtagccaaattgagtcttgtaaaagcagtcacttgtctacttagtatccttccaacagctatccctttcacttt

SEQ ID NO: 719 - DNA, 535 bp, Homo sapiens
  source 1..535: mol_type = other DNA
ttctccatgtagcagtcagaataatttttaaaaatatgattatcttaccaccccacactctaaaacacaaacactcacatttaaaacctctctatggtttccatggcaagcggggcctgcatattctgagccccgcccgactctcctgcctgaggtcaaacatactccatcttgcctggtccccagacacacaggccttctttggttcctcaaaattctcccttccaccatagacttttgggctgcttttcttttccttctgccccattgccttgttaattccaaccttcaactctcagctcaagctcagaagccatcctgatgctcagctgatcacagcttttaaagaactgggtttcttacttcaaagcacttaccctaatttgtcattatgagcaaaccaatgtgactgttttgttagtctctgtctccctgctgtactggaagcaggacccacatgtaactgttgtacctccagaaccagaacaataccaggcacattataggtgcttagtaaatttttgttgaatgaaag

SEQ ID NO: 720 - DNA, 6026 bp, Homo sapiens
  source 1..6026: mol_type = other DNA
ggaggagccaagatggccgaataggaacggctccggtctacagctcccagcatgagcgacgcagaagacggtgatttctgcatttccatctgaggtaccgggttcatctcactagggagtgccagacagcaggcgcaggtcagtgggtgcgcgcaccgtgcgcgagccgaagcagggagaggcattgcctcacttgggaagcgcaaggggtcagggagttccctttccgagtcaaagaaaggggtgactgacggcacctggaaaatcgggtcactcccacccgaatactgcgcttttccgacgggcttaaaaaacggcgcaccacgagattataccccgcacctggctcggagggtcctacgcccacggagtctcgctgattgctagcacagcagtctgagatcaaactgcaaggtggcagcgaggctgggggaggggcgcccgccattgcccaggcttgctgaggtaaacaaagcagcctcgaagctccaactgggcggagcccaccacagctcaaggaggcttgcctgcctctgtaggctccacctctgggggcagggcacagacaaacaaaaagacagcagtaacctctgcagacttaaatgtccctgtctgacagctttgaagagagcagtggttctcccagcacgcagctggagatctgagaacgggcagactgcctcctcaagtgggtccctgactcctgacccccgagcagcctaactgggaggcaccccccagcaggggcacactgacacctcacatggcagggtactccaacagacctgcagctgagggtcctgtctgttacaaggaaaactaacaaacagaaaggacatccacaccaaaaacccatctgtacatcaccatcatcaaagaccaaaagtagataaaaccacaaggatggggaaaaaacagaacagaaaaactggaaactctaaaaagcagagcgcctctcctcctccaaaggaatgcagttcctcaccagcaatggaacaaagctggacggagaatgactttgacgagctgagagaagaaggcttcagatgatcaaattactctgagctacgggaggacattcaaaccaaaggcaaagaagttgaaaactttgaaaaaaatttagaagaatgtataactagaataaccaatacagagaagtgcttaaaggagctgatggagctgaaaaccaaggctcgagaactacgtgaagaatgcagaagcctcaggagccaatgccatcaactggaagaaaggatatcagcgatggaagatgaaatgaatgaaatgaagtgagaagggaagtttagagaaaaaagaataaaaagaaatgagcaaagcctccaagaaatatgggactatgtgaaaagaccaaatctacgtctgattggtgtacctgaaagtgatggggagaatggaaccaagttggaaaacactctgcaggatattatccaggagaacttccccaatctagcaaggcaggccaacgttcagattcaggaaatacagagaacgccacaaagatactcctcgagaagagcaactccaagacacataattttcagattcaccaaagttgaaatgaaggaaaaaatgttaagggcagccagagagaaaggtcgggttaccctcaaagggaagcccatcagactaacagcagatttatcggcagaaaccctacaagccagaagagagtgggggccaatattcaacattcttaaagacaagaattttcaacccagaatttcatatccagccaaactaagcttcataagcaaaggagaaataaaatactttacagacaagcaaatgctgagagagtttgtcaccaccaggcctgccctaaaagagctcctgaaggaagcgctaaacatggaaaggaacaaccggtaccagccgctgcaaaatcatgccaaaatgtaaagaccatcaagactcagaagaaactgcatcaactaatgagcaaaatcaccagctaacatcatcatgacaggatcaaattcacacataacaatattaactttaaatgtaaatggactaaatgctccaattaaaagacacagactggcaaattggataaagagtcaagacccatcagtgtgctgtgttcaggaaacccatctcacatgcagagacacacataggctcaaaataaaaggatggaggaagatctaccaagcaaatggaaaacaaaaaaaggcaggggttgcaatcctagtctctgataaaacagactttaaaccaacaaagatcaaaagagacaaagacagccattacataatggtaaagggatcaattcaacaagaagagctaactatcctgaatatatatgcacccaacacaggagcaccaagattcataaagcaagtcctgagtgacctacaaagagacttagactcccacacattaataatgggagactttaacaccccactgtcaacattagacagatcaacgagacagaaagtcaacaaggatacccaggaattgaactcagctctgcaccaagcagacctaatagacatctacagaactctccaccccaaatcaacagaatatacatttttttcagcaccacaccacacctattccaaaattgaccacatagttggaagtaaagctctcctcagcaaatgtaaaagaacacaaattataacaaactatatctcagaccacagtgcaatcaaactagaactcaggattaagaatctcactcaaaaccactcaactacatggaaactgaacaacctgctcctgaatgactactgggtacataacgaaatgaaggcagaaataaagatgttctttgaaaccaatgagaacaaagacacaacataccagaatctctgggacacattcaaagcagtgtgtagagggaaatttatagcactaaatgcccacaagagaaagcaggaaagatccaaaattgacaccctaacatcacaattaaaagaactagaaaagcaagagcaaacacattcaaaagctagcagaaggcaagaaataactaaaatcagagcagaactgaaggaaatagagacacaaaaaacccttcaaaaaataaatgaatccaggagctggttttatgaaaggatcaacaaaattgatagactgctagcaagactaataaagaaaaaaagagagaagaatctaatagacgcaataaaaaatgctaaaggggatatcacgaccgatcccacagaaatacaaactaccatcagagaatactacaaacacctctatgcaaataaactagaaaatctagaagaaatggataaattcctcgacacatacactctcccaagactaaaccaggaagaagttgaatctctgaatagaccaataacaggatctgaaattgtggcaataatcaatagcttaccaaccaaaaagagtccaggagcagatggattcacagctgaattctaccagaggtacaaggaggaactggtaccattccttctgaaactattctaatcaatagaaaaagagggaatcctccctaactcattttgtgaggccagcatcattctgataccaaagccaggcagagacacaaccaaaaaagagaattttagaccaatatccttgatgaacattgatgcaaaaatcctcaataaaatactgacaaaccgaatccagcagcacatcaaaaagcttatccaccatgatcaagtgggcttcatccctgggatgcaaggctggttcaatatatgcaaatcaataaatgtaatctagcatataaacagagccaaagacaaaaaccacatgattatctcaatagatgcagaaaaggcctttgacaaaattcaacaacccttcatgctaaaaactctcaataaattaggtattgatgggacgtatttcaaaataataagagctatctatgacaaacccacagccaatatcatactgaatgggcaaaaactggaagcattccctttgaaaactggcacaagacagggatgccctctctcaccactcctattcaacatagtgttggaagttctggccagggcaattaggcaggagaaggaaataaagggtattcaattaggaaaagaggaagtcaaattgtccctgtttgcagacgacatgattgtatatctagaaaaccccattgtctcagcccaaaatctccttaagctgatcagcaacttcagcaaagtctcaggatacaaaatcaatgtacaaaaatcacaagcattcttatacaacagcaacagacaaacagagagccaaatcatgagtgaactcccattcacaattgcttcaaagagaataaaatacctaggaatccaacttacaagggatgtgaaggacctcttcaaggagaactacaaaccactgctcaatgaaataaaagaggatacaaacaaatggaagaacattccatgctcatgggtaggaagaatcaatatcgtgaaaatggccatactgcccaaggtaatttacagattcaatgccatccccatcaagctaccaatgcctttcttcacagaattggaaaaaactactttaaagttcatctggaaccaaaaaagagcccgcattgccaagtcaatcctaagccaaaagaacaaagctggaggcatcacactacctgacttcaaactatactacaaggctacagtaaccaaaacagcatggtactggtaccaaaacagagatatagatcaatggaacagaacagagccctcagaaataacgccgcatatctacaactatctgatctttgacaaacctgagaaaaacaagcaatggggaaaggattccctatttaataaatggtgctgggaaaactggctagccatatgtagaaagctgaaactggatcccttccttacaccttatacaaaaatcaattcaagatggattaaagacttaaacgttagacctaaaaccataaaaaccctagaaggaaacctaggcattaccattcaggacataggcatgggcaaggacttcatgtctaaaacaccaaaagcaatggcaacaaaagccaaaattgacaaatgggatctaattaaactaaagagcttctgcacagcaaaagaaactaccatcagagtgaacaggcaacctacaaaatgggagaaaattttcccaacctactcatctgacaaagggctaatatccagaatctacaatgaactccaacaaatttacaagaaaaaaacaaacaaccccatcaaaaagtgggcgaaggacatgaacagacacttctcaaaagaagacatttatgcagccaaaaaacacatgaaaaaatgctcatcatcgctggccatcagagaaatgcaaatcaaaaccgcaatgagataccatctcacaccagttagaatggcaatcattaaaaagtcaggaaacagcaggtgctggagaggatgtggagaaataggaacacttttacactgttggtgggactgtaaactagttcaaccattgtggaagtcagtgtggcaattcctcagggatctagaactagaaataccatttgacccagccatcccattactgggtatatacccaaaggactataaatcatgctgctataaagacacatgcacacgtatgtttattgcggcattattcacaatagcaaagacttggaaccaacccaaatgtccaacaatgatagactggattaagaaaatgtggcacatatacaccatggaatactatgcagccataaaaaatgatgagttcatgtcctttgtagggacatggatgaaattggaaaacatcattctcagtaaactatcacaagaacaaaaaaccaaacactgcatattctcactcatacgtgggaattgaacaatgagatcacatggacacaggaaggggaatatcacactctggggactgttgtggggtggggggaggggggagggatagcattgggagatatacctaatgctagatgacgagttagtgggtgcagtgcaccagcatggcacatgtatacatatgtaactaacctgcacattgtgcacatgtaccctaaaacttaaagtataattaaaaaaaaa

SEQ ID NO: 721 - DNA, 381 bp, Homo sapiens
  source 1..381: mol_type = other DNA
atatggttggggtctgtgtccccaccaaaatctcatgttgaattgtaattctcagtgttggaggaggggcatggtgggaggtgattggatcatgggggcagacttcctgctttctgttcttacgaaagtgagtgggttcttatgcgatttgattcttttaaagcatgtatcacttcctcctttgcttgctctctcctgcaggccatgtgaagatgtgcttgcttccttgtcaccttccgccatgattgtaagtttcctgaggcctcccaggaagcagaagcctgtacagcccacagaaccatgacctgatgaaatctcttttctttataaattacccagtctcaggtatgtctttatggctgtgtgagaatggactaatac

SEQ ID NO: 722 - DNA, 6000 bp, Homo sapiens
  source 1..6000: mol_type = other DNA
gctccggtctacagctcccagcgtgagcgacgcagaagacgggtgatttctgcatttccatctgaggtaccaggttcatctcactagggagtgccagacagtgggcgcaggccagtgtgtgcgcgcaccgtgcgcgagccgaagcagggcgaggcattgcctcacctgggaagcgcaaggggtcagggagttccctttccgagtcaaagaaaggggtgacggacgcacctggaaaatcgggtcactcccacccgaatattgcgcttttcagaccggcttaagaaacggcgcaccacgagactatatcccacacctggctcagagggtcctacgcccacggaatctcgctgattgctagcacagcagtctgagatcaaactgccaggcggcaacgaggctgggggaggggcgcccgccatagcccaggcttgcttaggtaaacaaagcagccgggaagctcgaactgggtggagcccaccacagctcaaggaggcctgcctgcctctgtaggctccacctctgggggcagggcacagacaaacaaaaagacagcagtaacctctgcagacttaaatgtccctgtctgacagctttgaagagagcagtggttctcccagcacgcagctggagatctgagaacgggcagactgcctcctcaagtgggtccctgacccctgacccccgagcagcctaattgggaggcaccccccagcaggggcacactgacacctcacacggcagggtattccaacagacctccagctgagggtcctgtctgttagaaggaaaactaacaaccagaaaggacatctacaccgaaaacccatctgtacatcaccatcatcaaagaccaaaagtagataaaaccacaaagatggggaaaaaacagaacagaaaaactggaaactctaaaacgcagagtgcctctcctcctccaaaggaatgcagttcctcaccagcaacagaacaaagctggatggagaatgattttgacgagctgagagaagaaggcttcagacgatcaaattactctgagctacgggaggacattcaaaccaaaggcaaagaagttgaaaactttgaaaaaaatttagaagaatgtataactagaataaccaatacagagaagtgcttaaaggagctgatggagctgaaaaccaaggctcgagaactacgtgaagaatgcagaagcctcaggagccgatgcgatcaactggaagaaagggtatcagcaatggaagatgaaatgaatgaaatgaagcgagaagggaagtttagagaaaaaagaataaaaagaaatgagcaaagcctccaagaaatatgggactatgtgaaaagaccaaatctacgtctgattggtgtacctgaaagtgatggggagaatggaaccaagttggaaaacactctgcaggatattatccaggagaacttccccaatctagcaaggcaggccaacgttcagattcaggaaatacagagaacgccacaaagatactcctcgagaagagcaactccaagacacataattgtcagattcaccaaagttgaaatgaaggaaaaaatgttaagggcagccagagagaaaggtcgggttaccctcaaaggaaagcccatcagactaacagcggatctctcggcagaaaccctacaagccagaagagagtgggggccaatattcaacattcttaaagaaaagaattttcaacccagaatttcatatccagccaaactaagcttcataagtgaaggagaaataaaatactttacagacaagcaaatgatgagagattttgtcaccaccaggcctgccctaaaagagctcctgaaggaagcgctaaacatggaaaggaacaaccggtaccagccactgcaaaatcatgccaaaatgtaaagaccatcgagactaggaagaaactgcatcaactaatgagcaaaatcaccagctaacatcataatgacaggatcaaattcacacataacaatattaactttaaatataaatggactaaattctgcaattaaaagacacagactggcaagttggataaagagtcaagacccatcagtgtgctgtattcaggaaacccatctcacgtgcagagacacacataggctcaaaataaaaggatggaggaagatctaccaagccaatggaaaacaaaaaaaggcaggggttgcaatcctagtctctgataaaacagactttaaaccaacaaagatcaaaagagacaaagaaggccattacataatggtaaagggatcaattcaacaagaggagctaactatcctaaatatttatgcacccaatacaggagcacccagattcataaagcaagtcctgagtgacctacaaagagacttagactcccacacattaataatgggagactttaacaccccactgtcaacattagacagatcaacgagacagaaagtcaacaaggatacccaggaattgaactcagctctgcaccaagcagacctaatagacatctacagaactctccaccccaaatcaacagaatatacatttttttcagcaccacaccacacctattccaaaattgaccacatagttggaagtaaagctctcctcagcaaatgtaaaagaacagaaattataacaaactatctctcagaccacagtgcaatcaaactagaactcaggattaagaatctcactcaaagccgctcaactacatggaaactgaacaacctgctcctgaatgactactgggtacataacgaaatgaaggcagaaataaagatgttctttgaaaccaacgagaacaaagacaccacataccagaatctctgtgacgcattcaaagcagtgtgtagagggaaatttatagcactaaatgcctacaagagaaagcaggaaagatccaaaattgacaccctaacatcacaattaaaagaactagaaaagcaagagcaaacacattcaaaagctagcagaaggcaagaaataactaaaatcagagcagaactgaaggaaatagagacacaaaaaacccttcaaaaaatcaatgaatccaggagctggtttttcgaaaggatcaacaaaattgatagaccgctagcaagactaataaagaaaaaaagagagaagaatcaaatagacacaataaaaaatgataaaggggatatcaccaccgatcccacagcaatacaaactaccatcagagaatactacaaacacctctacgcaaataaactagaaaatctagaagaaatggatacattcctcgacacatacactctcccaagactaaaccaggaagaagttgaatctctgaatagaccaataacaggctctgaaattgtggcaataatcaatagtttaccaacaaaaaagagtccaggaccagatggattcacagccgaattctaccagaggtacaaggaggaactggtaccattccttctgaaactattccaatcaatagaaaaagagggaatcctccctaactcattttatgaggccagcatcattctgataccaaagccgggcagagacacaaccaaaaaagagaattttagaccaatatccttgatgaacattgatgcaaaaatcctcaataaaatactggcaaaccgaatccagcagcacatcaaaaagcttatccaccatgatcaagtgggcttcatccctgggatgcaaggctggttcaatatacgcaaatcaataaatgtaatccagcatataaacagagccaaagacaaaaaccacatgattatctcaatagatgcagaaaaagcctttgacaaaattcaacaacccttcatgctaaaaactctcaataaattaggtattgatgggacgtatttcaaaataataagagctatctatgacaaacccacagccaatatcatactgaatgggcaaaaactggaagcattccctttgaaaactggcacaagacagggatgccctctctcaccgctcctattcaacatagtgttggaagttctggccagggcaatcaggcaggagaaggaaataaagggtattcaattaggaaaagaggaagtcaaattgtccctgtttgcagacgacatgattgtttatctagaaaaccccatcgtctcagcccaaaatctccttaagctgataagcaacttcagcaaagtctcaggatacaaaatcaatgtacaaaaatcacaagcattcttatacaccaacaacagacaaacagagagccaaatcatgggtgaactcccattcacaattgcttcaaagagaataaaatacctaggaatccaacttacaagggatgtgaaggacctcttcaaggagaactacaaaccactgctcaaggaaataaaagaggacacaaacaaatggaagaacattccatgctcatgggtaggaagaatcaatatcgtgaaaatggccatactgcccaaggtaatttacagattcaatgccatccccatcaagctaccaatgactttcttcacagaattggaaaaaactactttaaagttcatatggaaccaaaaaagagcccgcattgccaagtcaatcctaagccaaaagaacaaagctggaggcatcacactacctgacttcaaactatactacaaggctacagtaaccaaaacagcatggtactggtaccaaaacagagatatagatcaatggaacagaacagagccctcagaaataatgccgcatatctacaactatctgatctttgacaaacctgagaaaaacaagcaatggggaaaggattccctatttaataaatggtgctgggaaaactggctagccatatgtagaaagctgaaactggatcccttccttacaccttatacaaaaatcaattcaagatggattaaagatttaaacgttaaacctaaaaccataaaaaccctagaagaaaacctaggcattaccattcaggacataggcgtgggcaaggacttcatgtccaaaacaccaaaagcaatggcaacaaaagccaaaattgacaaatgggatctaattaaactaaagagcttctgcacagcaaaagaaactaccatcagagtgaacaggcaacctacaacatgggagaaaattttcgcaacctactcatctgacaaagggctaatatccagaatctacaatgaactcaaacaaatttacaagaaaaaaacaaacaaccccatcaaaaagtgggcgaaggacatgaacagacacttctcaaaagaagacatttatgcagccaaaaaacacatgaaaaaatgctcatcatcactggccatcagagaaatgcaaatcaaaaccactatgagatatcatctcacaccagttagaatggcaatcattaaaaagtcaggaaacaacaggtgctggagaggatgtggagaaataggaacacttttacactgttggtgggactgtaaactagttcaaccattgtggaagtcagtgtggtgattcctcagggatctagaactagaaataccatttgacccagccatcccattactgggtatatacccaaatgagtataaatcatgctgctataaagacacatgcacacgtatgtttattgcggcactattcacaatagcaaagacttggaaccaacccaaatgtccaacaatgatagactggattaagaaaatgtggcacatatacaccatggaatactatgcagccataaaaaatgatgagttcatatcctttgtagggacatggatgaaattggaaaccatcattctcagtaaactatcgcaagaacaaaaaaccaaacaccgcatattctcactcataggtgggaattgaacaatgagatcacatggacacaggaaggggaatatcacactctggggactgtggtggggtcgggggaggggggagggatagcattgggagatatacctaatgctagatgacacattagtgggtgcagcgcaccagcatggcacatgtatacatatgtaactaacctgcacaatgtgcacatgtaccctaaaacttagagtataataaaaaaaaaaaaa

SEQ ID NO: 723 - DNA, 6018 bp, Homo sapiens
  source 1..6018: mol_type = other DNA
gggggaggagccaagatggccgaataggaacagctccggtctacagctcccagcgtgagcgacgcagaagacgggtgatttctgcatttccatctgaggtaccgggttcatctcactagggagtgccagacagtgggcgcaggccagtgtgtgtgcacactgtgcgcgagccgaagcagggcgaggcattgcctcacctgggaagcgcaaggggtcagggagttccctttccgagtcaaagaaaggggtgacggacgcacctggaaaatcgggtcactcccacccgaatattgcgcttttcagaccggcttaaaaaacggcgcaccacgagactatatcccacacctggctcagagggtcctacgcccacggaatctcgctgattgctagcacagcagtctgagatcaaactgcaaggcggcaacgaggctaggggaggggcgcccgccattgcccaggcttgcttaggtaaacaaagcagccgggaagctcgaactgggtggagcccaccacagctcaaggaggcctgcctgcctctgtaggctccacctctgggggcagggcacagacaaacaaaaaggcagcagtaacctctgcagacttaagtgtccctgtcagacagctttgaagagagcagtggttctcccagcacgcagctggagatctgagaacgggcagactgcctcctcaagtgggtccctgacccctgacccccgagcagcctaactgggaggcaccccccagcagggtcacacggcagggtattccaacagacctgcagctgagggtcctgtctgttagaaggaaaactaacaaccagaaaggacatctacaccgaaaacccatctgtacatcaccatcatcaaagaccaaaagtagataaaaccacaaagatggggaaaaaacagaacagaaaaactggaaactctaaaacgcagagcgcctctcctcctccaaaggaacgcagttcctcaccagcaacagaacaaagctggatggagaatgattttgacgagctgagagaagaaggcttcagacgatcaaattactctgagctacgggaggacattcaaaccaaaggcaaagaagttgaaaactttgaaaaaaatttagaagaatgtataactagaataaccaatacagagaagtgcttaaaggagctgatggagctgaaaaccaaggctcgagaactacgtgaagaatgcagaagcctcaggagccgatgcgatcaactggaagaaagggtatcagcaatggaagatgaaatgaatgaaatgaagcgagaagggaagtttagagaaaaaagaataaaaagaaatgagcaaagcctccaagaaatatgggactatgtgaaaaggccaaatctacgtctgattggtgtacctgaaagtgatgtggagaatggaaccaagttggaaaacactctgcaggatattatccaggagaacttccccaatctagcaaggcaggccaacgttcagattcaggaaatacagagaacgccacaaagatactcctcgagaagagcaactccaagacacataattgtcagattcaccaaagttgaaatgaaggaaaaaatgttaagggcagccagagagaaaggtcgggttaccctcaaagggaagcccatcagactaacagcagatctctcggcagaaaccctacaagccagaagagagtgggggccaatattcaacattcttaaagaaaagaattttcaacccagaatttcatttccagccaaactaagcttcataagtgaagctgaaataaaatactttacagacaagcaaatgctgagagattttgtcaccaccaggcctaccctaaaagagctcctgaaggaagcactaaacatggaaaggaacaaccggtaccagccgctgcaaaatcatgccaaaatgtaaagaccatcgagactaggaagaaactgcatcaactaatgagcaaaatcaccagctaacatcataatgacaggatcaaattcacacataacaatattaactttaaatataaatggactaaattctgcaattaaaagacacagactggcaagttggataaagagtcaagacccatcagtgtgctgtattcaggaaacccatctcacgtgcagagacacacataggctcaaaataaaaggatggaggaagatctaccaagcaaatggaaaacaaaaaaaggcaggggttgcaatcctagtctctgataaaacagactttaaaccaacaaagatcaaaagagacaaagaaggccattacataatggtaaagggatcaattcaacaagaggagctaactatcctaaatatttatgcacccaatacaggagcacccagattcataaagcaagtcctgagtgacctacaaagagacttagactcccacacattaataatgggagactttaacaccccactgtcaatattagacagatcaacgagacagaaagtcaacaaggatacccaggaattgaactcagctctgcaccaagcagacctaatagacatctacagaactctccaccccaaatcaacagaatatacatttttttcagcaccacaccacacctattccaaaattgaccacatagttggaagtaaagctctcctcagcaaatgtaaaagaacagaaattataacaaactatctctcagaccacagtgcaatcaaactagaactcaggattaagaatctcactcaaagccgctcaactacatggaaactgaacaacctgctcctgaatgactactgggtacataacgaaatgaaggcagaaataaagatgttctttgaaaccaacgagaacaaagacaccacataccagaatctctgggacgcattcaaagcagtgtgtagagggaaatttatagcactaaatgcctacaagagaaagcaggaaagatccaaaattgacaccctaacatcacaattaaaagaactagaaaagcaagagcaaacacattcaaaagctagcagaaggcaagaaataactaaaatcagagcagaactgaaggaaatagagacacaaaaaacccttcaaaaaatcaatgaatccaggagctggttttttgaaaggatcaacaaaattgatagaccgctagcaagactaataaagaaaaaaagagagaagaatcaaatagacacaataaaaaatgataaaggggatatcaccaccgatcccacagaaatacaaactaccatcagagaatactacaaacacctctacgcaaataaactagaaaatctagaagaaatggatacattcctcgacacatacactctcccaagactaaaccaggaagaagttgaatctctgaatagaccaataacaggctctgaaattgtggcaataatcaatagtttaccaaccaaaaagagtccaggaccagatggattcacagccgaattctaccagaggtacaaggaggaactggtaccattccttctgaaactattccaatcaatagaaaaagagggaatcctccctaactcattttatgaggccagcatcattctgataccaaagccgggcagagacacagccaaaaaagagaattttagaccaatatccttgatgaacattgatgcaaaaatcctcaataaaatactggcaaaccaaatccagcagcacatcaaaaagcttatccaccatgatcaagtgggcttcatccctgggatgcaaggctggttcaatatacgcaaatcaataaatgtaatccagcatataaacagagccaaagacaaaaaccacatgattatctcaatagatgcagaaaaagcctttgacaaaattcaacaacccttcatgctaaaaactctcaataaattaggtattgatgggacgtatttcaaaataataagagctatctatgacaaacccacagccaatatcatactgaatgggcaaaaactggaagcattccctttgaaaactggcacaagacagggatgccctctctcaccgctcctattcaacatagtgttggaagttctggccagggcaatcaggcaggagaaggaaataaagggtattcaattaggaaaagaggaagtcaaattatccctgtttgcagacgacatgattgtttatctagaaaaccccatcgtctcagcccaaaatctccttaagctgataagcaacttcagcaaagtctcaggatacaaaatcaatgtacaaaaatcacaagcattcttatacaacaacaacagacaaacagagagccaaatcatgggtgaactcccattcacaattgcttcaaagagaataaaatacctaggaatccaacttacaagggatgtgaaggacctcttcaaggagaactacaaaccactgctcaaggaaataaaagaggacacaaacaaatggaagaacattccatgctcatgggtaggaagaatcaatatcgtgaaaatggccatactgcccaaggtaatttacagattcaatgccatccccatcaagctaccaatgactttcttcacagaattggaaaaaactactttaaagttcatatggaaccaaaaaagagcccgcattgccaagtcaatcctaagccaaaagaacaaagctggaggcatcacactacctgacttcaaactatactacaaggctacagtaaccaaaacagcatggtactggtaccaaaacagagatatagatcaatggaacagaacagagccctcagaaataatgccacatatctacaactatctgatctttgacaaacctgagaaaaacaagcaatggggaaaggattccctatttaataaatggtgctgggaaaactggctagccatatgtagaaagctgaaactcgatcccttccttacaccttatacaaaaatcaattcaagatggattaaagatttaaacgttaaacctaaaaccataaaaaccctagaagaaaacctaggcattaccattcaggacataggcgtgggcaaggacttcatgtccaaaacaccaaaagcaatggcaacaaaagacaaaattgacaaatgggatctaattaaactaaagagcttctgcacagcaaaagaaactaccatcagagtgaacaggcaacctacaacatgggagaaaattttcgcaacctactcatctgacaaagggctaatatccagaatctacaatgaactcaaacaaatttacaagaaaaaaacaaacaaccccatcaaaaagtgggcgaaggacatgaacagacacttctcaaaagaagacatttatgcagccaaaaaacacatgaagaaatgctcatcatcactggccatcagagaaatgcaaatcaaaaccactatgagatatcatctcacaccagttagaatggcaatcattaaaaagtcaggaaacaacaggtgctggagaggatgcggagaaataggaacacttttacactgttggtgggactgtaaactagttcaaccattgtggaagtcagtgtggcgattcctcagggatctagaactagaaataccatttgacccagccatcccattactgggtatatacccaaaggactataaatcatgctgctataaagacacatgcacacgtatgtttattgcggcactattcacaatagcaaagacttggaaacaacccaaatgtccaacaatgatagactggattaagaaaatgtggcacatatacaccatggaatactatgcagccataaaaaatgatgagttcatatcctttgtagggacatggatgaaattggaaaccatcattctcagtaaactatcgcaagaacaaaaaaccaaacaccgcatattctcactcataggtgggaattgaacaatgagatcacatggacacaggaaggggaatatcacactctggggactgtggtggggtcgggggaggggggagggatagcattgggagatatacctaatgctagatgacacattagtgggtgcagcgcaccagcatggcacatgtatacatatgtaactaacctgcacaatgtgcacatgtaccctaaaacttagagtataataaaaaaaaaaaa

SEQ ID NO: 724 - DNA, 967 bp, Homo sapiens
  source 1..967: mol_type = other DNA
tgtggggaaaagcaagagagatcaaattgttactgtgtctgtgtagaaagaagtagacataggagactccattttgttatgtgctaagaaaaattcttctgccttgagattctgttaatctatgaccttaccccaaaccccgtgctctctgaaacgtgtgctgtgtcaactcagggttgaatggattaagggcggtgcaggatgtgctttgttaaacagatgcttgaaggcagcatgctccttaagagtcatcaccactccctaatctcaagtacccagggacacaaaaactgcggaaggccgcagggacctctgcctaggaaagccaggtattgtccaaggtttctccccatgtgatagtctgaaatatggcctcgtgggaagggaaagacctgaccgtcccccagcccgacacctgtaaagggtctgtgctgaggaggattagtaaaagaggaaggaatgcctcttgcagttgagacaagaggaaggcatctgtctcctgcctgtccctgggcaatggaatgtctcggtataaaacccgattgtatgctccatctactgagatagggaaaaaccgccttagggctggaggtgggacctgcgggcagcaatactgctttgtaaagcattgagatgtttatgtgtatgcatatccaaaagcacagcacttaatcctttacattgtctatgatgccaagacctttgttcacgtgtttgtctgctgaccctctccccacaattgtcttgtgaccctgacacatccccctctttgagaaacacccacagatgatcaataaatactaagggaactcagaggctggcgggatcctccatatgctgaacgctggttccccgggtccccttatttctttctctatactttgtctctgtgtctttttcttttccaaatctctcgtcccaccttacgagaaacacccacaggtgtgtaggggcaacccacccctac

SEQ ID NO: 725 - DNA, 5715 bp, Homo sapiens
  source 1..5715: mol_type = other DNA
agtttggactgggtggagcccaccacagtgccacagagccactatagccagaatgcctctctagattcctcctctctgagcagggcatctctgaaagaaaggcagcagccccactcaggggcttatagataaaactcccatctcactcaggcaagcacccaggggaaggggcggctgtgggcacagcttcagcagacttacacgttccttcctgccagctctgaagagagcagcagatctcccagcacagcgttcaagctctgctaagggacagactgcctcctcaagtgggtccctgacccacgtgcctcctgatggggagacatctcccagcaggagctgacaaacacctcatacaggagagctcttgctggcatctggcaggtgtccctctgggatgaagcttccacaggaaggagcaggcagcaatatctgctgttctgcagcctctgctggtgacacccaggcaaacagggtctggagtggacccccagcaaactccagcagacctgcagactgttagaaggaaaactaacaaacaaaaagcaatagcatcaacatcaacaaaaaggatgacaatgcaaaagctccatccaaaggtcaccaacaccaaagaccaaaggtagataaatccacgaagatgaggaaaaaccagcacaaaaaggctgaaaattccaaaaactagaatgcctcttctcctccaaaagatcacaactccttgccagcaagggaacaaaagtggatggagaatgagtttgacgaattgacagaagtaggcttcagaaggtgggtaataacaaactcctctgagctaaaggagcatgttctaacccaatgcaaggaagctaagaaccttgataaaaggtgagaggaattgctaactagaataactagtttacagaagaacttaaatgacctgatggagctgaaaaacacagcacgagaacttcgtggagcatacacaagtatcaatagctgaattgatcaagtggaagaaaggatatcagagattgaagatcattaaagcatgaagacaagattagagaaaaaagaatgaaaaggaaggaaaaagcctccaggaaatatgggactatgtgaaaaaaccaacgtttgattgatgtacctgaaagtgatggggagaatggaaccaagttggaaaacacacttcaggatattattcaggagaacttatccaccatagcaagataggcaaacattcaaatttatgaaatacagagaacaccacaaagataatcctcaagaatagcaactccaagacacacaatcatcagattccccaaagttgaaatgaaggaaaaaatgttaagggcagccagagagaaaggtcgggttacccacaaagggaagtccagcagactaagagcggatctctctgcagaaaccctacaagccacaagacagtgggggacaatattcaacattcttaaaagaattttcaacccagaatttcatatccagccaaacagcttcataagcaaaggagaaataaaatcctttccagacaaggaaatactgagggattttgtcaccaccagacctgccttacaagagcaggaagcactaaatacagaaaggaaaaactggtaccagccattgcaaaaacataccaacttgtaaagaccatcaacactatgaagaagctgcatcaactagccagctagcatcataatgacaggatcaagttcacacataacaataacaataacaataacaatattaaccttaaatgtaaatggactaaattccccaattaaaaggcacagactggcaaattggatagagagtctaggcccatcgctgtgctgtattcaggagacccatctcatgtgcaaagacacacataggctcaaaataagcagatggaggaagatttaccaagcaaatgtaaagcaagaaaaaaaacaggggttgcaatcctagtctctgataaaacagactttaaaccaacaaagatcaaaaaagacagaaggacattacataatggtaaagggatcactgcaacaagaagggttaactatcctaaatatatttgcacccaatacaggagcacccagattcataaagcaagttcatagagactacatagagatgtagattcccacacaataatagtgagcgaccttaacaccccactatcaatattagacatatcaacaagacagaaaattaagaaggatattcaggacttgaactcagctctggaccaagtggacctaatagacatctagagaactctccaccccaaatcaacagaatatacattcttctcagcaccacatagcacttattctaaaatcaaccacataattggaagtaaaacactcctcggcaaatgcaaaagaatggaaatcataagaaagagtctgtcagtccacagtgcaatcaaattagaactcaggattaagaaactcactcaaaactgcacaactacatggaaactgaacaacctgctcctgaatgacttaaggcaaaaatgaataagttgtttgaaaccaatgagaacaaagacacaatgtaccagaatctgtgggacacagctaaagcagtgtttagagggaaatttatagcactaaatgcccccaggagaaagcgggaaagatctaaaattgacaccctaacatcacaattaaaagaactagagaagcaagagcaaacaaattcaaaagccagcagaagacaagaaataacaaagattagagcagaactgagggagatagagacacaaaaaaacccttcaaaaaaatcaatgaatccaggaggtggttttttgaaaagaatagcaaaatagatagaccactagccagactaataaagaagaaaatagagaagaatcaaatatacacaataaaagaatgataaaggggagatcatcactgatcccgcagaaatacaaagtactctcagagaataccataaacacctctacacaaatatactagaaaatctagaagaagtgcataaattcctggacacatacgccctcccaagactaaaccaggaagaagtcaaatccctgactagaccaataacaagttctgaaattgaggcagcaattaatagcctaccaaccaaaagaggcccaggaccaggtgtattcacagctgaattctaccagaggtacaaagaggagctggtaccattccttctgaaactattccaaacgatagaaaaagagggaatcctccctaactcattttttatgaggccaaaatcatcctaataacaaaacctggcagagacacacacaaaaaaagaaaatttcaggccaatatccctgatgaagatcaatgcgaaaatacccaataaaatactggcaaaccaaatccagtagcacattaaaaagcttatccaccacaatcaagtcagcttcatccctgggatgcaaagctggttcaacatatgcaaatcaataaacgtaatccatcacataaacagaaccaacgacaaaaaccacatgattatctcaaaagatgcagaaaaagcctttgacaaaattcaacagcccttcatgctaaaaacacacaataaactaggtattgatgaaacatgtctcaaaataataagagctgtatatggcagacccacagccaatatactgaatggacaaaagctggaagcattccctttgaaaaccagcacaggacaaggatgccctctctcaccactcctattcaacatagtattggaagttctggtcagggcagtcaggcaagagaaagaaataaagcatattcaaataggaagagatgaagtcaatttatctctgtttgcagatgacatgattttatatttagagaaccccatcatctcagcccagaaactccttaagctgataagcaacttcagctaagtctcaggatacaaaatcaatgtgcaaaaatcacaaccattcctatacaccaataatagacaaacagccaaatcatgagcaaactcccattcacaattgctacaaagagaataaaatacctaggaatacaacttacaagggatgtgaaggacctcttcaaggagaactacaaaccactgctcaaggaaatcagagaggacacaaacaaatggaagaacattccatgctcatggataggaaaaataaatattgtgaaaatggccatactgcccaaagtaatttatagattcaatgctatccccatcaagctaccattgactttcttcacagaattagaaaaacctactttaaatttcatatggaatgaaaaaagagcccatatagccaagaaaatcctaagcaaaaagaacaaagctggaggcatcacgctacctgacttcaaactatactacaaggctaaaataaccaaaacagcatagtactggtaccaaaacagatatatagaccaatggaacagaacagaggcctcagaaataacgtcacacatctacacacatctgatctttgacaaacctgataaaacaagcagtggggaaaggattccctatttaataaatggtgctaggaaaattggctagccataggcagaaagttgacactggaccccttccttacatcttacgcaaaaattaactccagatagattaaagatgtaaacataagatctaaaaccataaaaaccctagaagaaaacctaggcaataccattgcatgtgcaaagacttcatgactaaaacaccaaaagcaatggcaacaaaagccaaaattgacaaataggatctaattaaactaaatagcttctgcacaggaaaagaaactatcatcagagtgaacaggcaacctacagaatgggagaaaatttttgcaatccatccatctgacaaagagctaatacccagaatctacaaggaacttaagcaaatttacaagaaaaaaacaaaaaaccccatcaaaaattgggcagagtatatgaacagacacttttcaaaagaagacatttatacggccagcaaacatgaaaaaaagctcatcgtcgctggccattagagaaatgcaaatcaaaaccacaatgaaataccatctcacaccagttaaaatggtgatcattaaaaagtcaggaaacaacagatcctggagaggatgtggagaaataagaaagcttttacactgacggtgggagtgtaaattagttcaaccattgtggaagacagtgtggcaatttcttaaggatctagaactagaaataccatttgacccagcaatcccattactgggtatatacccaaaggattataaatcattctactataaagacacatgcacacgtatgtttattaaagcactattcacaatatcaaagacttggaaccaacccagatgcccatcagtgatagactggataaagaaaatgtggcaaatatacaccatggaataatatgcagccataaaacagaatgagttcatgtcctttgcagggacatggatgaagctggaaaccatcattctcagcaaactaacagaacagaaaacccaataccgcatgttctcactcataagtgggagttgaacaatgagaacacatggatacagggaagggaacatcgcacatgggtgcctgtcagagggtggggggttaggggagggatagcattaggagaaatacctaatgtagatgacgggttgatgggtgcagcaaaccaccatggcacatgtatatctatgtaagaaacctgaacgttctacacatgtgtcccagaacttaaagtataataattaaaaaaaaa

SEQ ID NO: 726 - DNA, 6034 bp, Homo sapiens
  source 1..6034: mol_type = other DNA
ggggaggagccaagatggccaaataggaacagctccggtctacagctcccagcgtgagcgacgcagaagacgggtgatttctgcatttccatctgaggtaccgggttcatctcactagggagtgccagacagtgggcgcaggccagtgtgtgtgcgcaccgtgcgcgagccgaagcagggcgaggcattgcctcacctgggaagcgcaaggggtcagggagttccctttccgagtcaaagaaaggggtgacggacgcacctggaaaatcgggtcactcccacccgaatattgcgcttttcagaccggcttaagaaacggcgcaccacgagactatatcccacacctggctcagagggtcctacgcccacggaatctcgctgattgctagcacggcagtctgagatcaaactgcaaggcggcaacgaggctgggggaggggcgcccgccattgcccaggcttgcttaggtaaacaaagcagctgggaagctcgaactgggtggagcccaccacagctcaaggaggcctgcctgcctctgtaggctccacctctgggggcagggcacagacaaacaaaaagacagcagtaacctctgcagacttaagtgtccctgtctgacagctttgaagagagcagtggttctcccagcacgcagctggagatctgagaacgggcagactgcctcctcaagtgggtccctgacccctgacccccgagcagcctaactgggaggcaccccccagcaggggcacactgacacctcacacggcagggtattccaacagacctgcagctgagggtcctgtctgttagaaggaaaactaacaaacagaaaggacatctacaccgaaaacccatctgttcatcaccatcatcaaagaccaaaagtagataaaaccacaaagatggggaaaaaacagaacagaaaaactggaaactctaaaacgcagagcgcctctcctcctccaaaggaacgcagttcctcaccagcaacagaacaaagctggatggagaatgattttgacgagctgagagaagaaggcttcagacgatcaaattactctgacctacgggaggacattcaaaccaaaggcaaagaagttgaaaacgttgaaaaaaatttagaagaatgtataactagaataaccaatacagagaagtgcttaaaggagctgatggagctgaaaaccaaggctcgagaactacgtgaagaatgcagaagcctcaggagccgatgcgatcaactggaagaaagggtatcagcaatggaagatgaaatgaatgaaatgaagcaagaagggaagtttagagaaaaaagaataaaaagaaatgagcaaagcctccaagaaatatgggactatgtgaaaagaccaaatctacatctgattggtgtacctgaaagtgatgtggagaatggaaccaagttggaaaacactctgcaggatattatccaggagaacttccccaatctagcaaggcaggccaacgttcagattcaggaaatacagagaacgccacaaagatactcctcgagaagagcaactccaagacacataattgtcagattcaccaaagttgaaatgaaggaaaaaatgttaagggcagccagagagaaaggtcgggttaccctcaaaggaaagcccatcagactaacagcggatctctcggcagaaaccctacaagccagaagagagtgggggccaatattcaacattcttaaagaaaagaattttcaacccagaatttcatatccagccaaactaagcttcataagtgaaggagaaataaaatactttatagacaagcaaatgctgagagattttgtcaccaccaggcctgccctaaaagagctcctgaaggaagcgctaaacatggaaaggaacaaccggtaccagccgctgcaaaatcatgccaaaatgtaaagaccatcgagactaggaagaaactgcatcaactaatgagcaaaatcaccagctaacatcataatgacaggatcaaattcacacataacaatattaactttaaatataaatggactaaattctgcaattaaaagacacagactggcaagttggataaagagtcaagacccatcagtgtgctgtattcaggaaacccatctcacgtgcagagacacacataggctcaaaataaaaggatggaggaagatctaccaagccaatggaaaacaaaaaaaggcaggggttgcaatcctagtctctgataaaacagactttaaaccaacaaagatcaaaagagacaaagaaggccattacataatggtaaagggatcaattcaacaagaggagctaactatcctaaatatttatgcacccaatacaggagcacccagattcataaagcaagtcctcagtgacctacaaagagacttagactcccacacattaataatgggagactttaacaccccactgtcaacattagacagatcaacgagacagaaagtcaacaaggatacccaggaattgaactcagctctgtaccaagcagacctaatagacatctacagaactctccaccccaaatcaacagaatatacatttttttcagcaccacaccacacctattccaaaattgaccacatagttggaagtaaagctctcctcagcaaatgtaaaagaacagaaattataacaaactatctctcagaccacagtgcaatcaaactagaactcaggattaagaatctcactcaaagccgctcaactacatggaaactgaacaacctgctcctgaatgactactgggtacataacgaaatgaaggcagaaataaagatgttctttgaaaccaacgagaacaaagacaccacataccagaatctctgggacgcattcaaagcagtgtgtagagggaaatttatagcactaaatgcctacaagagaaagcaggaaagatccaaaattgacaccctaacatcacaattaaaagaactagaaaagcaagagcaaacacattcaaaagctagcagaaggcaagaaataactaaaatcagagcagaactgaaggaaatagagacacacacaaaaaacccttcaaaaaatcaatgaatccaggagctggttttttgaaaggatcaacaaaattgatagaccgctagcaagactaataaagaaaaaaagagagaagaatcaaatagacacaataaaaaatgataaaggggatatcaccaccgatcccacagaaatacaaactaccatcagagaatactacaaacacctctacgcaaataaactagaaaatctagaagaaatggatacattcctcgacacatacactctcccaagactaaaccaggaagaagttgaatctctgaatagaccaataacaggctctgaaattgtggcaataatcaatagtttaccaaccaaaaagagtccaggaccagatggattcacagacgaattctaccagaggtacaaggaggaactggtaccattccttctgaaactattccaatcaatagaaaaagagggaatcctccctaactcattttatgaggccagcatcattctgataccaaagccgggcagagacacaaccaaaaaagagaattttagaccaatatccttgatgaacattgatgcaaaaatcctcaataaaatactggcaaaccgaatccagcagcacatcaaaaagcttatccaccatgatcaagtgggcttcatccctgggatgcaaggctggttcaatatacgcaaatcaataaatgtaatccagcatataaacagagccaaagacaaaaaccacatgattatctcaatagatgcagaaaaagcctttgacaaaattcaacaacccttcatgctaaaaactctcaataaattaggtattgatgggacgtatttcaaaataataagagctatctatgacaaacccacagccaatatcatactgaatgggcaaaaactggaagcattccctttgaaaactggcacaagacagggatgccctctctcaccgctcctattcaacatagtgttggaagttctggccagggcaatcaggcaggagaaggaaataaagggtattcaattaggaaaagaggaagtcaaattgtccctgtttgcagacgacatgattgtttatctagaaaaccccatcgtctcagcccaaaatctccttaagctgataagcaacttcagcaaagtgtcaggatacaaaatcaatgtacaaaaatcacaagcattcttatacaccaacaacagacaaacagagagccaaatcatgggtgaactcccattcacaattgcttcaaagagaataaaatacctaggaatccaacttacaagggatgtgaaggacctcttcaaggagaactacaaaccactgctcaaggaaataaaagaggacacaaacaattggaagaacattccatgctcatgggtaggaagaatcaatatcgtgaaaatggccatactgcccaaggtaatttacagattcaatgccatccccatcaagctaccaatgactttcttcacagaattggaaaaaactactttaaagttcatatggaaccaaaaaagagcccgcattgccaagtcaatcctaagccaaaagaacaaagctggaggcatcacactacctgacttcaaactatactacaaggctacagtaaccaaaacagcatggtactggtaccaaaacagagatatagatcaatggaacagaacagagccctcagaaataatgccgcatatctacaactatctgatctttgacaaacctgggaaaaacaagcaatggggaaaggattccctatttaataaatggtgctgggaaaactggctagccgtatgtagaaagctgaaactggatcccttccttacaccttatacaaaaatcaattcaagatggattaaagatttaaacgttaaacctaaaaccataaaaaccctagaagaaaacctaggcattaccattcaggacataggcgtgggcaaggacttcatgtccaaaacaccaaaagcaatggcaacaaaagacaaaattgacaaatgggatctaattaaactaaagagcttctgcacagcaaaagaaactaccatcagagtgaacaggcaacctacaacatgggagaaaattttcgcaacctactcatctgacaaagggctaatatccagaatctacaatgaactcaaacaaatttacaagaaaaaaacaaacaaccccatcaaaaagtgggcgaaggacatgaacagacacttctcaaaagaagacatttatgcagccaaaaaacacatgaagaaatgctcatcatcactggccatcagagaaatgcaaatcaaaaccactatgagatatcatctcacaccagttagaatggcaatcattaaaaagtcaggaaacaacaggtgctggagaggatgcggagaaataggaacacttttacactgttggtgggactgtaaactagttcaaccattgtggaagtcagtgtggcgattcctcagggatctagaactagaaataccatttgacccagccatcccattactgggtatatacccaaatgagtataaatcatgctgctataaagacacatgcacacgtatgtttattgcggcactattcacaatagcaaagacttggaaccaacccaaatgtccaacaatgatagactggattaagaaaatgtggcacatatacaccatggaatactatgcagccataaaaaatgatgagttcatatcctttgtagggacatggatgaaattggaaaccatcattctcagtaaactatcgcaagaacaaaaaaccaaacaccgcatattctcactcataggtgggaattgaacaatgagatcacatggacacaggaaggggaatatcacactctggggactgtggtggggtcgggggaggggggagggatagcattgggagatatacctaatgctagatgacacattagtgggtgcagcgcaccagcatggcacatgtatacatatgtaactaatctgcacaatatgcacatgtaccctaaaacttagagtataataaaaaaaaaaaa

SEQ ID NO: 727 - DNA, 6031 bp, Homo sapiens
  source 1..6031: mol_type = other DNA
ggaggaggagccaagatggccgaataggaacagctccggtctacagctcccagcgtgagcgacgcagaagacgggtgatttctgcatttccatctgaggtaccgggttcatctcactagggagtgccagacagtgggcgcaggccagtgtgtgtgcgcaccgtgcgcgagccgaagcagggcgaggcattgcctcacctgggaagcgcaaggggtcagggagttccctttccgagtcaaagaaaggggtgacggacgcacctggaaaatcgggtcactcccacctgaatattgcgcttttcagaccggcttaagaaacggcgcaccacgagactatatcccacacctggctcagagggtcctacgcccacggagtctcgctgattgctagcacagcagtctgagatcaaactgcaaggcggcaacgaggctgggggaggggcgcccgccattgcccaggcttgcttaggtaaacaaagcagccgggaagctcgaactgggtggagcccaccacagctcaaggaggcctgcctgcctctgtaggctccacctctgggggcagggcacagacaaacaaaaagacagcagtaacctctgcagacttaagtgtccctgtctgacagctttgaagagagcagtggttctcccagcacgcagctggagatctgagaacgggcagactgcctcctcaagtgggtccctgacccctgacccccgagcagcctaactgggaggcaccccccagcaggggcacactgacacctcacacggcagggtattccaacagacctgcagctgagggtcctgtctgttagaaggaaaactaacaaccagaaaggacatctacaccgaaaacccatctgtacatcaccatcatcaaagaccaaaagtagataaaaccacaaagatggggaaaaaacagaacagaaaaactggaaactctaaaacgcagagcgcctctcctcctccaaaggaacgcagttcctcaccagcaacagaacaaagctggatggagaatgattttgacgagctgagagaagaaggcttcagacgatcaaattactctgagctacgggaggacattcaaaccaaaggcaaagaagttgaaaactttgaaaaaaatttagaagaatgtataactagaataaccaatacagagaagtgcttaaaggagctgatggagctgaaaaccaaggctcgagaactacgtgaagaatgcagaagcctcaggagccgatgcgatcaactggaagaaagggtatcagcaatggaagatgaaatgaatgaaatgaagcgagaagggaagtttagagaaaaaagaataaaaagaaatgagcaaagcctccaagaaatatgggactatgtgaaaagaccaaatctacgtctgattggtgtacctgaaagtgatgtggagaatggaaccaagttggaaaacactctgcaggatattatccaggagaacttccccaatctagcaaggcaggccaacgttcagattcaggaaatacagagaacgccacaaagatactcctcgagaagagcaactccaagacacataattgtcagattcaccaaagttgaaatgaaggaaaaaatgttaagggcaaccagagagaaaggtcgggttaccctcaaaggaaagcccatcagactaacagcggatctctcggcagaaaccctacaagccagaagagagtgggggccaatattcaacattcttaaagaaaagaattttcaacccagaatttcatatccagccaaactaagcttcataagtgaaggagaaataaaatactttatagacaagcaaatgctgagagattttgtcaccaccaggcctgccctaaaagagctcctgaaggaagcgctaaacatggaaaggaacaaccggtaccagccgctgcaaaatcatgccaaaatgtaaagaccatcgagactaggaagaaactgcatcaactaatgagcaaaatcaccagctaacatcataatgacaggatcaaattcacacataacaatattaactttaaatataaatggactaaattctgcaattaaaagacacagactggcaagttggataaagagtcaagacccatcagtgtgctgtattcaggaaacccatctcacgtgcagagacacacataggctcaaaataaaaggatggaggaagatctaccaagccaatggaaaacaaaaaaaggcaggggttgcaatcctagtctctgataaaacagactttaagccaacaaagatcaaaagagacaaagaaggccattacataatggtaaagggatcaattcaacaagaggagctaactatcctaaatatttatgcacccaatacaggagcacccagattcataaagcaagtcctcagtgacctacaaagagacttagactcccacacattaataatgggagactttaacaccccactgtcaacattagacagatcaacgagacagaaagtcaacaaggatacccaggaattgaactcagctctgcaccaagcagacctaatagacatctacagaactctccaccccaaatcaacagaatatacatttttttcagcaccacaccacacctattccaaaattgaccacatagttggaagtaaagctctcctcagcaaatgtaaaagaacagaaattataacaaactatctctcagaccacagtgcaatcaaactagaactcaggattaagaatctcactcaaagccgctcaactacatggaaactgaacaacctgctcctgaatgactactgggtacataacgaaatgaaggcagaaataaagatgttctttgaaaccaacgagaacaaagacaccacataccagaatctctgggacgcattcaaagcagtgtgtagagggaaatttatagcactaaatgcctacaagagaaagcaggaaagatccaaaattgacaccctaacatcacaattaaaagaactagaaaagcaagagcaaacacattcaaaagctagcagaaggcaagaaataactaaaatcagagcagaactgaaggaaatagagacacaaaaaacccttcaaaaactcaatgaatccaggagctggttttttgaaaggatcaacaaaattgatagaccgctagcaagactaataaagaaaaaaagagagaagaatcaaatagacacaataaaaaatgataaaggggatatcaccaccgatcccacagaaatacaaactaccatcagagaatactacaaacacctctacacaaataaactagaaaatctagaagaaatggatacattcctcgacacatacactctcccaagactaaaccaggaagaagttgaatctctgaatagaccaataacaggctctgaaattgtggcaataatcaatagtttaccaaccaaaaagagtccaggaccagatggattcacagccgaattctaccagaggtacaaggaggaactggtaccattccttctgaaactattccaatcaatagaaaaagagggaatcctccctaactcattttatgaggccagcatcattctgataccaaagccgggcagagacacaaccaaaaaagagaattttagaccaatatccttgatgaacattgatgcaaaaatcctcaataaaatactggcaaaccgaatccagcagcacatcaaaaagcttatccaccatgatcaagtgggcttcatccctgggatgcaaggctggttcaatatacgcaaatcaataaatgtaatccagcatataaacagagccaaagacaaaaaccacatgattatctcaatagatgcagaaaaagcctttgacaaaattcaacaacccttcatgctaaaaactctcaagaaattaggtattgatgggacgtatttcaaaataataagagctatctatgacaaacccacagccaatatcatactgaatgggcaaaaactggaagcattccctttgaaaactggcacaagacagggatgccctctctcaccgctcctattcaacacagtgttggaagttccggccagggcaatcaggcaggagaaggaaataaagggtattcaattaggaaaagaggaagtcaaattgtccctgtttgcagacgacatgattgtttatctagaaaaccccattgtctcagcccaaaatctccttaagctgataagcaacttcagcaaagtctcaggatacaaaatcaatgtacaaaaatcacaagcattcttatataccaacaacagacaaacagagagccaaatcatgggtgaactcccattcacaattgcttcaaagagaataaaatacctaggaatccaacttacaagggatgtgaaggacctcttcaaggagaactacaaaccactgctcaaggaaataaaagaggacacaaacaaatggaagaacattccatgctcatgggtaggaagaatcaatatcgtgaaaatggccatactgcccaaggtaatttacagattcaatgccatccccataaagctaccaatgactttcttcacagaattggaaaaaactactttaaagttcatgtggaaccaaaaaagagcccgcatcgccacgggaatcctaagccaaaagaacaaagctggaggcatcacactacctgacttcaaactatactacaaggctacagtaaccaaaacagcatggtactggtaccaaaacagagatatagatcaatggaacagaacagagccctcagaaataatgccgcatatctacaactatctgatctttgacaaacctgagaaaaacaagcaatggggaaaggattccctatttaataaatggtgctgggaaaactggctagccatatgtagaaagctgaaactggatcccttccttacaccttatacaaaaatcaattcaagatggattaaagatttaaacgttaaacctaaaaccataaaaaccctagaagaaaacctaggcattaccattcaggacataggcgtgggcaaggacttcatgtccaaaacaccaaaagcaatggcaacaaaagacaaaattgacaaatgggatctaattaaactaaagagcttctgcacagcaaaagaaactaccatcagagtgaacaggcaacctacaacatgggagaaaattttcgcaacctactcatctgacaaagggctaatatccagaatctacaatgaactcaaacaaatttacaagaaaaaaacaaacaaccccatcaaaaagtgggcgaaggacatgaacagacacttctcaaaagaagacatttatgcagtcaaaaaacacatgaagaaatgctcagcatcactggccatcagagaaatgcaaatcaaaaccactatgagatatcatctcacaccagttagaatggcaatcattaaaaagtcaggaaacaacaggtgctggagaggatgcggagaaataggaacacttttacactgttggtgggactgtaaactagttcaaccattgtggaagtcagtgtggcgattcctcagggatctagaactagaaataccatttgacccagccatcccattactgggtatatacccaaatgagtataaatcatgctgctataaagacacatgcacacgtatgtttattgcggcactattcacaatagcaaagacttggaaccaacccaaatgtccaacaatgatagactggattaagaaaatgtggcacatatacaccatggaatactatgcagccataaaaaatgatgagttcatatcctttgtagggacatggatgaaattggaaaccatcattctcagtaaactatcgcaagaacaaaaaaccaaacaccgcatattctcactcataggtgggaattgaacaatgagatcacatggacacaggaaggggaatatcacactctggggactgtggtggggtcgggggagtggggagggatagcattgggagatatacctaatgctagatgacacattagtgggtgcagcgcaccagcatggcacatgtatacatatgtaactaacctgcacaatgtgcacatgtaccctaaaacttagagtataataaaaaaaaaaaa

SEQ ID NO: 728 - DNA, 6028 bp, Homo sapiens
  source 1..6028: mol_type = other DNA
ggggaggagccaagatggccgaataggaacagctccggtctacagctcccagcgtgagcgacgcagaagacgggtgatttctgcatttccatctgaggtaccgggttcatctcactagggagtgccagacagtgggcgcaggccagtgtgtgtgcgcaccgtgcgcgagccgaagcagggcgaggcattgcctcacctgggaagcgcaaggggtcagggagttccctttccgagtcaaagaaaggggtgacggacgcacctggaaaatcgggtcactcccacccgaatattgcgcttttcagaccggcttaagaaacggcgcaccacgagactatatcccacacctggctcagagggtcctacgcccacggagtctcgctgattgctagcacagcagtctgagatcaaactgcaaggcggcaacgaggctgggggaggggcgcccgccattgcccaggcttgcttaggtaaacaaagcagccgggaagctcgaactgggtggagcccaccacagctcaaggaggcctgcctgcctctgtaggctccacctctgggggcagggcacagacaaacaaaaaggcagcagtaacctctgcagacttaagtgtccctgtctgacagctttgaagagagcagtggttctcccagcacgcagctggagatctgagaacgggcagactgcctcctcaagtgggtccctgacccctgacccccgagcagcctaactgggaggcaccccccagcaggggcacactgacacctcacaaggcagggtattccaacagacgtgcagctgagggtcctgtctgttagaaggaaaactaacaaccagaaaggacatctacaccgaaaacccatctgtacatcaccatcatcaaagaccaaaagtagataaaaccacaaagatggggaaaaaacagaacagaaaaactggaaactctaaaacgcagagcgcctctcctcctccaaaggaacgcagttcctcaccagcaacagaacaaagctggatggagaatgattttgacgagctgagagaagaaggcttcagacgatcaaattactctgagctacgggaggacattcaaaccaaaggcaaagaagttgaaaactttgaaaaaaatttagaagaatgtataactagaataaccaatacagagaagtgcttaaaggagctgatggagctgaaaaccaaggctcgagaactacgtgaagaatgcagaagcctcaggagccgatgcgatcaactggaagaaagggtatcagcaatggaagatgaaatgaatgaaatgaagcaagaagggaagtttagagaaaaaagaataaaaagaaatgagcaaagcctccaagaaatatgggactatgtgaaaagaccaaatctacgtctgattggtgtacctgaaagtgatgtggagaatggaaccaagttggaaaacactctgcaggatattatccaggagaacttccccaatctagcaaggcaggccaacattcagattcaggaaatacagagaacgccacaaagatactcctcgagaagagcaactccaagacacataattgtcagattcaccaaagttgaaatgaaggaaaaaatgttaagggcagccagagagaaaggtcgggttaccctcaaagggaagcccatcagactaacagcagatctctcggcagaaaccctacaagccagaagagagtgggggccaatattcaacattcttaaagaaaagaattttcaacccagaatttcatttccagccaaactaagcttcataagtgaaggagaaagaaaatactttacagacaagcaaatgctgagagattttgtcaccaccaggcctaccctaaaagagctcctgaaggaagcactaaacatggaaaggaacaaccggtaccagccgctgcaaaatcatgccaaaatgtaaagaccatcgagactaggaagaaactgcatcaactaatgagcaaaatcaccagctaacatcataatgacaggatcaaattcacacataacaatattaactttaaatataaatggactaaattctgcaattaaaagacacagactggcaagttggataaagagtcaagacccatcagtgtgctgtattcaggaaacccatctcacgtgcagagacacacataggctcaaaataaaaggatggaggaagatctaccaagcaaatggaaaacaaaaaaaggcaggggttgcaatcctagtctctgataaaacagactttaaaccaacaaagatcaaaagagacaaagaaggccattacataatggtaaagggatcaattcaacaagaggagctaactatcctaaatatttatgcacccaatacaggagcacccagattcataaagcaagtcctgagtgacctacaaagagacttagactcccacacattaataatgggagactttaacaccccactgtcaatattagacagatcaacgagacagaaagtcaacaaggatacccaggaattgaactcagctctgcaccaagcagacctaatagacatctacagaactctccaccccaaatcaacagaatatacatttttttcagcaccacaccacacctattccaaaattgaccacatagttggaagtaaagctctcctcagcaaatgtaaaagaacagaaattataacaaactatctctcagaccacagtgcaatcaaactagaactcaggattaagaatctcactcaaagccgctcaactacatggaaactgaacaacctgctcctgaatgactactgggtacataacgaaatgaaggcagaaataaagatgttctttgaaaccaacgagaacaaagacaccacataccagaatctctgggacgcattcaaagcagtgtgtagagggaaatttatagcactaaatgcctacaagagaaagcaggaaagatccaaaattgacaccctaacatcacaattaaaagaactagaaaagcaagagcaaacacattcaaaagctagcagaaggcaagaaataactaaaatcagagcagaactgaaggaaatagagacacaaaaaacccttcaaaaaatcaatgaatccaggagctggttttttgaaaggatcaacaaaattgatagaccgctagcaagactaataaagaaaaaaagagagaagaatcaaatagacacaataaaaaatgataaaggggatatcaccaccgatcccacagaaatacaaactaccatcagagaatactacaaacacctctacgcaaataaactagaaaatctagaagaaatggatacattcctcgacacatacactctcccaagactaaaccaggaagaagttgaatctctgaatagaccaataacaggctctgaaattgtggcaataatcaatagtttaccaaccaaaaagagtccaggaccagatggattcacagccgaattctaccagaggtacaaggaggaactggtaccattccttctgaaactattccaatcaatagaaaaagagggaatcctccctaactcattttatgaggccagcatcattctgataccaaagccgggcagagacacaaccaaaaaagagaattttagaccaatatccttgatgaacattgatgcaaaaatcctcaataaaatactggcaaaccgaatccagcagcacatcaaaaagcttatccaccatgatcaagtgggcttcatccctgggatgcaaggctggttcaatatacgcaaatcaataaatgtaatccagcatataaacagagccaaagacaaaaaccacatgattatctcaatagatgcagaaaaagcctttgacaaaattcaacaacccttcatgctaaaaactctcaataaattaggtattgatgggacgtatttcaaaataataagagctatctatgacaaacccacagccaatatcatactgaatgggcaaaaactggaagcattccctttgaaaactggcacaagacagggatgccctctctcaccgctcctattcaacatagtgttggaagttctggccagggcaatcaggcaggagaaggaaataaagggtattcaattaggaaaagaggaagtcaaattgtccctgtttgcagacgacatgattgtttatctagaaaaccccatcgtctcagcccaaaatctccttaagctgataagcaacttcagcaaagtctcaggatacaaaatcaatgtacaaaaaccacaagcattcttatacaccaacaacagacaaacagagagccaaatcatgggtgaactcccattcacaattgcttcaaagagaataaaatacctaggaatccaacttacaagggatgtgaaggacctcttcaagaactacaaaccactgctcaaggaaataaaagaggacacaaacaaatggaagaacattccatgctcatgggtaggaagaatcaatatcgtgaaaatggccatactgcccaaggtaatttacagattcaatgccatccccatcaagctaccaatgactttcttcacagaattggaaaaaactactttaaagttcatatggaaccaaaaaagagcccgcattgccaagtcaatcctaagccaaaagaacaaagctggaggcatcacactacctgacttcaaactatactacaaggctacagtaaccaaaacagcatggtactggtaccaaaacagagatatagatcaatggaacagaacagagccctcagaaataatgccgcatatctacaactatctgatctttgacaaacctgagaaaaacaagcaatggggaaaggattccctatttaataaatggtgctgggaaaactggctagccatatgtagaaagctgaaactggatcccttccttacaccttatacaaaaatcaattcaagatggattaaagatttaaacgttaaacctaaaaccataaaaaccctagaagaaaacctaggcattaccattcaggacataggcgtgggcaaggacttcatgtccaaaacaccaaaagcaatggcaacaaaagacaaaattgacaaatgggatctaattaaactaaagagcttctgcacagcaaaagaaactaccatcagagtgaacaggcaacctacaacatgggagaaaattttcgcaacctactcatctgacaaagggctaatatccagaatctacaatgaactcaaacaaatttacaagaaaaaaacaaacaaccccatcaaaaagtgggcgaaggacatgaacagacacttctcaaaagaagacatttatgcagccaaaaaacacatgaagaaatgctcatcatcactggccatcagagaaatgcaaatcaaaaccactatgagatatcatctcacaccagttagaatggcaatcattaaaaagtcaggaaacaacaggtgctggagaggatgcggagaaataggaacacttttacactgttggtgggactgtaaactagttcaaccattgtggaagtcagtgtggcgattcctcagggatctagaactagaaataccatttgacccagccatcccattactgggtatatacccaaatgagtataaatcatgctgctataaagacacatgcacacgtatgtttattgcggcactattcacaatagcaaagacttggaaccaacccaaatgtccaacaatgatagactggattaagaaaatgtggcacatatacaccatggaatactatgcagccataaaaaatgatgagttcatatcctttgtagggacatggatgaaattggaaaccatcattctcagtaaactatcacaagaacaaaaaaccaaacaccgcatattctcactcataggtgggaattgaacaatgagatcacatggacacaggaaggggaatatcacactctggggactgtggtggggtcgggggaggggggagggatagaattgggagatatacctaatgctagatgacacattagtgggtgcagcgcaccagcatggcacatgtatacatatgtaactaacctgcacaatgtgcacatgtaccctaaaacttagagtataataaaaaaaaaaaaa

SEQ ID NO: 729 - DNA, 122 bp, Homo sapiens
  source 1..122: mol_type = other DNA
caaactgtgagtggcacagagcaaggactgtatgtgttctcttctttgttgcatactcagttccttgaccacagtgccaagcacacagcgagcactccctgtgtatctgctgagtaaataaa

SEQ ID NO: 730 - DNA, 2862 bp, Homo sapiens
  source 1..2862: mol_type = other DNA
acagaaatacaaactaccatcagagaatactacaaacacctctacgcaaataaactagaaaatctagaagaaatggatacattcctcgacacatacactctcccaagactaaaccaggaagaagttgaatctctgaatcgaccaataacaggctctgaaattgtggcaataatcaatagtttaccaaccaaaaagagtccaggaccagatggattcacagccgaattctaccagaggtacaaggaggaactggtaccattccttctgaaactattccaatcaatagaaaaagagggaatcctccctaactcattttatgaggccagcatcattctgataccaaagccgggcagagacacaaccaaaaaagagaattttagaccaatatccttgatgaacattgatgcaaaaatcctcaataaaatactggcaaaccgaatccagcagcacatcaaaaagcttatccaccatgatcaagtgggcttcatccctgggatgcaaggctggttcaatatacgcaaatcaataaatgtaatccagcatataaacagagccaaagacaaaaaccacatgattatctcaatagatgcagaaaaagcctttgacaaaattcaacaacccttcatgctaaaaactctcaataaattaggtattgatgggacgtatttcaaaataataagagctatctatgacaaacccacagccaatatcatactgaatgggcaaaaactggaagcattccctttgaaaaccggcacaagacagggatgccctctctcaccgctcctattcaacatagtgttggaagttctggccagggcaatcaggcaggagaaggaaataaagggtattcaattaggaaaagaggaagtcaaattgtccctgtttgcagacgacatgattgtttatctagaaaaccccattgtctcagcccaaaatctccttaagctgataagcaacttcagcaaagtctcaggatacaaaatcaatgtacaaaaatcacaagcattcttatacaccaacaacagacaaacagagagccaaatcatgggtgaactcccattcacaattgcttcaaagagaataaaatacctaggaatccaacttacaagggatgtgaaggacctcttcaaggagaactacaaaccactgctcaaggaaataaaagaggagacaaacaaatggaagaacattccatgctcatgggtaggaagaatcaatatcgtgaaaatggccatactgcccaaggtaatttacagattcaatgccatccccatcaagctaccaatgactttcttcacagaattggaaaaaactactttaaagttcatatggaaccaaaaaagagcccgcattgccaagtcaatcctaagccaaaagaacaaagctggaggcatcacactacctgacttcaaactatactacaaggctacagtaaccaaaacagcatggtactggtaccaaaacagagatatagatcaatggaacagaacagagccctcagaaataatgccgcatatctacaactatctgatctttgacaaacctgagaaaaacaagcaatggggaaaggattccctatttaataaatggtgctgggaaaactggctagccatatgtagaaagctgaaactggatcccttccttacaccttatacaaaaatcaattcaagatggattaaagatttaaacgttaaacctaaaaccataaaaaccctagaagaaaacctaggcattaccattcaggacataggcgtgggcaaggacttcatgtctaaaacaccaaaagcaatggcaacaaaagacaaaattgacaaatgggatctaattaaactaaagagcttctgcacagcaaaagaaactaccatcagagtgaacaggcaacctacaacatgggagaaaatttttgcaacctactcatctgacaaagggctaatatccagaatctacaatgaactcaaacaaatttacaagaaaaaaacaaacaaccccatcaaaaagtgggcgaaggacatgaacagacacttctcaaaagaagacatttatgcagccaaaaaacacatgaagaaatgctcatcatcactggccatcagagaaatgcaaatcaaaaccactatgagatatcatctcacaccatttagaatggcaatcattaaaaagtcaggaaacaacaggtgctggagaggatgcggagaaataggaacacttttacactgttggtgggactgtaaactagttcaaccattgtggaagtcagtgtggcgattcctcagggatctagaactagaaataccatttgacccagccatcccattactgggtatatacccaaatgagtataaatcatgctgctataaagacacatgcacacgtatgtttattgcggcactattcacaatagcaaagacttggaaccaacccaaatgtccaacaatgatagactggattaagaaaatgtggcacatatacaccatggaatactatgcagccataaaaaatgatgagttcatatcctttgtagggacatggatgaaattggaaaccatcattctcagtaaactatcgcaagaacaaaaaaccaaacaccgcatattctcactcataggtgggaattgaacaatgagatcacatggacacaggaaggggaatatcacactctggggactgtggtggggtcgggggaggggggagggatagcattgggagatatacctaatgctagatgacacattagtgggtgcagcgcaccagcatggcacatgtatacatatgtaactaacctgcacaatgtgcacatgtaccctaaaacttagagtataataaaaaaaaaaaaaaaaaaaaaaaaaaaaaaaataaagaaaa

SEQ ID NO: 731 - DNA, 316 bp, Homo sapiens
  source 1..316: mol_type = other DNA
gccgggagaggtggttcacgcctgtaatcccaaaactttgggaggctgaggtgggtggatcacaaggtcagaagattgagactaccgtgaccaacaatgtgaaataccgtctctactaaaaatacaaaaaaaaaaaaaaattagccatgcatggtggcgcatgcctgtaatcccagctacttgtgaggctgaggcaggagaatcgcttgaacccagaggcagaggttgcagtgagccgagattgcgccactgcactccagcctgggcgacagagcaagacaccgtctcaaaaaaaaaaaaaaaaagaaaagaaaaa

SEQ ID NO: 732 - DNA, 1826 bp, Homo sapiens
  source 1..1826: mol_type = other DNA
ggagcatagttagaacccagtgcaaagaatctaagaaccatgataaaactacaggagctgatagccagaataaccagtttagggaagaagaaaactgacctgatagagctgaaaaactcaacacaagaaattcactgtgcaatcacaagtatcaataacagaataggccaagtggagaaaagaatctcagagcttgaagactatctttctgaaataaaacatgcagacaaaaataaagaaaagagaatgaaaaggaactaacaaaacctccaagaaatacgggattatgtaaaaagacatcctatgactgattggggtacctgaaagagatggggagaacagaatcaagttggaaaacattcttcaggatatcatccaagagaacttccccaacctagcaagacaggccaaaattcaaattcaggaaatcctgagaaccccagttctcgagatactttacaagaaaaccccaaaacacaccatcatcacatttgccaaggtcaaaatgaaagaaaaagtgttaagggcagccagagaggccaggtcacctaaaaaaagtaagcccatcagactaacatcatatctctcagtggaaacccaacaagccaaatgagattggtggcaaatattcaacattcttaaagaaaagaattaacaacccagaatttcatatccggccaaactaagcttcataaatgaaagagaaataagctccttttcagacaagcaaatgctgagggaatacatctccaccaagcctgccttgcaagagctcctgaaggaagtacctgatgtggaaaggaaaaaccattaccagccactacaaaagcacaccgaagtatacagaccagtgacactatgaagcaaccacataaaacaagtctgcaaaataaccagttagcatcatgatgacaggatcagattcacacataacagtattaaccttaaatgtaaatggacttaatgccacaattaaaatacataaaatggcaagctggatagagtcaagccccattaatgttctgtcttcaagagacacatctcacatccaaagacacacataggctcaaaataaagggagggaggaaaaatggaaaacagaaaaaagctggggtcacaatcctggtttctgacaaaacagactttaaaccaacaaagataaaaaaagaaggccattacataatggtaaaggattcaattcaacaagagctaactatcctaaatataaatacacccaatataggagcactcagattcataaagcaagttcttagagaccttcaaagagacttagattcccacacagtaatactggacactttaacaccccactgacaatattagatcatcaagacagaaaattaacaaagatattcaggacctgaactcagctctggatcaagtggacctgatagatatctacagaactctccatcccaaaacaacagaatatacattcttctcatcacatggcactctaaaattgatcacataattggaagtaaaacacccctcagcaaatgcaaaagaactgaaatcaaactgctcagaccacagcacaatcaagttagaactcaagattaagaaactcactcaaaaccacacaactacatggaaattgaacaacctgctcctgaatgactcctgagtaaataatgaaattaaggcagatgtcaagaagttatttgaaattaatgagaacaaagagacaatgtaccagaatctctgggacacaggtaaagcagtgttaatggggaaatttatagcactaaatccccacaacaaaaaggtctcaaatcaacaacttaacatcacaactaaactag

SEQ ID NO: 733 - DNA, 2113 bp, Homo sapiens
  source 1..2113: mol_type = other DNA
tccagatgagaaggaaaaagcataagaattctggcatcatgaaaatcgaaatgttgtgacaacatcaaaggatcactctagctcctgaacccaaatggaaactcagaaatgacagataaagaatttaaggcatcaattgtaaggaggctcgaagagatccaagacaaagttgaaaatcaacatgaagaaacttctaagtcagtccaggaaatgaaaaaagagaaacatcttgaaaagaaatcaattagaactactgggactgaaaaactcacttaaggaatttcaaaatacaatttaaagctttattaatagactggatgaagcagaagaaagaatttcagagcttcaagaatgattttttcaaacctagtcagacaaaagtaaagataattttaaaaaatgaacaaagtctttaagaaatatggcattatgtaaagccactaaacatacaaagtgttggcattcttgagagagcaggagaaaaagtaatcaatctgggaaacaaatttgagggaataatagaataaaacctctgtaatcttgctagagaggtagacacccagatacaagaaatccagagaacacctgctggattctacacaaaacgaacatcactagggcatataggcaccagattgtttaaggccagcactaaagaaaaaatcttaaatgcaactagagaaaaaggtcagatcacatacaaagggacccccatcaggctaacagtggacttctcagcagaaaccttacaagccagaagagattgagggtctattttcagcattctcaaaggaaagacattccaaccaagaatttcatatcctgccaagttgagcttcatatgtgaaggtaaaataaaatattttttcagataagcaattgctaagggaatttgttaccattagaccaaccttacaagaaatctttaaggaagttctaaatgtggaaacaaaagaacaatacctgttaccacaacatcacacttaagtacctagcccatagaccctataaaggaaccgcagaatagaaactacaaccagctaacaacttcacaataggatcaaaacctcctatatcaatataaatctggaatgtaaacagtcttaacacccccacttaaaaggcacagtgaattaaattaattattgaatgaaaaagaaaaaaaaagaaaaaacaagaccaatctgtctgctatcttcaagagacccatcttacatgtaatgacatctataggctcaaagtaaagggttggagaaagatctgtcataaaaatggaaaaccaaaaagagcaaaaagatattcttatatcaggtaaaacagactttaaaccaacaacagttaaaaaagacaaaaaaaaggcactacataatgataaagggctcaattcaataagaagacttattgattctaaatatatatgtacccaatacagaagcacccaggttcataaaacaagtacttcttattttattacctacaaagagacttagataagcacacaaccacaaaaaaatagttggggacttcaacaccacactgacagcattagatcatcgagggagaaaactaacaaagaaattctggacttacattcaacactggacaaattgggcttaaaagacatctacagaacactccacccatcaaccacagaatatacattcttctcatctgcacacaaaatatactgcaagattaaccagatgctcggccataaatcaagtctcaataaaagcaaaaaaaaaataaaaacttttaggtaaacaacaaaatgaaggaagaaattaaaaaattcttggaaataaacaaaaacagagacataacataccaaaatctctgtgatgcagcaaaagcagtgtaaagaataagtttatagtgctaaatgcctgcatcaagaagttagaaagatctcaaattaacaatctaatatcacacctagagaaactagaaaaacaagaacaaactgaccccaaagctagaaaagaaaataaataactaaaattagagcagaactgaatgaaattgagaccccaaaacccatacaaaggctcaatgaaaccaaacactggttttttgaaaggataaacaggattgatagaccactagctagact

SEQ ID NO: 734 - DNA, 221 bp, Homo sapiens
  source 1..221: mol_type = other DNA
tctctcttttttttttttactttacatattttatacaatgtcattcataactatggcttcttttaccacctgtaataacagactgagtctcaaacctgtaacttgtatcctgacttatctcttgctttctaaaccttgtttctaactgtctatcaaatatcttcattagacatcccacagtaattttaagctcagtgtttccaaacgtcaagtcctcatct

SEQ ID NO: 735 - DNA, 932 bp, Homo sapiens
  source 1..932: mol_type = other DNA
atacaattctacaatgggaaaaaatgtttttaaacatatgtctgatgaaggattgctatccagaataaattaacactttctaaaactcatcattaaaaaacaaacaacccatttcaaaaatgggcagaggacttaaatagacatttctccaaagaagacatacaaatggccaataagcacatgaaaaaaatatgtccagcatcactaattcttagggaaatgcaaatcaaaactacagtgagatacaggtaccactgcacatccactaggatggctactatcaaaaaaaaaaaagataataagagttggcaaggatataaggagtttggaacccctatgtatgcactgttgtaagcatgtaaattggtacagccaatgtagaaaacagaaagttcctcaacaaattaaaaatagaattaccatatgacccagcaatttcacttctggacatatactcaaaataattaaaagcagagtctcaggaagatatttgtacacccaagttcatagcagcattacgcataatagcaaagatgaggaagcaactcaagtgtccattcacacatgaaaggataagcaagacatggtacatatagacagtcagcctttaaaaagaaggaaatgctaatatgctacatcacagatgaacctaagggacattatactaaatgaaataagccaggcacaagaagacaaatactgtatgattccacttacatggggtacttagggtagtcaacatcatagacacaatgcagaaaggtggttgcctggcatgggggagaggaaagtagggagttattctttaaaggatacagagtttcacttttagaagacacaaagagttgtggagatggatgatgacaatggttgcaaagcattatgaactgtacacttaatggttaagatggtaaattttgtgtgtattttac

SEQ ID NO: 736 - DNA, 149 bp, Homo sapiens
  source 1..149: mol_type = other DNA
attgtaaacttcttgaggttgtcaccagaagcagatgctggcatcatgcttcttgtacagcctgcagaatagtgagccaaataaacttttctttataaatcaccaagcctcaggtattcctttatagcaacacaaaacagacaaacaca

SEQ ID NO: 737 - DNA, 614 bp, Homo sapiens
  source 1..614: mol_type = other DNA
tcagaaaaacaatactccaatacaaaggcttcaaaagcaagtctctctgaccttctatcctcctgcctctggcccctcattctcccaaggctagccttagaaactagaatttttcttcctcaaggcaggtcatagaaactagaaccccatttccccaacaccaggcataaaacctaaaagtattatcctaacgttcccccaacatttttgtgtaaaaatcagccataaaaaaaattatttgacctaccttgtttgattgcaggtctaaagaccctcattccagagagcatcctgccccatatccagaatgaaatccatgctcagagatgccaagaagaatctagacagacaggcctttctaggtaggtttccccactcggtctttagcattagatcttaccctttttgtccaatcatatttctacatagctgcccatactttgttgaacctaatgataaaaatggacagtttcctctatatctttgggtccgcattctaaaggctcctgtgtcaggtacaactctaaccaaataaatttatatgccttttctcctagtaatatgtgattttcagcaaaacttcagaaggcaaagggaaagatttcccagcccct

SEQ ID NO: 738 - DNA, 945 bp, Homo sapiens
  source 1..945: mol_type = other DNA
cctctgcctggccacccttcgtctgagatgtgaggagcacctctgcccagcctccctttggctgggaggtgaggagtgcctctgcccggccgccccgtctgggatgaagcgagcgcctctgcccggccgccccgtctgggaagtgaggagtgcctctgcccggccaccccatctggccaccccatctgggaagtgaggagcgcctctgcccggctgccccgtctgggaagtgaggagcgcctctgcccggccgccccttctgggaagtgaggagcgcctctgcccggccgccccgtctgggaagtgaggagcgcctctgcctggccgccccatctgggaagtgaggagcgcctctgcctggctgccccatctgggaagtgaggagtgcctctgcccggctgccccatctgggaggtgtaccccacagctccgaagaggcagcgaccatcgagaacgggccatgatgacaatggcggttttgtcgaaaagaaaagggggaaatgtggggaaaagaaagatcagattgttactgtgtctgtgtagaaagaagtagacataggagactccattttgttctgtactaagaaaaattcttctgccttgggatgctgttgatctataaccttacccccaaccccatgctctctgaaacatgtgctgtgtcaactcagggttaaatggattaagggcggtgcaagatgtgctttgttaaacagatgcttgaaggcagcatgctcgttaagagtcatcaccactccctaatctcaagtacccagggacacaaacactgctgaaggccgcagggacctctgcctaggaaaaccagagacctttgttcacgtgtttatctgctgaccttctctccattattatcctatgaccctgccacatccccctctctgagaaacacccaagaatgatcaataaatactaaaaaaaaaaaaa

SEQ ID NO: 739 - DNA, 6467 bp, Homo sapiens
  source 1..6467: mol_type = other DNA
agatggccgaataggaacagctccggtctgcagctcccaataagatgaacacagaaggtgggtgatttctgcatttccaactgagttacccagttcatctcactggaactggttagagagtgggtgcagcccacagagggtgagccaaagcagggtggggcatcacctcacctgagaagcacaaagggtcagggaagtccctcccctagccaagggaagcgtgagggactgtgacttgaggaacagtgcactctggcccagatactacacttttcccacagtctttgcaacctgttgaccaggagattccctcaggtgcctacaccaacagagccctgggtttcaagcacaaaactgggtggccatttgagcagacattgagctacctgcaggagattttttttcataccacagtggcacctggaatgccagtgagacagaaccgttcactcccctggaaagggggctgaagtcagggagccaagtggtctagctcagtggatcccacccccatggagccagctaagattcactggctcaaaattattgctgccagcacagcagtctgaagttgacctgggactctcaagcttggtcaggggaggggtgtctgccataactgaggcttgagtaggcggttttcccctcataatgtaaacaaagacgcctggaagtttgaactgggtggggctcactgcagctcagcaaagctgctgtagccagactgcctctctagattccttctcactggacagggcatctctgaaagaaaggcagcagccccagtcatgggcttatagatacttctatactcccatcaccctaggacagagcagctgggggaaggggtggctgtgggcacagcttcagcagactgaaacgttcctgcctgccagctctgaagagagcagcggatctcccatcacagtgctcaagctctgctaagggacagactgcctcctcaagtgggtccctgacccccgagtctcctgactgggacacacctcccagcagggtggacagacacctcatacaggacagttctggctagcatctggtgggtgcccctctgggacaaagcttccagagaaaggaacaggcagcaatctttgctgttctgcagtctttgccagtgatacccaggcaaacagggtctgtagtggacctccagcaaactccagcagacctgcagcagaggggcctgactgttagaaggaaaactaacaagcagacaggaacagcatcaacatcaacaaaaaggacgttcacgtagaaaccccatccaaaggtcaccaacatcaaaaccgaaggtagataaatccacgaagatgaggaaaaaacaggacaaaaaggctgaaaattccaaaaaccagaatgcctcttctcctccaaaggatcacaactccttaccagcaagggaacaaaactggatggagaatgagtttgatgaattgacagaagtaggcttcagaaggtgggtaataacaaactcttccaagctaaaggagcatattctaacccaacgcaaggaagctaagaaccttgaaaaaaagagaaattgctaactagaataacaagtttggagaggaacataaatgacctgatggagctgaaaaaaaacagcatgaaaagtttgtgaagcatacacaagtatcaatagccaaatcaatcaagtcgaagaaaggatatcagagattgaaggtcaacttaatgaaataaggtatgaagacaacattagagaaaaaagaatgaaaaggaacaaacaaaagactccaagaaatgggactatgtgaaaagaccaaacctacatttgattggtgtacctgaaagtgacggggagaatggaaccaagttgaaaaacactcttcaagatattatccaggagaacttccccaacctagcaagacaggccaacattcaaattcaggaaatacagagagcaccacaaagatattcctcaagaagagcaaccccaagacacataatcctcagattcaccaaggttgaaatgaaggaaaaaacgttaagggcagccagagagaaaggtcgggttacccacaaagggaagcccatgagactaacagtggatttctctgcagaaagcctacaagccagaagagagtgagggcaaatattcaacattcttaaagaaaagaattttcaacacagaatttcatattcagccaaactaagcttcataagcaaaggagaaataaaatcctttacagacaagaaaattctgagagattttgtcaccaccaggcctgccttacaagtgctcctgaaggaagcactaaatatcgaatggaaaaactggtaccagccgctgcaaaaacataccaaattgtaaaggccatcaacactatgaagaaactgcaacaactaatgacactgtgaagaaaccacatcaactaacaggcaaaataaccagctagcataataacgacaggatcaaattcacacataacaatattaaccttaaatataaatgggctaaatgccctaattaaaagacacagactggcaaattggataaagagtctagacccatcagtgtgctgtattcaggagaccaatctcacatgcaaagacacacataagctcaaaacaaagcaatggaggaatatttaacaagcacatggaaagcaaaaaaagcaggggttgcaatcctagtctctgataaaacagactttaaaccaacagagatcaaaaaagacaaagaagggcattacataattgtaaaggattaatgcaacaagaagagctaactatcctaaatatatatgcacccaatatgggagcaccaagattcataaagcaagttcttagagacctacaaagagacttagactcccacacaatactagagggagactttaacaccccactatcaatattacacagatcaacgagacagaaaatttacaaggatattcaggacttgaacccagctctggaccaagtggatctaatagacatctacagaactttccaccccagatcaacagaatatacattcttctaaacaccacatagcacttattctaaaatcgaccacataattggaagtaaaacactcctcaccaaatgcaaaataatggaaatcataacgaacagtctctcagatgacagtgcaatcaaattagaactcaagaaactcactcaaaaccacacaactacatggcaactgaacatcctgttcctgaatgactactgggtaaataacaaaattaaggcagaaataagaaagttttttgaaaccaatgagaaaaaagacacaatgtcaacataccggaatttctgggatgcagctaaagcagtgtttaaagggaaatttatagcactaaatgtccacaggagaaagtgggaaagatctaaaatcgacaccctaacatcacaattaaaagtactagagaaacgagcaaagaaattcaaaagctagcagaagacgagtaataactaagattagagcagaattgaaggagaagagacacgaaaaacccttcaagaaatcaaggaatccaggagttggttttgtgaaaagattaacaaaatagactgctagccagactaataaagaagaaaagacagaaaaataaaatagacactataaaaaatgataaaggggatatcactagtgatcccacagaaatacaaactactatcagagaatactataaacacctctatgcaaataaactagaaaatctagaagaaatggataaattcctggacacatacaccctcctcagactaaaccaggaagatattctatccctgaatagaccaataacaagttctgaaattgaggcaataattaatagcctaccaaccaaaaaaagcccaggaccagatggattcacatctgaattctaccagaggtacaaagaggagctagtaccattccttctgaaactattccaaacaatagaaaaagagggattcctcccaaactcattttatggggccagcataatcctgatatcaaaacctgacagacacacaagaaaaaaggaaagttcaggccaatatcctgatgaacatctatgagaaaatcctcaataatatactggtaaaccggaatcagcagcacatcaaaaagcttacccaccacgatcaagtcagcttcatccctgggatgcaagcctggttcaacatatgcaaattaatcaatgtaatccatcacataaacagaaccaatgacaaaaattacatgattatctcaatagatgcagaaaaggccttcagtaaaattcaacaccaccacttcatgctaaaaactctcaataaactgagtattgatggaacatatctcaaaataataagagctatttatgacaaacccacagccaatatcatactgaatgggcaaaagctggaagcattcccttcgaaaaccagcacaagacaagaatgccctctctcaccactccgattcagtacagtattggaagttgtggccagggtaatcaagcaagggaaagaaataaagagtgttcagataggaagagaggaagtcaaattgtctctgtttgcagatgacatgattgtatacatagaaaatcccatcgtctcagcccaaaatctccttaagcttataagcaacttcagcaaaatctcaggatacaaaatcaatgtgcaaaaatcacaagcattcctatacaccaataatagaaaaacagccaaatcatgagtgaactcccattcacaattgcttcaaagagaataaaatacctaggaatccaacttacaagggatgtgaaggacctcttcaaggagaactacaaaccactgctcatggacataagagaggacacaaacaaatggaagaacattccatgcttgtggataggaagaatcaatatcgtgaaaatgaccatagtgcacaaagtaatttatagattcaatgctatcctcatcaagctaccattgactttcttcacagaattaataaaactactttaaatttcttatggaaccaagatggagcctgaatatccaagacaatcctaagcgaaaagaacaaagctggaactatcacgctacctgactttaaaccatactacaatgctacagtaaccaaaacagcatggtactcgtaccaaaacagatatatagaccaatggaagagaacagaggcctcagtaataatgccacacatctaaaaccatctgatctttgacaaacctgacaaaaacaaggaatggggaaagaattcctcatttaataaatgtttttgggaaactagctagccatacgcagaaaactgaaactggacccaatccttacaccttatacaaaaattaactcaaggtggattaaaggcctaaacgtaagacctaaaaccataaaagctctagaagaaaacataggcagtaccatccaggacataggcgtgggcaaagacttcatgactaaaacaccaaaagccgtggcaacaaaagccaaaatagacaaatgggcctaattaaactaaagagcttctgctcagcaaaggaaactatgatcagagtgaacaggcaacctacagaatggaagaaaatttttgcaatctatccatctgacaaagggctaatacccagaatctacaaagaacttgaacaaatttacaagaaaaaaacaacctcatcaaaaagcaggcaaaggctttgaaaagacacttctcaaaagaagacaacaaatgtgcagccaacaaatatatgaaaaaatgctcatcatcacggtcattagagaaatgcaaatcaaaaccacaatgaggtaccatctcacaccagttagaatggcgatcattaaaaagtcaggaatcaacagattctggagaggttgtggagaaataggaatgcctttacactgttggtgggagtgtaaattagttcaaccattgtggaagacagtatggcgattcctcaaggatctaaaaccagaaataccttttgacccagcagtctcattgctgtgtatatactcaaaagattataaatcattctataaagacacatgcacacatatgtttatttgcagcactattcactatagcaaagacttggaaccaacccaaatacccttcagtgaaagactggataaagaaaatgtggcacatatacatcatggaatacaatgcagtcataaaaaagggtgaattcatttcctctccagggacgaggatgaagctggaaactatcactctcagcagactaacacaggaatagaaaaccaaacactgcatgttttcactcataagtgggagttgaacaatgagaacacatagacacaggcagggtaacatcacacaccggggcctgtcaggagagggtggctaatggagggatagcgttaggagaaatacctaatgtaggtgacgggttaattggtgcagcaaatgaccgtggcatgtgtatagctatgtaacaatcctgcacattctgcacatgtattctagaacttaaagtataataaaaaaagaaaaa

SEQ ID NO: 740 - DNA, 291 bp, Homo sapiens
  source 1..291: mol_type = other DNA
ggtcaggcgcggtggctcacacctgtaatcccagcactttgggaggccgaggcgggtggatcacttgaggtcagtagtttgagaccagcctgggcaacctagtgaaatcccgtctctgctaaaaatacagaacttagctgggtgtggtggtgcgtgcctatagtcccagctgcttgggaggctgaggcacaagaatcgcttgaacccgggaggtggaagctgcagtgagccgagatcacaccaccgcactccagcctgggcaacagagaaacaccctgtctcaaaaaaaaa

SEQ ID NO: 741 - DNA, 6487 bp, Homo sapiens
  source 1..6487: mol_type = other DNA
tggaggacgggaggcaggactagattgcagctcgaacttggagggacagagcagcatgtggaggcttgcattgtgaattttagctccagaacaactgcaggaataaatcaggaaacctgagaggacccacagacccactgaaggaagcagattgctcctacaggacctgggagacaccccaaatacagtgagtgcccaagctgtgtaagtgggaaagggagatcatctgcccccaaacacacaccctcactggggaaactgaaggtctagtttatgggagaagatttcgacctcacaaagagctgaggaaatttagagagctgagcaaaatacagggatggaggaagcagtgggaaaggccctgtgagctcactagtcctcaagcaggccattcctgcctggcatcacagggatcccttgggagggtggtcagaggcataggggaaatgccacaaggagaaggaagtctccagctgaactttgtaacaatttgaactggtcaagaagcctcctggccagatctcaggggagggcatgaatccggagtgcagactccacaggcgggggaagaactgaaacctactttctttcccagctgggaggtgggtagcctggggcaagttctcagccctgcttgcccactgcctggaaataagctcagtgctgttagagagggcatggtgggagtgagaccagccctttggatggcatgggagctgggtgaggcctgtgactgccggctttctcccacttccctgacaacctgcgtgactcagcagaggcatccataatcctcctaggtatataactacattgacctgggaacctcaccccaatcccccacaatagtcacagcaagacctgcccaaggagagtctgagctcagatatgcctagccctgcctacacctggtggcccttcactatccaccctggtgtctgaacacaaaggtcatgtactcttgggagttctagggccccacccaccaccggttcctccccatactaccacagctgatgctctctgcaaagcaccacctctcctcaggaggccaaccagcacaaaaatagaacattaaaccaccaaagctaagaactctcacagagtccatttcaccccactgccaccttcactgtaacaggtgctggtatccacagctgagagacccatagtaggttcacatcacaggactctgtgcacacaacccccagtaccagcctggagcctggtagacttgctgggtggctagatccagaagaaagataacaatcactacaacttggctctcaggaagccacatggataggaaaagggagagagtaccacatcacgtgaacatccatgggacaaaagaatctgaattacaggcttcatccctagaccttccctctgacagagcctacccaaatgagaaggaaccagaaaaccaactctggtaatatgacaaaacaaggctctttaatactcccccaaaatcacactagctcaccagcaatggatccaaaccaagaagaaattcctgatttccctgaaaaagaattcaggggttagttattaagctaatcatggaggcaccagagaaagacgaagcccaatgcaaggaaatccaaaaaatgatataagaagtgaagggagaaatattcagggaaatagacagcataaagaaaaaacaacaaaaacttcaggaaacattggagacacttatagcaatgcaaaatactctggaaagtctcagcaatagaattgaacaattagaagaaagaaatccagagcttgaagacaaggtcttcgaattaacccaatccaacaaagacaaaaaagaaagaataagaaaatatgaatacagccttcaagaagtctgggatgttaaatgaccaaacctaagaataattggtgttcctgaggaagaagagaaatctaaaagtttggaaaacatatttaggggaataattgaggaaaacttccccagccttgctagagacctagacatccaaatacaagaagcacaaagaacacacgggaaattcactgcaaaaagatcattgcctaggcacattgtcatcaggttatccaaagttaagatgaaggaaagaatcttaagagctgtgagaaaaaagcacaaggtaacctataaaggaaaacctatcagattaacagcagatttcttagcagaaatcctacaagctagaagggattggggccctatcttcaggctcctcaagcaaaacaattaccagcaaaaaattttgtatccagcaaaactaagcatcttatacgagggaaagatacagtctttttcagacaaatgctgagagaattcgctactaccaagccaccactacaagaactgctaaaagagctctaaatcttgaaagaaatcctggaaacacatcaaaacagaacctatttaaagcataaatctcacaggacctataaaacaaaactatgatttgaaaaacaaaaacaaaaaaccaagatacacaggcaacaaataacatgatgaatggaatggtgtctcacatttcaacactaactttgaatgcgaatggcctaaatgctccacttaaaagatgcagaactgcagaatggataagaattcaccaaccaactatctgctgctttcaagagactcacctaacacataaggactcacataaacttgaggtgaaggggtggaaaaaggcatttcatgcaatggacactgaaagcgagcaggagtagctattcttatatcagacaaaacaaactttaaagcaacagcatttaaaaaagtcaaagagggtcactatataatatttccaacagcaaaatatcacaatcctaaacatatatgcacctaacactggagctcccaaatttataaaacaattactaatagacctaagaaatgagatagacagcaacacgataatagtgggggacttcaatactccactgatagcactagacaggccatcaagacagaaagtcaacaaagaaacaatgaatttaaactatacctttgagcaaatggacttaacagatatatacagaacattccatccaacaaccacagagtacacattctattcaacagtgcatggaactttctccaaaatagaccatatgataggccataaaatgagcctcaataaatttaagaaattgaaatgatatcaagcactctctcagactataatggaataaaactggaaatcaactccaaaaggaaccttcaaaaccatgcaaatacatggaaattaaataacttgctcttgaatgatcactgggtcaaaaccgaaatcaagatggaaattaaaaaattgtttgaactgaatgacaatagtgacacagcctatccaaacctctgggatacagcaaaggcggttctaagaggaaagttcataaccttaaatgcctacatcaaaaagactgaaggaacacaaagtgacaattggaggttatatctcaaggaacaagagaatcaagaacaaaccaaacccaaacccagcagaagaaaggaaataaccaagatcggagcagaactaaatgaaattgaaacaagaaacaatacaaaggataaatgaaacaaaaacctggttctttgaaaagataaataaaattatagaacgttagcaagattaaccaagaaaagaagagagaaaatccaaaaaacctcaaaaagaaacaaaacgggagatattacaactgacaccacagaaatacaaaagataattcaaggctcctatgaacacctttacacacataaactagaaaacgtagaagagatgtatacattcctggaaatacacaaccctcctagcttaaataggaagaattagataccctgaatgaccaataacaagcagcgagactgaaatgataatttaaaaactaccaacaaaaaaagtctggaaccagaaggattcacagcagaattctaccagatattcaaagaattggtaccaatcctattgacaccattccacaagacagagaaagagggaaccctccctaaatcattctatgaagtcagcatcactctaataccaaaacaaggaaagaacatagccaaaaaagaaaactacagattgaatccctgatgaacatagattctaaagtccttaacaaaatgctagctaactgaatcctacaacatatcaaaaagataatccatcatgatcaagtgggtttcacaccagggatgcaggggatggtttaacatacacaagtcaataaatgtgatacactatataaacagaattaaaaatcacatgatcatctcaatagatgcagaaaaagcattcaacaaaatccagcatccgtttatgattgaaactctcagcaaaattggcatacaagggacatacctcaatgtaataaaagccatccatgacaaacccacaaccaacataatactgaatggggagaagttgaaagcattccctctgagaactggaacaagacaaggatgcccattctcactgcatctcttcaacatagtactggaagtcctagccagagcaatcagacaagagaaagaagcaagggacatccaaattggtaaaaaggaagtcaaactgtcactgtttgctgatgatatgatcatttacctcaaaaaccctaaagactcctccagaaagctcctagaactgaaagaagaattcagcaaagtttccagatacaaaactaatgtacacagttcagtagctctgctatacaccaacagtaaccaagcagagaatcacatgaggaagtcaaccccttttagaatagctgcaaaaaataaatcaataaaataggaatatacctaaccaaggaggttgaagacctccacagggaaaactacaaaacactgctgaaagaaatcacagaaaaaaacaaacaaatggaaacatatcccacgtcatggatgggtagaatcaatattgtcaaaatgagcacactgccaaaagcatctacaacttcattgcaattcccatcaaaataccatcattcttcacagaattagaaaaaaacaattctaaaattcgtatggaacaaaaagagagtccatatagccaaagcaagattaagcaaaaagaacaaatctgaaggcatcacattaccgatttcgaattatagtataaggccatagtcaccaaaacagcatgatactggtataaaaataggcatatagaccaattgaacagaatagagaacccagaaataaacccaaatacttatagccaacagatcttcaacaaagcaaacaaaaacataaagttggggaaaggacaccctttttaacaaatggtgctgggataattggctagccacatgtaggagaatcgaaactggatcctcgtctctcaccttgcacaaaaatcaactcaagatggattaaagacttaaatctaagacctgaaactataaaaattctagaagataactttggaaaaacccttctagacattggcttaggcaaggatttcatgaccaagaacccaaaagcaaatgcaataaaaacaaggataaatagttgggacttaattaaacaaaagagcttttgcacggcaaaaggaacagtcagtagagtaaacagacaagccacagagtgggagaaaatcttcacaatcatacatctgacaaaggactaatatccaaaatctacaactaactcatatcagcaagaaaaaaacaatcccatcaaaaagtgggctaaggacatgaatagatacttctcaaaagaagatatgcaaatggacaacaaatgtatggaaaaatgctcaacatcactaatgatcagggaaatgcaaatcaaaactgcaatacgatagtgccttactcctgtaaggatgaccatagtcaaaaaaaaaaaaaaaaaaagtaaaataaaaaaacaatagacggtggtgtggatgtggtgatcagggaacacttctacactgctggtgggaatgtaaactagcacaaccactatggaaaagtgtggagattccttaaacaactgaaagtagaactgccatttgaactgccatttgatccagcaatcccactactgggtgtctacccagaggaaaagaagttattatacgaaaaagatacttgaacatgcatgtttatagcagcacaattcgcaattgcaaagtcgtggaatcaaccccagagctcatcaatcaacaagtggataaagaaactgtggtaaaaggaatgaattaatgacattcgcagtgacctggatgagattggagaccagtattctaagtgaagtaattcaggaatggaaaagcaaacatcgtatgttctcactgatatgtgggagctaagctacaaggacccaaaagcataagaaagatacaatggactacggggacttgggaggaaagaagggaagggagcgagggataaaagactacaaatagggtgtagtgtatactgctcaggtgatggctgcactgaaatctcagaaatcaccactaaagaacttactcatgtaaccaaacaccacctgtaccccaataactta

SEQ ID NO: 742 - DNA, 314 bp, Homo sapiens
  source 1..314: mol_type = other DNA
ggccaggtgcggtggctcatgcctgtaatcccagcactttgggaggccaaggcaggcagatcacttgaggataagagttagagaccagcctggccaacatggtgaaaccccatctctactaaaaaaatacaaaaaataagccagtgtggtggcacacaactgtattcccagctacttgggaggctggggcatgagaattgcttgaacccaggaggcagaagttgcagtgagctgagatcacaccactgcactccagcctgggcgacagagtgaaattgtgtctcaaaaaaaaaaaaaccccaaagcagaaaaaa

SEQ ID NO: 743 - DNA, 2315 bp, Homo sapiens
  source 1..2315: mol_type = other DNA
atatacgcaaatcaataaatgtaatccagcatataaacagagccaaagacaaaaaccacatgattatctcaatagatgcagaaaaagcctttgacaaaattcaacaacccttcatgctaaaaactctcaataaattaggtattgatgggacgtatttcaaaataataagagctatctatgacaaacccacagccaatatcatactgaatgggcaaaaactggaagcattccctttgaaaaccggcacaagacagggatgccctctctcaccgctcctattcaacatagtgttggaagttctggccagggcaatcaggcaggagaaggaaataaagggtattcaattaggaaaagaggaagtcaaatgtttgcagacgacatgattgtttatctagaaaaccccatcgtctcagcccaaaatctccttaagctgataagcaacttcagcaaagtctcaggatacaaaatcaatgtacaaaaatcacaagcattcttatacaccaacaacagacaaacagagagccaaatcatgggtgaactcccattcacaattgcttcaaagagaataaaatacctaggaatccaacttacaagggatgtgaaggacctcttcaaggagaactacaaaccactgctcaaggaaataaaagaggatacaaacaaatggaagaacattccatgctcatgggtaggaagaatcaatatcgtgaaaatggccatactgcccaaggtaatttacagattcaatgccatccccatcaagctaccaatgactttcttcacagaattggaaaaaactactttaaagttcatatggaaccaaaaaagagcccgcatcaccaagtcaatcctaagccaaaagaacaaagctggaggcatcacactacctgacttcaaactatactacaaggctacagtaaccaaaacagcatggtactggtaccaaaacagagatatagatcaatggaacagaacagagccctcagaaataatgccgcatatctacaactatctgatctttgacaaacctgagaaaaacaagcaatggggaaaggattccctatttaataaatggtgctgggaaaactggctagccatatgtagaaagctgaaactggatcccttccttacaccttatacaaaaatcaattcaagatggattaaagatttaaacgttaaacctaaaaccataaaaaccctagaagaaaacctaggcattaccattcaggacataggcgtgggcaaggacttcatgtccaaaacaccaaaagcaatggcaacaaaagccaaaattgacaaatgggatctaattaaactaaagagcttctgcacagcaaaagaaactaccatcagagtgaacaggcaacctacaacatgggagaaaattttcgcaacctactcatctgacaaagggctaatatccagaatctacaatgaactcaaacaaatttacaagaaaaaaacaaacaaccccatcaaaaagtgggcgaaggacatgaacagacacttctcaaaagaagacatttatgcagccaaaaaacacatgaagaaatgctcatcatcactggccatcagagaaatgcaaatcaaaaccactatgagatattatctcacaccagttagaatggcaatcattaaaaagtcaggaaacaacaggtgctggagaggatgcggagaaataggaacacttttacactgttggtgggactgtaaactagttcaaccattgtggaagtcagtgtggcgattcctcagggatctagaactagaaataccatttgacccagccatcccattactgggtatatacccaaatgagtataaatcatgctgctataaagacacatgcacacctatgtttattgcggcactattcacaatagcaaagacttggaaccaacccaaatgtccaacaatgatagactggattaagaaaatgtggcacatatacaccatggaatactatgcagccataaaaaatgatgagttcatatcctttgtagggacatggatgaaattggaaaccatcattctcagtaaactatcgcaagaacaaaaaaccaaacaccgcatattctcactcataggtgggaattgaacaatgagatcacatggacacaggaagggaaatatcacactctggggactgtggtggggtcgggggaggggggagggatagcattgggagatatacctaatgctagatgacacattagtgggtgcagcgcaccagcatggcacatgtatacatatgtaactaacctgcacaatgtgcacatgtaccctaaaacttagagtataataaaaaaaaaaaa

SEQ ID NO: 744 - DNA, 6027 bp, Homo sapiens
  source 1..6027: mol_type = other DNA
ggaggagccaagatggccgaataggaacagctccggtctacacctcccagcgtgagcgacgcagaagacgggtgatttctgcatttccatctgaggtaccgggttcatctcactagggagtgccagacagtgggcgcaggccagtgtgtgtgcgcaccgtgcgcgagccgaagcagggcgaggcattgcctcacctgggaagcgcaaggggtcagggagttccctttccgagtcaaagaaaggggtgacggacgcacctggaaaatcgggtcactcccacccgaatattgcgcttttcagaccggcttaagaaacggcgcaccacgagactatatcccacacctggctccgagggtcctacgcccacggaatctcgctgattgctagcacagcagtctgagatcaaactgcaaggcggcagcgaggctgggggaggggcgcccaccattgcccaggcttgcttaggtaaacaaagcagccgggaagctcgaactgggtggagcccaccacagctcaaggaggcctgcctgcctctgtaggctccacctctgggggcagggcacagacaaacaaaaagacagcagtaacctctgcagacttaagtgtccctgtctgacagctttgaagagagcagtggttctcccagcacgcagctggagatctgagaacgggcagactgcctcctcaagtgggtccctgacccctgtgccccgagcagcctaactgggaggcaccccccagcaggggcagactgacacctcacacagccgggtactccaacagacctacagctgagggtcctgtctgttagaaggaaaactaacaaccagaaaggacatctacaccgaaaacccatctgtacatcaccatcatcaaagaccaaaagtagataaaaccacaaagatggggaaaaaacagaacagaaaaactggaaactctaaaacgcagagcgcctctcctcctccaaaggaatgcagttcctcaccagcaacagaacaaagctggatggagaatgattttgacgagctgagagaagaaggcttcagacgatcaaattactctgagctacgggaggacattcaaaccaaaggcaaagaagttgaaaactttgaaaaaaatttagaagaatgtataactagaataaccaatacagagaagtgcttaaaggagctgatggagctgaaaaccaaggctcgagaactacgtgaagaatgcagaagcctcaggagccgatgcgatcaactggaagaaagggtatcagcaatggaagatgaaatgaatgaaatgaagcgagaagggaagtttagagaaaaaagaataaaaagaaatgagcaaagcctccaagaaatatgggactatgtgaaaagaccaaatctacgtctgattggtgtacctgaaagtgatgtggagaatggaaccaagttggaaaacactctgcaggatattatccaggagaacttccccaatctagcaaggcaggccaacgttcagattcaggaaatacagagaacgccacaaagatactcctcgagaagagcaactccaagacacataattgtcagattcaccaaagttgaaatgaaggaaaaaatgttaagggcagccagagagaacggtcgggttaccctcaaaggaaagcccatcagactaacagcggatctctcggcagaaaccctacaagccagaagagagtgggggccaatattcaacattcttaaagaaaagaattttcaacccagaatttcatatccagccaaactaagcttcataagtgaaggagaaataaaatactttatagacaagcaaatgctaagagattttgtcaccaccaggcctgccctaaaagagctcctgaagcaagcgctaaacatggaaaggaacaaccggtaccagctgctgcaaaatcatgccaaaatgtaaagaccatcgagactaggaagaaaccgcatcaaccaatgagcaaaatcaccagctaacatcataatgacaggatcaaattcacacataacaatattaactttaaatataaatggactaaattctgcaattaaaagacacagactggcaagttggataaagagtcaagacccatcagtgtgctgtattcaggaaacccatctcacgtgcagagacacacataggctcaaaataaaaggatggaggaagatctaccaagccaatggaaaacaaaaaaaggcaggggttgcaatcctagtttctgataaaacagactttaaaccaacaaagatgaaaagagacaaagaaggccattacataatggtaaagggatcaattcaacaagaggagctaactatcctaaatatttatgcacccaatacaggagcacccagattcataaagcaagtcctgagtgacctacaaagagacttagactcccacacattaataatgggagactttaacaccccactgtcaacattagacagatcaacgagacagaaagtcaacaaggatacccaggaattgaactcagctctgcaccaagcagacctaatagacatctacagaactctccaccccaaatcaacagaatatacatttttttcagcaccacaccacacctattccaaaattgaccacatactgggaagtaaagctctcctcagcaaatgtaaaagaacagaaattataacaaactatctctcagaccacagtgcaatcaaactagaactcaggattaagaatctcactcaaagccgctcaactacatggaaactgaacaacctgctcctgaatgactactgggtacataacgaaatgaaggcagaaataaagatgttctttgaaaccaacgagaacaaagacaccacataccagaatctctgggacgcattcaaagcagtgtgtagagggaaatttatagcactaaatgcctacaagagaaagcaggaaagatccaaaattgacaccctaacatcacaattaaaagaactagaaaagcaagagcaaacacattcaaaagctagcagaaggcaagaaatcactaaaatcagagcagaactgaaggaaatagagacacaaaaaacccttcaaaaaatcaatgaatccaggagctggttttttgaaaggatcaacaaaattgatagaccgctagcaagactaataaagaaaaaaagagagaagaatcaaatagacacaataaaaaatgataaaggggatatcaccaccgatcccacagaaatacaaactaccatcagagaatactacaaacacctctacgcaaataaactagaaaatctagaagaaatggatacattcctcgacacatacactctcccaagactaaaccaggaagaagttgaatctctgaatagaccaataacaggctctgaaattgtggcaataatcaatagtttaccaaccaaaaagagtccaggaccagatggattcacagccgaattctaccagaggtacagggaggaactggtaccattccttctgaaactattccaatcaatagaaaaagagggaatcctccctaactcattttatgggccagcatcattctgataccaaagccgggcagagacacaaccaaaaaagagaattttagaccaatatccttgatgaacattgatgcaaaaatcctcaataaaatactggcaaaccgaatccagcagcacatcaaaaagcttatccaccatgatcaagtgggcttcatccctgggatgcaaggctggttcaatatacgcaaatcaataaatgtaatccagcatataaacagagccaaagacaaaaaccacatgattatctcaatagatgcagaaaaagcctttgacaaaattcaacaacccttcatgctaaaaactctcaataaattaggtattgatgggacgtatttcaaaataataagagctatctatgacaaacccacagccaatatcatactgaatgggcaaaaactgcaagcattccctttgaaaactggcacaagacagggatgccctctctcaccgctcctattcaacatagtgttggaagttctggccagggcaatcaggcaggagaaggaaataaagggtattcaattaggaaaagaggaagtcaaattgtccctgtttgcagaagacatgattgtttatctagaaaaccccatcgtctcagcccaaaatctccttaagctgataagcaacttcagcaaagtctcaggatacaaaatcaatgtacaaaaatcacaagcattcttatacaccaacaacagacaaacagagagccaaatcatgagtgaactcccattcacaattgcttcaaagagaataaaatacctaggaatccaacttacaagggatgtgaaggacctcttcaaggagaaccacaaaccactggtcaaggaaataaaagaggacacaaacaaatggaagaacattccatgctcatgggtaggaagaatcaatatcgtgaaaatggccatactgcccaaggtaatttacagattcaatgccatccccatcaagctaccaatgactttcttcacagaattggaaaaaactactttaaagttcatatggaaccaaaaaagagcccgcatcgccaagtcaatcctaagccaaaagaacaaagctggaggcatcacactacctgacttcaaactatactacaaggctacagtcaccaaaacagcatggtactggtaccaaaacagagatatagatcaatggaacagaacagagccctcagaaataatgccacatatctacaactatctgatctttgacaaacctgagaaaaacaagcaatggggaaaggattccctatttaataaatggtgctgggaaaactggctagccatatgtagaaagctgaaactggatcccttccttacaccttatacaaaaatcaattcaagatggattaaagatttaaacgttagacctaaaaccataaaaaccctagaagaaaacctaggcattaccattcaggacataggcgtgggcaaggacttcatgtccaaaacaccaaaagcaatggcaacaaaagccaaaattgacaaatgggatctaattaaactcaagagcttctgcacagcaaaagaaactaccatcagagtgaacaggcaacctacaacatgggagaaaattttcgcaacctactcatctgacaaagggctaatatccagaatctacaatgaactcaaacaaatttacaagaaaaaaacaaacaaccccattaaaaagtgggcgaaggacatgaacagacacttctcaaaagaagacatttatgcagccaaaaaacacatgaagaaatgctcatcatcactggccatcagagaaatgcaaatcaaaaccactatgagatatcatctcacaccagttagaatggcaatcattaaaaagtcaggaaacaacaggtgctggagaggatgtggagaaataggaacacttttacactgttggtgggactgtaaactagttcaaccattgtggaagtcagtgtggtgattcctcagggatctagaactagaaataccatttgacccagccatcccattactgggtatatacccaaaggcctataaatcatgctgctataaagacacatgcacacgtatgtttattgcggcactattcacaatagcaaagacttggaaccaacccaaatgtccaacaatgatagactggattaagaaaatgtggcacatatacaccatggaatactatgcagccataaaaaatgatgagttcatgtcctttgtagggacatggatgaaattggaaaccatcattctcagtaaactattgcaagaacaaaaaaccaaacaccgcatattctcactcataggtgggaattgaacaatgagatcacatggacacaggaaggggaatatcacactctggggactgtggtggggtcgggggaggggggagggatagcattgggagatatacctaaggctagatgacgagttagtgggtgcagcgcagcagcatggcacatgtatacatatgtaactaacctgcacaatgtgcacatgtaccctaaaacttagagtataataaaaaaaaaaaa

SEQ ID NO: 745 - DNA, 300 bp, Homo sapiens
  source 1..300: mol_type = other DNA
gctgggcgcggtggctcacacccaaaatcccagcactttaggaggctgaggtgggtcgatcacctgaggtcaggagttcaagagcagtccaatcaacatggtgaaaccccgtcctaactaaatacaaaaaattagccaggcatggtggcacatgcctgtaatcccagctacttgggaggctgaggcacgagaatcgcttgaacccaggaggtggaagttccagtgagccaagactgtaccactgcactccagcctaggcaacaagagcaaaactccatcttaaaaaataaataaataaaa

SEQ ID NO: 746 - DNA, 303 bp, Homo sapiens
  source 1..303: mol_type = other DNA
aggtgtggtggcccacacctgtaatcccagcactttgggaggccaaggcaggtggaccacctgagttcaggagttcgagaccagcctgaccaccatggagaaatcctgtttctactaaaaatacaaaattagccaggtgtggtagtgcatgcctgtagtcccagcaactcgggaggctgaggcaagagaatcgcttgaacccgggaggcagaggttgtggtgagccgagattgcaacattgcactccagtctgggcaacaagagtgaaactccgtctcaaaaaaaaaaaaaaaaaaaaaaaaa

SEQ ID NO: 747 - DNA, 1105 bp, Homo sapiens
  source 1..1105: mol_type = other DNA
ccccgtccgggaaggaggtgggggggtcagccccccgcccggccagccgccccgtccgggaggtgaggggcacctctgcccggccgcccctactgggaagtgaggagcccctctgcccggccagccgccccgtccgggagggaggtggggggtcagccccccgcccggccagccgccccgtccgggagggaggtgggggggtcagccccccgcccggccagccgccccgtccgggaggtgaggggcgcctctgcccggccgcccctactggcaagtgaggagcccctctgcccggccagccgccccgtccgggagggaggtggggggtcagccccctgcccggccagccgccctgtccgggagggaggtggggggttcagccccccgcccggccagccgccccgtccgggagggaggtgggggtgtgagccccccgcccggccagccgccccgtccgggagggaggtgggggggtcagccccccgcccggccagccgcccggtccgggaggtgaggggcgcctctcctcagccgcccctactgggacgtgaggagcccctctgcccggccaccaccccgtctgggaggtgtacccaacagctcattgagaacgggccatgatgacaatggcggttttgtggaatagaaagaggggaaaggcagggaaaggattgggaaatcggatggttgccatgtctgtgtagaaagaggtagacacgggagacttttcattttgttctgtactaggaaaaattcttctgccttgggatcctgttgatcggtgaccctacccccaaccctgtgctctctgaaacatgtgctgtgtccactcagggttaaatggattaagggcggtgcaagatgtgctttgttaaacagatgcttgaaggcagcatgctcgttaagagtcatcaccactccctaatctcaagtacccagggacacaaacactgcggaaggccgcagggtcctctgcctaggaaaaccagagacctctgttcacttgtttatctgctgaccctccctccactattgtcctatgaccctgccaaatccccctctgtgagaaacacccaagaatgatcaattaaaaaaaaaaaaaaaa

SEQ ID NO: 748 - DNA, 1459 bp, Homo sapiens
  source 1..1459: mol_type = other DNA
gccacaaaagacatttattagtaagagaagcaagcactatcatttaaggcaggaaggaataggctaactgtactgttgtgtgccaatgcagttgggtttatgatccagactgctcctaaccataaagctgctaacctaaacaccaactgccagccttttggttgtacaaaaaggcctggacaatgagaaccctttttctagattggttacatcaatacattctccctgaagttaggaagtaccttgccagtaagggactaccttttaaaaagttcttttgatattgaacaatgatgcccctggccaccagaacaccatgagttcaacaccaaaggcatcaaagtggtctactagtccccaaacacaacatgtctaattcagcctctagtcagggggtcataaggacctttaaggctgattacacatggtactctatggaaaggattgtcaacattatggaagagaaccccaatagaaagaacgtcatgaaagtctggaaggattataccattcaagatgctattgtcgttatagaaaaagccatgaaagccatcaagctcaaaacaagtttccgctggagaaaattgtgcccagatgttgtgcttgacttcacgggatttatgacagagcccatcaaggaaatcatcaaagagatttgtggatatggcaaaaaagatgaggggtgaacgttgtcaagatatggatcttggagaaattcaaggcctaatatataccacagcagaggcattcaaagatgagttgatagagatgagtgcctccgaaccagtgccagatcatgaggaagaagacgtagaaggagcagtgtcaggaaacaaactgacactagacaatctggcggaagggttccagttactcaagactacttttgacttcttttacaacatagacccttttatgataagagcaatgaaactaaagcaaagagtggaataaggattgatactgtatggaaacattgctagagaaatgaaaaagcaaaaagtcaaacaaattataatgtatttccgtaaagttaacactgagtgtgaccacctttcctgcctccccttctacctcgtccacctctctgcctctgccaccctgagacagcaagaccaactccttctcttcctcctcctcagcctactcagtgtgacaaggatgaagactgttatgatgatccacttccacttaatgaatagtagatatattttctcttccttatgattttctttataacattttattttctctagcttattttattgtaaggatacagtatacaatacatgtaacacaccaaatatatgtaatcgactatttatgttattgataaggcatctagtccattgcagactattagtagttaagtcactggggagtcaaaagttatatgtggatttttgactgctccgaggggttggtgtccctaaccccccgcattgtttaagggtcaact

SEQ ID NO: 749 - DNA, 647 bp, Homo sapiens
  source 1..647: mol_type = other DNA
ggtgaaacagcaggggctgatgtagaagctgcagcaagttctctggaagacctagctaagataactgatgaaggtggatacactaaataacagatttgcaatgtagatgaaaacaacctgagagcagtcaatgcctgatttcaaagcttcaaaggactctcttggtagggttatttaatgctgctggtaacttgaagttgaagccaatgctcatttgccattctgaaaatcctagggcccttaagaattatgctaaatctactctgcctgtgttctataagtggatcaaaaaagcatggatgacagtataacagttgcagcatggttgactgaatattttaagcccatttttgagaactactgctcagaaaaaagattcctttcaaactatttctgctcactaacaatgcacctggtcacccaacaggtctgatggagatgtacaagacgactaatgttggttccctgcctgctaacacaacatccgttctgcagcccatgggtcaaagagtaatttcaactttcaagtcttattatttaagaagtgcatttcataaggctatagctgtcactgacagtgattccactgatggatctgggcaaaatatattgaaaaccttccagaaaggattcaccattcaagatgc

SEQ ID NO: 750 - DNA, 2218 bp, Homo sapiens
  source 1..2218: mol_type = other DNA
tagatcagctaccataaatatcgttcaagtagtagataaaaacataatgaagaaataaatggaaggtataaaaatgacccaaatagaacttttagagatgaaaaatacaatatctgaagtaagaatatacactgaataggattaagagattagatactggagaagaaaatattaatgaacttgaatatatagctatataaattatccaacattaagtacaaagaaaaaagcgtataagttttgtgtttcattatcaagcagtctaatatatatgtaagtggcttctcagaagaatggagggggatagaaaaatatttgaagaaataatggtcaaattttcccccaatttgatgaaaactataaactcacagatccaagtatcttaaccaaccctaaggagaagcaacatgaaaacaaaacaatgacatgtcctaattaaattgaagagaaaaatcttaaaacttgatagtaaatgacacatgcattcagagaaagaaacataagaatgagagcacacttttcatcagaagatatgaaggcaaaaaggcaatggagcagtatctttaaagtatctttcaaaaatgaaggtgaagtaaagacttttcagccaaacaaatgctgagagaattaatcactagcagatctacactataaaaaatgttcaaggaagtttttcaggcagaaagaaaatggtactagatggaaatttggatctttagaaagaaagaacacaagaaatggaaaatatgtggataaatatataggctttaaaattttttaagcactaatagataaccgtttaaggcaaactatggcaatgatattttatgtaaaagtataatgtataatactagcaaaaaaacaaaggaggaggaaaatagaagtttacttttgtaattcttagactatttgtgaaatgacataatggtatttgacaatagactgatgaagtaaaacttgagttatctctaaaacctaacaaacagagttagagctaatacagtagctctaattattgtatggtggagagtaaatgtaataaatattactcatttaattctaaagaagacaggaaaagaggaaagaaggaacaaagataatacatttaaaccatatgatattgatatttgcattaattacagaaggtctaaatttcagttaaaaggcagagattatcagattggctagaaaagaagatgcaactatgagctgtctacatgagcccaccttaaatactaagactcagataaattaaaagtataaaaggatagaaatagatatgccatgcagacattaatctgaagaaagctggagtagctatgttaataatagacaagaagatttcagagcaaagaatttacagaggtaaagagagacaattcataatgataaaggggtcaagacatcaagaatacctaacaatcttaaatgtttatgccagagcttcaaagtacatgaagcaaaaactgatgcaattgaaagaagaactaactccacatttgtagttcaggatttcagctggtagaacaagtaaacagaatcagtagggatatagaggacatgacaattgatatagaacactttacctaggaacagcagaatactgtatattcttttcaagtgcacatggaaaatttaccaagtagaacatattgtaggccacaaaacaagtttcaataaattgaaaagtattcaaagtatggaagggtaggcaaagtatgtcctacagtagaattaaattataagttaacaatagaaagatacctagagaatctccaaatattggaatactaagtgatacacttctgaataacccatgaataaaagaagaaatgactgaataaattagaaagtgctttgaactggatgaaaacaaaaacacagcatatcaaaatgcatgggtagcgcttagagagaattaaggcaataaattatttcattagaaaagaagaaacatctcaaggcaatgatctaagcttctaccttaagaaaacagaaaaaaatgagcaaactaaatccaaaataagcagaaagaaagaagtaataaagagcagaaacaatgatataagagcagataaataatagagaaaatcaatagaaacaaaagctggttcttaaaaaagatcaataaaattgataaacctctaggtagaattatcaggaaataaaaagacacaaattatcaaatcaggaatgatagtaggggcatcactacaga

SEQ ID NO: 751 - DNA, 712 bp, Homo sapiens
  source 1..712: mol_type = other DNA
catttactcaccctgtccttctgaaaactgtgcactaccttggtttccatgacatcattctctaggttctgcttctgcctttatgactgctcagtctctgtcttctgtggacttctctgccacttaattattggtatccccagaagccttttgttactggttttgtgtttgtttctttttattcagtactttatctgagtgatcttatccactcctgttttttctgttactgccatacctttcacctagacatttatctcctttacccagacatttatctcctctgggctccagattatattcccatgtatattagaactggctatttcaaatgcatcacagactctacacattcaaaaccagaacacactttccttccctccctgaaccggttcctcttctcagtgagtaacaccaccattcacctgtcacttgaacccagaatttattctccactctgctttttccttcatctggcgcctgtgcccaatccctgcccatcactcaagttgatgatgattgagtgctatcagttctgtcatctgcttactacatctaacattcctgcccttctatctccattgcactattgccttaatttaagttttcataacccgtcacctatactggtctctctgacaaccatctttctcatcccctccccctaatccattttacattgttgccagacagatctgtctaaactatgaac

SEQ ID NO: 752 - DNA, 2458 bp, Homo sapiens
  source 1..2458: mol_type = other DNA
aaaaccagcacactaaacaaaaacacaaccaaggagcctcacagagtgactcccctgccacctccaccagagcaggtactgatatccatagctgcaagacctgaagacggatcacatcacaagaccctttgcaggcactccctactaccagcccagagcccggtagctctgctggatggctagacccagaagagcaaaaacaattactatagttcagctctcaggaagccccattcctaggggaagaggagaacactacatcaagtagtgttgggataacagaatctgaacagcagcccttgaatcccacatcttccctctgacgtagtctactcaaatgagaaggaaccagaaaatgattctggtaatatgacaaaataagtttctttaacactcccaaatgatcataccagctcatcagcaatagatccaaaccaagacaaaatctctgaattgccagaaaaagaattcagaaggttgattactcagctaatcaaggagtcatcagagaaagatgaagtccaacttaaagaaataaaaaacatgatacaggatatgaaaggaaaattcttcagtgaaatagagagcacaaattaagaacaatcacaacttctggaaatcaaggatacacttagagaaatgcaaaatgcactggaaagtctcagtaatagaatcgaacaagcagaagaaagaacttcagagctcaaagacaaggctttcacattaactcaacccatcaaagataaagaaaaaaatttttaaaaatgaacaaagcctccaagaggcttgggactatgctaaatgtctgagcctaagaataattggtgttccctaggaagaagagaaatttgaaagtttggaaaacatatttgaggtaataataaaggaaaactaaccccagccttgctaaggatctagacatccaaatacaagaaactgaaagaacacctgggaaattcatcgcaaaaagatcattgcctaggcatatggtcatcaggttatctaaaatcaagatgaaggaaaaaaatcttaagagctgtgaagcaaaagcattaggtaacttataaaggaaaacctatcagattaacaacagatttctcaccagaaaccctacaagctagaagggattggggtcctatttttagcctcattaaacaaaacagtatcagccagaattttttatccagtaaaactaggcttcatcaatgaaagaaagatacagtctttttcagacaaacaactgctgagagaattcaccactaccaagccagcactataagaactgctaaaaggagctctaaatcttgaaacaaattctcgaaatacaccaaaatagaacatccttaaagaataaatctcacagcacctatctaacaaaaacacaatgacaaaaaaaccaaggtattcagggaacaaatagcttgatgaatagaacagtacctcacgtctcaatactatcgttgaatgtaaatggcctaaatgctccacttaaaagatacagaatggcagaacggataagaatttactaaccaaggtactgctatcttcaggagactcacctaacccataaggactcacataaacttaagataaaggggtggaaaaagatattccgtgcagtggacactaaaagtgagcaggagtagctattcttatatcagacaaagcaaactttaaagcaacagcagttaaaaagacaaagaaggatattatataatgataaaaagactagtcccacaggaaaatatcaaaatcctaaatatataagcacttagcactggagctccctaatttataaagcaattactagtagacctaagaaatgagatagatggcaacacaataatagtgtggaactttaatactccattgacaacactagacaggtcatcaggatagaaagtcaacaaagaagcagtgaagttaaactataccgtagaacaaatggacttaacagatatttacagaacattttaccgaacaactacagaatatacattctttcatcaacacatagaacatcctccaagatagaccatatgagaggccacaaaaacaagtctcagtaaatttaagaaaatcaaaattatatcaggtactctctcagaccacagtggaataaaattggatattaacttcaaaaggaaccctcaaaaccatgcaaatacatggaaattaaataacctgctcctaagtgatcattggaccaacaatgatatcaagatggaaattaaaaacatttttgaacaaatgataatagtgacaaaacctctagatacagcaaaagcggggctaagaggaaagtttatagcattaaatgcctacatcaaaatgcctgaaagagcacaaatatacaatcaaatgtcacaactcatggaactagagaaacaagaataatccaaaaccaaacccagcaggaaaaaagaaataatgaacaccaagctgagaatcaaataaa

SEQ ID NO: 753 - DNA, 6030 bp, Homo sapiens
  source 1..6030: mol_type = other DNA
ggggaggagccaagatggccgaataggaacagctccgctctacagctcccagtgtgagcgacgcagaagacggtgatttctgcatttccatctgaggtaccgggttcatctcactagggagtgccagacagtgggcgcaggccagtgtgtgtgcgcaccgtgcgcgagccgaagcagggcgaggcattgcctcacctgggaagcgcaaggggtcagggagttccctttccgagtcaaagaaaggggtgacggacgcacctggaaaatcgggtcactcccacccgaatattgcgcttttcagaccggcttaagaaacggcgcaccacgagactatatcccacacctggctcggagggtcctacgcccacggaatctcgctgattgctagcacagcagtctgagatcaaactgcaaggcggcaacgaggctgggggaggggcgcccgccattgcccaggcttgcttaggtaaacaaagcagccgggaagctcgaactgggtggagcccaccacagctcaaggaggcctgcctgcctctgtaggctccacctctgggggcagggcacagacaaacaaaaagacagcagtaacctctgcagacttaagtgtccctgtctgacagctttgaagagagcagtggttctcccagtacgcagctggagatctgagaatgggcagactgcctcctcaagtgggtccctgactcctgacccccgagcagcctaactgggaggcaccccccagcaggggcacactgacacctcacacggcagggtattccaacagacctgcagctgagggtcctgtctgttagaaggaaaactaacaaccagaaaggacatctacaccgaaaacccatctgtacatcaccatcatcaaagaccaaaagtagataaaaccacaaagatggggaaaaaacagaacagaaaaactggaaactctaaaacgcagagcgcctctcctcctccaaaggaacgcagttcctcaccagcaacagaacaaagctggatggagaatgattttgacgagctgagagaagaaggcttcagacgatcaaattactctgagctacgggaggacattcaaaccaaaggcaaagaagttgaaaactttgaaaaaaatttagaagaatgtataactagaataaccaatacagagaagtgcttaaaggagctgatggagctgaaaaccaaggctcgagaactacgtgaagaatgcagaagcctcaggagccgatgcgatcaactggaagaaagggtatcagcaatggaagatgaaatgaatgaaatgaagcgagaagggaagtttagagaaaaaagaataaaaagaaatgagcaaagcctccaagaaatatgggactatgtgaaaagaccaaatctacgtctgattggtgtacctgaaagtgatgtggagaatgaaaccaagttggaaaacactctgcaggatattatccaggagaacttccccaatctagcaaggcaggccaacgttcagattcaggaaatacagagaacgccacaaagatactcctcgagaagagcaactccaagacacataattgtcagattcaccaaagttgaaatgaaggaaaaaatgttaagggcagccagagagaaaggtcgggttaccctcaaaggaaagcccatcagactaacagcggatctctcggcagaaaccctacaagccagaagagagtgggggccaatattcaacattcttaaagaaaagaattttcaacccagaatttcatatccagccaaactaagcttcataagtgaaggagaaataaaatactttatagacaagcaaatgttgagagattttgtcaccaccaggcctgccctaaaagagctcctgaaggaagcgctaaacatggaaaggaacaaccggtaccagccgctgcaaaatcatgccaaaatgtaaagaccatcgagactaggaagaaactgcatcaactaatgagcaaaatcaccagctaacatcatcatgacaggatcaaattcacacataacaatattaactttaaatataaatggactaaattctgcaattaaaagacacaaactggcaagttggataaagagtcaagacccatcagtgtgctgtattcaggaaacccatctcacgtgcagagacacacataggctcaaaataaaaggatggaggaagatctaccaagccaatggaaaacaaaaaaaggcaggggttgcaatcctagtctctgacaaaacagactttaaaccaacaaagatcaaaagagacaaagaaggccattacataatggtaaagggatcaattcaacaagaggagctaactatcctaaatatttatgcacccaatacaggagcacccagattcataaagcaagtcctcagtgacctacaaagagacttagactcccacacattaataatgggagactttaacaccccactgtcaacattagacagatcaacgagacagaaagtcaacaaggatacccaggaattgaactcagctctgcaccaagcagacctaatagacatctacagaactctccaccccaaatcaacagaatatacatttttttcagcaccacaccacacctattccaaaattgaccacatagttggaagtaaagctctcctcagcaaatgtaaaagaacagaaattataacaaactatctctcagaccacagtgcaatcaaactagaactcaggattaagaatctcactcaaagccgctcaactacatggaaactgaacaacctgctcctgaatgactactgggtacataacgaaatgaaggcagaaataaagatgttctttgaaaccaacgagaacaaagacaccacataccagaatctctgggacgcattcaaagcagtgtgtagagggaaatttatagcactaaatgcctacaagagaaagcaggaaagatccaaaattgacaccctaacatcacaattaaaagaactagaaaagcaagagcaaacacattcaaaagctagcagaaggcaagaaataactaaaatcagagcagaactgaaggaaatagagacacaaaaaacccttcaaaaaatcaatgaatccaggagctggttttttgaaaggatcaacaaaattgatagaccgctagcaagactaataaagaaaaaaagagagaagaatcaaatagacacaataaaaaatgataaaggggatatcaccaccgatcccacagaaatacaaactaccatcagagaatactacaaacacctctacgcaaataaactagaaaatctagaagaaatggatacattcctcgacacatacactctcccaagactaaaccaggaagaagttgaatctctgaatcgaccaataacaggctctgaaattgtggcaataatcaatagtttaccaaccaaaaagagtccaggaccagatggattcacagccgaattctaccagaggtacaaggaggaactggtaccattccttctgaaactattccaatcaatagaaaaagagggaatcctccctaactcattttatgaggccagcatcattctgataccaaagccgggcagagacacaaccaaaaaagagaattttagaccaatatccttgatgaacattgatgcaaaaatcctcaataaaatactggcaaaccgaatccagcagcacatcaaaaagcttatccaccatgatcaagtgggcttcatccctgggatgcaaggctggttcaatatacgcaaatcaataaatgtaatccagcatataaacagagccaaagacaaaaaccacatgattatctcaatagatgcagaaaaagcctttgacaaaattcaacaacccttcatgctaaaaactctcaataaattaggtattgatgggatgtatttcaaaataataagagctatctatgacaaacccacagccaatatcatactgaatgggcaaaaactggaagcattccctttgaaaactggcacaagacagggatgccctctctcaccgctcctattcaacatagtgttggaagttctggccagggcaatcaggcaggagaaggaaataaagggtattcaattaggaaaagaggaagtcaaattgtccctgtttgcagacgacatgattgtttatctagaaaaccccatcgtctcagcccaaaatctccttaagctgataagcaacttcagcaaagtctcaggatacaaaatcaatgtacaaaaatcacaaacattcttatacaccaacaacagacaaacagagagccaaatcatgggtgaactcccattcacaattgcttcaaagagaataaaatacctaggaatccaacttacaagggatgtgaaggacctcttcaaggagaactacaaaccactgctcaaggaaataaaagaggagacaaataaatggaagaacattccatgctcatgggtaggaagaatcaatatcgtgaaaatggccatactgcccaaggtaatttacagattcaatgccatccccatcaagctaccaatgactttcttcacagaattggaaaaaactactttaaagttcatatggaaccaaaaaagagcctgcattgccaagtcaatcctaagccaaaagaacaaagctggaggcatcacactacctgacttcaaactatactacaaggctacagtaaccaaaacagcatggtactggtacaaaaacagagatatagatcaatggaacagaacagagccctcagaaataatgccgcatatctacaactatctgatctttgacaaacctgagaaaaacaagcaatggggaaaggattccctatttaataaatggtgctgggaaaactggctagccatatgtagaaagctgaaactggatcccttccttacaccttatacaaaaatcaattcaagatggattaaagatttaaacgttaaacctaaaaccataaaaaccctagaagaaaacctaggcattaccattcaggacataggcgtgggcaaggacttcatgtccaaaacaccaaaagcaatggcaacaaaagacaaaattgacaaatgggatctaattaaactaaagagcttctgcacagcaaaagaaactaccatcagagtgaacaggcaacctacaacatgggagaaaatttttgcaacctactcatctgacaaagggctaatatccagaatctacaatgaactcaaacaaatttacaagaaaaaaacaaacaaccccatcaaaaagtgggcgaaggacatgaacagacacttctcaaaagaagacatttatgcagccaaaaaacacatgaagaaatgctcatcatcactggccatcagagaaatgcaaatcaaaaccactatgagatatcatctcacaccagttagaatggcaatcattaaaaagtcaggaaacaacaggtgctggagaggatgtggagaaataggaacacttttacactgttggtgggactgtaaactagttcaaccattgtggaagtcagtgtggcgattcctcagggatctagaactagaaataccatttgacccagccatcccattactgggtatatacccaaatgagtataaatcatgctgctataaagacacatgcacacgtatgtttattgcggcactattcacaatagcaaagacttggaaccaacccaaatgtccaacaatgatagactggattaagaaaatgtggcacatatacaccatggaatactatgcagccataaaaaatgatgagttcatatcctttgtagggacatggatgaaattggaaaccatcattctcagtaaactatcgcaagaacaaaaaaccaaacaccgcatattctcactcataggtgggaattgaacaatgagatcacatggacacaggaaggggaatatcacactctggggactgtggtggggtcgggggaggggggagggatagcattgggagatatacctaatgctagatgacacattagtgggtgcagcgcaccagcatggcacatgtatacatatgtaactaacctgcacaatgtgcacatgtaccctaaaacttagagtataataataaaaaaaaaa

SEQ ID NO: 754 - DNA, 5912 bp, Homo sapiens
  source 1..5912: mol_type = other DNA
gtttgtgggagaactttctgaccttacctggagttgagtcaatttagagagctgagcaaaatacagggatagaggaagcagtgggaaaggacctgggagctcactgggtccctaagcatgccatccctgcttggtaccacagggatcttttgggagggtgaccagaggcacagggtaaaatgccacagggagaaggaagtccccagctgaactttgtaacaatttgaatccagcaagaagcctcctggccagaacctggggaagggcacgaatctggtgtgcagactccacgggtgagggaagaaccaaatcctttttcttctgcacctgggaagtggctagtctggggcaagttctcaagccgtgctcatctactgcctggaaacaggatgttgggggaggggcatgatgggagggagaccagcccttcagattgtgtgggagctgagtgaggcctgtgactgttggttttcccctacttccctggcaacctgcatgactcagcagaagcagccatgatcctcctaggtagatgactccattgacctgggaacctcacccccattccccacagcagctgcagcaagacccttccaaggagagtctgagctcagacacacctagccctgcccccacctgatgggccttccctacccaccctggtagctgaagacaaacgctatatactcttgggagttctagggccccgcccaccaccacttcctcttcgtaccaccacagctgatgctctctggaaagtgccacctcctggcaggacgccaaccagcacaaaaatagaactttaaatcaccaaaggtaagaaccctcacagagcccatttcatctccctgccacctccactggaacaggtgctggtatcaatggctgagaggcccatagacagttcacatcacagggctctgtgcagacaaaccccagtaccagcctggagcctggtagacttgctgggtggctacacccagaagagatataacaatcactgcagcttatctcacaggaagccacatccatagaaaaaaggggagagtactatattaagggaacatcccctgggacaaaataatctgaacagtagccttcacccgtagacttttcctctgacagagcctacccaaatgagaaggaaccagaaaaccaactctggtgatatgacaaaacaaggctctttaacacccccaaaaaatcacactagctcaccagcaatcgatccaaaccaagaagaaatccctgattaacctgaagaagaattcaggaggttacttattaagctaatcagggagacaccagcgaaaggcaagaaaatccaaaaaacaatacaagaagtgaaggaagaaatatttaaggaaatagattgttaaagaacaaacaatcaaaacttcaggaaaccttggacactcttatagaaatgcaaaatgttctggaaagtctcagcaatagaattgaacaagtagaagaaagaaattcggagctcaaagacaaggtcttcaaattaacccaatccaacaaagacaaagaaaaaataagaaaatataaacaaggcctccaagaagtctggaattatggtaaatgaccaaacctaagaataaggaagaggtattcctgaggaagaaaaggaatctaaaagtttggaaacatatttggggagataatcaaggaaaatttccttggcctagctagagacctcgacatccaaatacaagaagcacaaagaagatctgggaaattcatcacagaaagataatcacctaggcacatcatcatcaggttatgatgaagttaagatgaaggaaagaagtgtaagacctacgagacaaaagcaccagttaacttataaaggaaaacctatgagattaacagcagatttctcagcagaaaccctacaagcgagaaggaattgaggctttatcttcagaatcctcaaacaaaacaattatcagccaagaattttgtatccagtgaaactgagcatcatatatgaaggaaagatatagtcttttttagacaaacaaatgctgagagaattcgccactattaaggaagcaccacaagagctgctataaggagctctaaatcttgaaacaaatccagaaacacatcaaaacagaacctcttgaaagcataaatcacataggacctataaaacaaaaatacaatttaaaaagcaaaaacaaaaaacaaaaaatccaaggtacacaggcaacaaatagcacaatgaatgcaatgataccttacatctcaatactacattgaatgtaaatcgcctaagtgctccacttaaaagatatagaactgcagaatggataagaacttaccaatcaactatctgctgccttcaggagactcacctaacacgtaaggactcacataaacttaaagtaaaggggtggagaaaggcatttcatgcaaatggacgtcaaaagcaagcaggggtagctattcttacatcagacaaaacagactttaaagcaacaagcaacagcagttaaaagagaaaaagagggatattaaataatgttaaaaggccttgtccagcaggaaaatatcacaatcctaaacatacatgcacgtaacattggagctctcaaaattgtaaaacagttactaatagaactaagaattgagatagacagcaacacaataataatgagggacttcaatactccactgacagcactagacaggtcatcaagacaaagtcaacaaagaaacaatggattaaaactataccatggaacaaatggacttaacagatatatacagaacatttcatccaacaactgcagaatgcacattcttttcaacagtgcatggaaccttctccaagacaggacacgtgataggccataaaacaagcctcaataaatttaagaaaattgaaattatatcaagcactttctcagaccacagtggaataaaactagaaatcaactctaaacagaaccttcaaaactatgcaaatacatggaaattaaataacctgctcctgagtgagcattgggtcaaaaatgaaatcaagatagaaatttaaaaattctttgaactgaatgacaataatgacacaacctatcaaaatctgtgggatacagcaaaggtggtgttaagaggaaagttcacggccctaaatgcctacatcaaaaggactgaaagagcacaaactgacattctaaggtcacacttcaaggaactagagaaacaagaacaaactaaaccgaaacccagcagaagaaaggaaataacccggatcagacctgaactaaaagaaatggaaacaaacaaacaaaaaacaatacaaaacattaatgaaacaaaaagctgattctttgaaaagataaataaagttgatagaccattaacaagattaacctagaagagagaaaatccaaataacctcattaagaaacaaaatgggagatattgcaactgataactgaaacacaaaagatcattcaaggctactttgaacacctttatacacataaactagaaaacctagaagagatggataaatttctggaaaaatacaactctcctagcttaaatcaggaaaaattagataccttgaacagaccaatagcaagcagtgagattgaaaggataattaaaaaattaccaacaataaaaaagtccggggccagacggattcacagcaggcattcaaagaagaattggtaccaatctttttgacattattccacaagatagagaaagggagaaccctccctaattcattctatgaaaccagcatcaccctaatacccaaaccaggaaagggcataaccaaaagagaaaactactgaccgatataaccaatgaacttagatgctaaaatccctaataaaatgctagctagccaaatccaacaacatatcaaaaagataatctaccatgatcaagtgggtttcataccagggatgcaggaatggttaagcataggcaagtcagtaaatgtgatacagcacataaacagaattaaaaacaaaaatcacctgatcatctcaatagatgcagaaaaagcatccaacaaaatctggcatccctttacgattaaaactcttagcaaagtcggcatacaaggaacatacctcaatataataaaagccatctacgacaaacccacaaccagcataataatgaatgaggaaaagttgcaagcattccctctgagaactggaacaagacaaggatgcccaatctcaccacccctcttcagcatagtactggaagtcctagccagagcaatcagacaagagaaagaaataaagggcatccaaatcagtaaagagaaagtcaaactgtccctgtttgctgttgatatcatttaccttgaaaaccccaaagacgactccagaaagctcctagaactgatagaagaatttggcaaagtttctggatacaatattaaggtatagaaatcagtagctcttctatacttcaacagtgaccaagcagagaatcaaatcaagaattcaaccccttttacaatagctgcaaacaaacaaacaaacaaaaacaaaaacaaaaaacttagaaatatacctaaccaaagaggccaaggacctctacaaggaaagctacaaaacactgctgaaagaaatcacagatgacacaaacaaatggaaacacatcccatgcttatggatgggtagaatcaatattgtgaaaatgactgtactgtcaaaagcaatctacaaattcaattcagtccccgtcaaaataccaccatcattctttcttcacagaattagaaaaaacaattctaaaattcatatggaaccaaaaaagagcctgcatagccaaagcaagactaagcaaaaagaacaaatctggaggcatcacaccacttgatttcaaactataagaccatagtcaccaaaacagcatggtactggtataaaaataggcacatagaccaatggaacagaatagagaacacagaaataaacccaaatacttacagccaactgttcttcgacaaagcaaacaaagacataaagtgggtaaatgacacccttttcaacaaatggtgctgagataataagctagccacatgtaggagagtgaaactggatcctcatctctcaccttatacaaaaattaattcaagatggattaaggacttaaatctaagacctgaagctataaaaattctagaagataacattggaaaaacttttctagacattggcttaggcaaggatttcatgaccaagaacccaaaagcaaatgcaataaaaacaaagataaatagttgggacctaattaaactaaagagcttttgcacctcaaaaggaatagtcagcagagtaaacagacaacccacagagtgggggaaaattttcacaatctatacgtctgacaaaggactaatatccagaattgacaacaaactcaaacaaatcagtaagaaaacaaacaaacaatcccatcaaaaagtaggctaaggacatgaatagacaattctcaaaggaagatatacaaatagccaacaagcatttgaaaaaacgctcaacatcactaatgatcagggaagtgcaaatcaaaaccacagtgcaataccaccttactcctgcaagaatggccataatcaaaaaatcaaaaaacaggagatgttggtgtggatgcggtgatcagggaacacttctacactgctggtgggaatgtaaactagtaaggccactatggcaaacagtgtggagattccttaaagaactaaaagtagaactaccatttgatctggtggtctcactactgggtatctacccagaggaaagtaagtcattatatgaaaaagatacttgcccacgaatgtttatagcggcacatttcgcaattgcaaaatcatggatccaacccaaatgcccatcaatcaatgagtggataaagaaactgtg

SEQ ID NO: 755 - DNA, 6029 bp, Homo sapiens
  source 1..6029: mol_type = other DNA
gaaggaggagccaagatggccgaataggaacagctccggtctacagctcccagcgtgagcgacgcagaagacggtgatttctgcatttccatctgaggtaccgggttcatctcactagggagtgccagacagtgggcgcaggccagtgtgtgtgcgcaccgtgcgcgagccgaagcagggcgaggcattgcctcacctgggaagcgcaaggggtcagggagttccctttccgagtcaaagaaaggggtgacggacgcacctggaaaatcgggtcactcccacccgaatattgcgcttttcagaccggcttaagaaacggcgcaccacgagactatatcccacacctggctcggagggtcctacgcccacggaatctcgctgattgctagcacagcagtctgagatcaaactgcaaggcggcaacgaggctgggggaggggcgcccgccattgcccaggcttgcttaggtaaacaaagcagccgggaagctcgaacagggtggagcccaccacagctcaaggaggcctgcctgcctctgtaggctccacctctgggggcagggcacagacaaacaaaaagacagcagtaacctctgcagacttaagtgtccctgtctgacagctttgaagagagcagtggttctcccagcacgcagctggagatctgagaacgggcagactgcctcctcaagtgggtccctgactcctgacccccgagcagcctaactgggaggcaccccccagcaggggcacactgacacctcacacggcagggtattccaacagacctgcagctgagggtcctgtctgttagaaggaaaactaacaaccagaaaggacatctacaccgaaaacccatctgtacatcaccatcatcaaagaccaaaagtagataaaaccacaaagatggggaaaaaacagaacagaaaaactggaaactctaaaacgcagagcgcctctcctcctccaaaggaacgcagttcctcaccagcaacagaacaaagctggatggagaacgactttgacgagctgagagaagaaggcttcagacgatcaaattactctgagctacgggaggacattcaaaccgaaggcaaagaagttgaaaactttgaaaaaaatttagaagaatgtataactagaataaccaatacagagaagtgcttaaaggagctgatggagctgaaaaccaaggctcgagaactacgtgaagaatgcagaagcctcaggagccgatgcgatcaactggaagaaagggtatcagcaatggaagatgaaatgaatgaaatgaagcgagaagggaagtttagagaaaaaagaataaaaagaaatgagcaaagcctccaagaaatatgggactatgtgaaaagaccaaatctacgtctgattggtgtacctgaaagtgatgtggagaatggaaccaagttggaaaacactctgcaggatattatccaggagaacttccccaatctagcaaggcaggccaacgttcagattcaggaaatacagagaacgccacaaagatactcctcgagaagagcaactccaagacacataattgtcagattcaccaaagttgaaatgaaggaaaaaatgttaagggcagccagagagaaaggtcgggttaccctcaaaggaaagcccatcagactaacagtggatctctcggcagaaaccctacaagccagaagagagtgggggccaatattcaacattcttaaagaaaagaattttcaacccagaatttcatatccagccaaactaagcttcataagtgaaggagaaataaaatactttatagacaagcaaatgttgagagattttgtcaccaccaggcctgccctaaaagagctcctgaaggaagcgctaaacatggaaaggaacaaccggtaccagccgctgcaaaatcatgccaaaatgtaaagaccatcgagactaggaagaaactgcatcaactaatgagcaaaatcaccagctaacatcataatgacaggatcaaattcacacataacaatattaactttaaatataaatggactaaattctgcaattaaaagacacagactggcaagttggataaagagtcaagacccatcagtgtgctgtattcaggaaacccatctcacgtgcagagacacacataggctcaaaataaaaggatggaggaagatctaccaagccaatggaaaacaaaaaaaggcaggggttgcaatcctagtctctgataaaacagactttaaaccaacaaagatcaaaagagacaaagaaggccattacataatggtaaagggatcaattcaacaagaggagctaactatcctaaatatttatgcacccaatacaggagcacccagattcataaagcaagtcctcagtgacctacaaagagacttagactcccacacattaataatgggagactttaacaccccactgtcaacattagacagatcaacgagacagaaagtcaacaaggatacccaggaattgaactcagctctgcaccaagcagacctaatagacatctacagaactctccaccccaaatcaacagaatatacatttttttcagcaccacaccacacctattccaaaattgaccacatagttggaagtaaagctctcctcagcaaatgtaaaagaacagaaattataacaaactatctctcagaccacagtgcaatcaaactagaactcaggattaagaatctcactcaaagccgctcaactacatggaaactgaacaacctgctcctgaatgactactgggtacataacgaaatgaaggcagaaataaagatgttctttgaaaccaacgagaacaaagacaccacataccagaatctctgggacgcattcaaagcagtgtgtagagggaaatttatagcactaaatgcctacaagagaaagcaggaaagatccaaaattgacaccctaacatcacaattaaaagaactagaaaagcaagagcaaacacattcaaaagctagcagaaggcaagaaataactaaaatcagagcagaactgaaggaaatagagacacaaaaaacccttcaaaaaatcaatgaatccaggagctggttttttgaaaggatcaacaaaattgatagaccgctagcaagactaataaagaaaaaaagagagaagaatcaaatagacacaataaaaaatgataaaggggatatcaccaccgatcccacagaaatacaaactaccatcagagaatactacaaacacctctacgcaaataaactagaaaatctagaagaaatggatacattcctcgacacatacactctcccaagactaaaccaggaagaagttgaatctctgaatcgaccaataacaggctctgaaattgtggcaataatcaatagtttaccaaccaaaaagagtccaggaccagatggattcacagccaaattctaccagaggtacaaggaggaactggtaccattccttctgaaactattccaatcaatagaaaaagagggaatcctccctaactcattttatgaggccagcatcattctgataccaaagccgggcagagacacaaccaaaaaagagaattttagaccaatatccttgatgaacattgatgcaaaaatcctcaataaaatactggcaaaccgaatccagcagcacatcaaaaagcttatccaccatgatcaagtgggcttcatctctgggatgcaaggctggttcaatatacgcaaatcaataaatgtaatccagcatataaacagagccaaagacaaaaaccacatgattatctcaatagatgcagaaaaagcctttgacaaaattcaacaacccttcatgctaaaaactctcaataaattaggtattgatgggacgtatttcaaaataataagagctatctatgacaaacccacagccaatatcatactgaataggcaaaaactggaagcattccctttgaaaaccggcacaagacagggatgccctctctcaccgctcctattcaacatagtgttggaagttctggccagggcaatcaggcaggagaaggaaataaagggtattcaattaggaaaagaggaagtcaaattgtccctgtttgcagacgacatgattgtttatctagaaaaccccatcgtctcagcccaaaatctccttaagctgataagcaacttcagcaaagtctcaggatacaaaatcaatgtacaaaaatcacaagcattcttatacaccaacaacagacaaacagagagccaaatcatgggtgaactcccattcacaattgcttcaaagagaataaaatacctaggaatccaacttacaagggatgtgaaggacctcttcaaggagaactacaaaccactgctcaaggaaataaaagaggagacaaacaaatggaagaacattccatgctcatgggtaggaagaatcagtatcgtgaaaatggccatactgcccaaggtaatttacagattcaatgccatccccatcaagctaccaatgcctttcttcacagaattggaaaaaactactttaaagttcatatggaaccaaaaaagagcccgcattgccaagtcaatcctaagccaaaagaacaaagctggaggcatcacactacctgacttcaaactatactacaaggctacagtaaccaaaacagcatggtactggtaccaaaacagagatatagatcaatggaacagaacagagccctcagaaataatgccgcatatctacaactatctgatctttgacaaacctgagaaaaacaagcaatggggaaaggattccctatttaataaatggtgctgggaaaactggctagccatatgtagaaagctgaaactggatcccttccttacaccttatacaaaaatcaattcaagatggattaaagatttaaacgttaaacctaaaaccataaaaaccctagaagaaaacctaggcattaccattcaggacataggcgtgggcaaggacttcatgtccaaaacaccaaaagcaatggcaacaaaagacaaaattgacaaatgggatctaattaaactaaagagcttctgcacagcaaaagaaactaccatcagagtgaacaggcaacctacaacatgggagaaaatttttgcaacctactcatctgacaaagggctaatatccagaatctacaatgaactcaaacaaatttacaagaaaaaaacaaacaaccccatcaaaaagtgggcgaaggacatgaacagacacttctcaaaagaagacatttatgcagccaaaaaacacatgaagaaatgctcatcatcactggccatcagagaaatgcaaatcaaaaccactatgagatatcatctcacaccagttagaatggcaatcattaaaaagtcaggaaacaacaggtgctggagaggatgcggagaaataggaacacttttacactgttggtgggactgtaaactagttcaaccattgtggaagtcagtgtggcgattcctcagggatctagaactagaaataccatttgacccagccatcccattactgggtatatacccaaatgagtataaatcatgctgctataaagacacatgcacacgtatgtttattgcggcactattcacaatagcaaagacttggaaccaacccaaatgtccaacaatgatagactggattaggaaaatgtggcacatatacaccatggaatactatgcagccataaaaaatgatgagttcatatcctttgtagggacatggatgaaattggaaaccatcattctcagtaaactatcgcaagaacaaaaaaccaaacaccgcatattctcactcataggtgggaattgaacaatgagatcacatggacacaggaaggggaatatcacactctggggactgtggtggggtcgggggaggggggaggatagcattgggagatatacctaatgctagatgacacattagtgggtgcagcgccccagcatggcacatgtatacatatgtaattaacctgcacaatgtgcacatgtaccctaaaacttagagtataataaaaaaaaaaaa

SEQ ID NO: 756 - DNA, 900 bp, Homo sapiens
  source 1..900: mol_type = other DNA
tatttccatctggatattttaacaggcacctcaagtttaaagcatatgaaactgaacttgattctttctctacaaacctacagctatcagttttcctcattttcctgttctccaggccaaaaaccatgaaaccacccttgactcctttctctcttacatcctatagcacacaggtaaaagcaactcctgaggtcttttcctccacaatgtacacaatatagccagagtccagccacttctcatcacttccactgcttgcaccctagacaccaagctgtcaccatcttcccttgcctgattaccgctatctcctaaattgtgtcctgttttgtctcgccttcttttggcctattaccattaggagagccagactgatccagttaaaaagcaggctcaaatcatgtcactcctccattcaaaccttcgattggcttttcatctaagtcaaagaaagtctgacactgcctcctgttactatcctaccactgctacctttccctgccaaatttgctaactaattctattccaggtatttgcctgctattctagtaaaagcaggtcctgccttagggctctacatttgctgtttgctgtgccttaattttccttctggatttgtacagctgaattcatctccttcaagttttcactcaaatgacatttttttggtaaggccttccttgaccatcctatttaaaatggcactctctccaccctttcccagctttatttttattcacagtattagttactttctaatataagagttattttttatctcccttttatctcccttacagaatgtaaactctatagcagcaaagacttttttactgttcaatctccagtgcctagaacagatcctggcatactgtatccaattaacactggctgaatgaa

SEQ ID NO: 757 - DNA, 2256 bp, Homo sapiens
  source 1..2256: mol_type = other DNA
caaaaaccacaagattatctaaatagatgcagaaaaggccttcgataaaaatcctcattccttcatgttaaaaactctcaataaactaggtattgaaggaacatacctcaaaataataagagccatttatgacaaactcacagccagtgtccttactgaatgggcaaaagctgaaagcattccccttgaaaaccagcacaagacaagtttgccctctctcccaacccctattcaatatagtattggaagttatggccacggcaatcgggcaagagaaaaaaatgaagagtatttaaatgggaaaagaggaagtcaaactatctttttttgcaggtgacataatcctatatctagaaaacccattgtctcaacccaaaagcttcttaagctgataagcaacttcagcaaagtctcaggataaaaaatcaaagtgcaaaaattgctatacaccaacaacaggcaagccaagagccaaatcatgaatgagctttgattcacaattgctacaaaaagaacaaaatacctaggaatacagctaacaagggaagtgaaggacctcttcaaggagaactacaaagcactgctcaaagaaatcagagatgatgcaaacaaatggaaaaacgttccatgctcatggataggaagaatcaatattatgtaaatggtcatactgcccaaagcaacttataaattcaatgttattcccattaaattaccactgacattcttcacataattagaaaaaactattttgaaatttatatggaaccaaaaaagagcctgaatactgaaagcaatccttagcaaaaagaacaaaggtggaggcatcaggctagctgacttcaaactatacgatagggctacagtaaccaaaatagcacggtactggtacaaaaacagagacatagaccaatggaaaagaatagagaatacagaaataagactgcacacctacaactgtctcatctttgacaaacctgacaaaaacaagcaatggagaaaggattccctatttaataaatggtgctgggagaactagctagccatatgcaggatattgaaactggcaccttccttacgccttacacaaaaatcaactcaagatggattaaagacttacatgtaaaaccccaaactataaaaacactagaagaaaacctgggcaataccatttaggatataggcattggcaaagatttcatgatgaaaacactaaaagcaattgcaacaaaagcaaaaattagcaaatgggtctaattaaactaaagagcttctgcacagcaaaaggaactattaacagagtaaacagacaacctacagaacgggcgaaaattgttgcaatctatgtatctgacaaagccctaatatccagaatctataaggaacttaaacaaatttacaaaaaaaagcaaccccattaaaaagtgggcaaaggacatgaacagacacttctcaaaagaagacatacatgtggctaacaaacatgaaaaaagccttcacatcactaattattagataaatgcaaatcaaaaccaaatgagataccatcttacatcattcaggatggtgattattaaaaagtcaaaaaatgacagatgctgatgaggatgtgaagaaaaaggaacactttaatactgttggtgggagtgtaaattagttcaaccattgtggaaaacagtctggtgattcttcaaagacaaagaggcagaaataccattctacccagcaatctcattactggttatatactcaaaggaatataaatcattttcttataaagacacatgcacatatatgtttattgcagcactattcacaatagcagacatagaatcaacctaaatgcctatcagtgatagattggataaagaaaatgtacatatacaacatggaatactatgcaggcataaaaaggaatcaggtcatgtgcttcgcagggacatggatggagctggaggccatcatccttagcaaacttacacaggaacagaaaaccaaatactgcatgttctcacttacaagtgggagcaaaatgatgagaatacatggacacatggcggggaacaacacacactagggtgtgttggagagtagggagaggatcaggaagaataactattggataatgggcttaatacctgggtgataggatgatctgtgtagcaaaccaccatggcacacatttacctatgtaacaaacctgcatatcctgcacatgtatccctgaacttaaaataaaagttggaaataaaaaaa

SEQ ID NO: 758 - DNA, 6443 bp, Homo sapiens
  source 1..6443: mol_type = other DNA
aagatggccaaataggaacagctccagtctgcaggtcacagtgagatcaacgcagaaggcaggtgatttctgcatttccaactgaggtacccagctcatctcattgcgactgcttagacagtgggtgcagcccacagagggcgagccgaagcaggatagggcatcgtctcaccagggaagcgcaagcggttggggaactccctcccctagccaagggaaaccatgaggaaatgtgctgtgaggaatggtgcactccggcctaggtactacacttttcccacggtcttcacaacccgcagaccaggagattccctcaggtgcctacaccaccagggccctgggtttcgagcacaaaactgggcagccatttgggcagacaccaagctagctgcaggagtgtttttttttttcataccccagcagtgcctggaatgccagtgagacagaactgttcactcccctggaaagggggctgaagccagggagccaagtggtctagctcagcggatcccacccccacggagcccagcaagctaagctccactggcttgaaattcttgctgccggcacagcagtctgaacttgctgggatgctcgagcttagtcgggggaggggcgtccgccattactgaggcttgagtaggcagttttcccctcacagtctaaacaaagccgccaggaagttcaaactgggctgaccccaccacagctctgccaggccgctgtagccagactgcctctctagattcctccactctgggcagggcatctctgaaagaaaggcagcagccccagtcaggggcttatagataaagctcccatgtccctgggacagagcacctgggggaaggggtggctgtgggtgcagcttcagcagatttaaatgttcctgcctgccagctctgaagagagcagcagatcttccagcacagcacttgagctctgctaagggaccgactgcctcctcaagtgggtccctgacccccatgcctcctgactgggagacacctcccagcaggggttgacagacacctcatacaggagagctacagctggcatctggtgggtgcccctctgggacaaagcttccagaggaaggaacaggcagcaatctttgctgttctgcagcctctgctggtgatacccaggcaaacagggtctggagtggacctcctgtaaactccagcagcaggggggcctgactgttagaagcaaaactagcaaacagaaaggaatagcatcaacatcaacaaaaaggacgtccacacaaaccccatccgaaggtcaccaacatcaaagaccaaaggtagataaatccacaaagatgaggaaaagccagtgcaaaaaggctgaaaattccaaaaaccagaaagcctcttctcctccaaaggatcacaactcctcaccagcaagggaacaaaactggacggagaatgagtttgacgaattgacagaagtaggcttcagaaggtgtgtaataacaaactcctctcagctaaagaagcatgttctaacccaatataagaaccttgaaaaaaggttacaggaattgctaactagaataaccattttagagaagaacgaaagtgacctgatggcactgaaaaacaacatgagaacattgtgaagcatacacaagaatcaatagccatattgatcaagcgaagaaaggatatcagagattgaagatcaacttaatgaaataaaacctgaagacaagattagagaaaaaagaatgaaaatgaatgaataacgcctccacgaaatatgggactatggaaaagaccaaatctacgtttgattggtgtacctgaaagtgacagggagaatagaaccaagttggaaaacactcttcaggatattatccaggagaacttccccaacctatcaagacaagccaacattccaattcaggaaatacagagaacaccacaaagatactcctcgagaagagcaaccccaagacacctaatcgtcagattcaccaaggttgaaatgaaggaaaaaatgttaagggcagccagagaaaaaggtcgggttacccacaaagggaagcccatcagactaatagcagatgtctctgcagaaaccctacaagccagaagagagtgggtgccaatattcaacattcttaaagaaagcaattttcaaaccagaatttcatatccagcaaaactaagcttcataagcaaaggagaatgacatcctttacagacaagcaaatgctgagagattttgtcaccaccagacctgccttacaagagtccctgaaggaagcactaaatatgggaaggaaaaaccagtaccagccactgcaaaacataccaaattgtaaagcccatcaacactatgaagaaactgcatcaactaacaggcaaaataaccatctagcatcataatgacagaatcaaattcacatatatcaatattaatcttaaaggtaaatgggctaaatgctccatccaattagaagacacagactggtaaattggatgaagaatcacgacccaacagtgtgctgtatccaggagacccatctcatgtgcaaagacacacataagctgaaaataaaggaatggaagaatatttaccaagcaaagggaaagaaaaagaaaaaaaagcagggttggccatccttgtctctgataaaacagactttaaaccaacaaaaataaaaaaagacaaagaagggcattacataatggtaaagggatcaatgccgcaagaagagctaactatcctaaatacatatgcacccaatacaggagcacccagattgataaagtaagttcttagaggcctattagggacttacactcccaaacgataatagtgggagactttaacaccccactgtcaatattagacagatcaacgagacagaaaattaacaaggatattcaggacttcaactcagctctggaccaagtggacctaatagacatctacagaactctccaccccaaatcaacagaatatatattcttcttagcaccacattgcacttattctaaaattgaccacataattggaagtaaaacactcctcagcaaatgcaaaagaatggaaatcataacaaacagtctctagaccacagtccagtcaaattagaactcgggattaagaaactcactccaaaccgctcaactacatggaaactgaacaacctgctcctgaaagactaccgcgtaaataatgaaattaaggcagaaataaataagttctttgaaaccaatgagaacaaagacacaaagtaccagaatctctgagacacaggtaaagcagtgtttagagggaaatttatagcactaaaatgcccacaggagaaagcaggaaagatctaaaatcaaaaccctaacatcataatcaaaagaactagagaggcaagagcaaacaaattcaaaagctagcaaaagataagaaagaattaagatcagagcaaaactgaaggagacagagacacaaaaaccccttcaaaaaaatcaatgaatccaggaactggtttttttaaaagattagcaaaatagatagactgctagccagattaatcaagaagaagagagggaagaatcaaatagacacaatacaaaatgattaaggggatatcaccactgatcccacagaaatacaaactacatcagagaatactataaacacctctacacaaataagctagaaaatgtagaagaaatggataaattcctggacacataaaccctcccaagactaaaccagaaagaagtctcatcccagaatagaccaatagtaagttctgaaactgaggcagtaattaatagcctaccaaccaaaaaaagcccaggaccagatggattcacagctgaattctaccagagatacaaagaggagctgatatcatttcttccgaaactattccaaaccacagaaaaagaaggaatcttccctaactcatcctatgaggctggcatcatcctgataccaaaacctggcagagacacaacaaaaagaaaatttcaggccaatatccctgatgaacatcgacgcgaaaatcctcaataagatactggcaaactgaatccagcagcacattaacaagcttatccaccatgatcaagacagcttcatccctgggatgcaaggctagttcaacatatggaaatcaatatatgcaatccatcacataaacagaaccaatgaccaaaaacacatgattatctcaattgatgcagaaaaggccttcaataaaattcaacaccccttcatgctaaaaactctcaattaactaggtattgatggaacgtatctcaaaataataagagctatttatgacaaacccacagccaatatcatactgaatgggcaaaagctggaagcattccctttgaaaactggcacaagacaaggatgccctctctcaccactcctattcaacatagtattggaagttctggccagggcaaccaggcaagagaaaaaaaataaaggatattcatatagggagagaggaagtcaaattgtctctgtttgcagataacgtgattgtatatttagaaaaccccatcatttcagcccaatatctccttaagctgataagcaacttcagcaaagtctcaggatacaaaatcaatgtgcaaaaatcacaaacattcctatacaccaataatagacaaacagaaagccaaatcatgagtgtactcccattcacaattgctacaaggagaataaaatacctaggaatacaacttacaagggatgtgaaggacctcttcaagaactacaaaccactgctcaaggaaataagagaggacacaaatggtaaaacattccatgatcatggataggaaaaatcaatatcgtgaaaacagccatactgcccaaagtaatttatagattcaatgctatccccatctagctgccattgactttcttcacagaattaggaaaaactactttaaatttcatatggaaccaaaaaagagcccgtatagccaagacaatcctaagcaaaaagaacaaagctggaggcatcacactacctgacttcaaactatactacaaggctacagtaacaaaaacagcattgtactgctaccaaagaagatatatagagcaatggaacagaacagaggcctcagaaataatgccacatctacaatcatctgatctttgacaaacctgagaaaaacaagcaatggggaaaggattccctgtttaataaatggtgttgggaaaactggctagccatatgcagaaaactgaaactggacaccttccttacaccttatacaaaaattaactaaagatagattaaagacttaaacgtaaaacctaaatctgtagaaaccttagaagaaaacctaggcaataccattcaggatatgggcatgggcaaaaacttcatgagtaaaacaccaaaagcaatggcaatgaaagccaaaattgacaaatgggatctaattaaactaaagagcttctgcacagcaaaaaaactatcatcagagtgaacaggcaacctacagaatgggggaaaatttttacaatctgtctgtctgacaaagggctaatattcagaatctacaaggaacttaaacaaatttacaagaaaaaagcaaacaaccccatcaaaaagtgggtgaaggatatgaacagacacttctcaaaagaagacatttacacagccaacaaacacatgaaaaaaagctcatcatcactggtcattagagaaatgcaaatcaaaaccacaaggagataccatttcacgccagttagaatggtgatcattaaaaagtcaggaaacaacagatgctggagaggatgtggagaaataggaacgcttttacactgttggtgggagtgtaaattagttcaaccattgtggaagacagtgtggccaattcctcaaggaactaggaccagaaataccatttgacccagcaatcccattactgggtatataccaaaaggagtataaatcattttactataaagacacatgcacatgtatgtttactgcagcactttccacaatagcaaagacttggaaccaacccaaaggcccatgaatgacagactggataaagaaaatgtggcatatatacaccatggaatactaagccaccataaaaaaggatgagttcatgtcctttgcagggacatggatgaagctagaaaccatcattctcagcaaactaacacaggaacagaaaaccaaacaccacatgttctcattcataagtgggagttgaacaatgagaacacatggacacaggaagtggaacatcacacaccaaggcctgtcaggaggtgggggactaggggaggggtagcattaggagaaatacctaatgtagataaggggttgatgggtgccacaaaccaccatggcacgtgcatacctatgtaacaaacctgcatgttctgcacatgtatcccaggacttgaagtataataatttaaaaaaagaa

SEQ ID NO: 759 - DNA, 5002 bp, Homo sapiens
  source 1..5002: mol_type = other DNA
gcagttaaaggaacactgacatgcagagataagagagaaccaatgcaagaactccagcactcaaatggccagagtgacttatatcttccaaatgatcacactagtactccaagaagggttctaaaccaggctgtgttggctgaaatggcagaaatagaattcagaatatggataggaatgaagatcatcaagatcttccagagaatggcaaaacccaattcaaggaaactaagaatcacaataaaatgatacaggagctgaaagatgaaatagccagtataaaaaagaacctaactgctctgatagagctgaaaaacacactacaagaatttcacaatgcaatcacaagtattaactgcaaaatagaccatggtgaggaaaggatctcagaccctgaagactggctgtctgaaataagacagtcagacaaaaataatgaaaaaggaatgaaaaggatcaaacaaaacctttgagaaatatggggttatggaaaggccaaatctatgaaaccccggcatccctgaaagggacagggagaaagcaaacaacttggaaagcatattttaggatatcgtccatgaaaacttccccagtgttgttaggaaagctgacagtcaaattcaggaaataatagagaacccctgcaggattctacatacgatcatccccataatcatcagattttccaaggtcaaaatgaaacaaaaagtgttaaaggcagctggagagaaagggcaggtcaactacaaaaggaagctcaccaggctaagagtggacctctcagcagaaaccctaaaagccagaagacattaggggcctgtattcaacattattaaagaaaaaaatcttcaaccagaaattttatatcaagcaaagaatttcatatccagcttcctcagcaaaggagaaataaaatccttttcagataagcaaatgctgagggactttgttatcaccagacccaccttacaagagatcttgaaaggagcaccaaatatggaaagaaaagaccattaccagtcaatataaacacacttaagtacacagaccagaaacactataaagcaaccacacaaacaagctggcataataaccatctagcaacacaatgataggatcaaatccacacatatctatcaatactaaccttgaaagtaagtaggctaaatgacccatttaaaaggcacagagtggtaagcaggattaaaaagcaagacccaacggtatgctgtctttaagaaacccctctcacatgcaatgccacccataggctcaaaatcaaaagatggaggaaaatctaccaatccaatgaaaatcagaaaaaaagcaagggctgcaatcctaatttcagacaaaacagactttgaatcaacaaagataaaaaaagacaaagaagagcattacataatggtaaagggttcaattaaacaagaagacctaactatcctaaatatatatgcacccaacacaggagtacccagattcataaagcaaattcttagagacatacaaagagacttagactcccacacaatagtaatgggagacttcagcactcaactagcagtattagacatatcatcaaggcagaaaattagcaaagatattcaggacctgaactcaaaattggaccaaatggatctaatagacctctacagaactctccatgtcactcaaaaccatgcaattacatggcaattaaacaacctgctcccaaatgacttttgggtaaataatgaaattaaggcagaaatccatgggttatttgaaactcataagaatgcaacatactagaatctctggcacatggctaaggcagtgttaagagggaaatttttagcactaaatgcccacatcaaaaccttagaagtatctcacatgaacaacctaacattgcaactaagagaactagggaagcaagagtgaatcaaccccaaagatagcagaagacaagaaataaccaaaatcagagctgaactgaaggggattgaaatattaaaaaaccattcaaaagatcaatgaatctaggagttgctctttgaaaaaattaataagataggctgctagctagaataataaatcagaaaagagagaagatccaaataaacacaattagaaatgacaaagggaatgttaccactgactttacagaaatacaaacaaccatcatagaccactaagaacacctctatgcacacaaactagaaaacccagaagagatggataaattcctagacacagacacactcccaagactgaaccaggaagaatttgttccctgaacagaccaataatgaactccaaaattgaatcagtaataaatagcctacctaccaatccatccaggaccagatggattcacaggtgaattctaccagatgtacaaagacaagttggtatcatttctactaaaactattcccaaaaactgcagaaaacaaattcctccccaacttattctatgaggccagcatcatcctgataccaaaacctagcagagacacaacaaaaaaaagaaaacttcaggccaatatctgtgatgaacattgatgcaaaaatcctcaacaaaatacttgcaaaccaaatccagtagcacatcaaaaagccaattcactgtgatcaagtaagatttatccctgggctacaaggttgtttcaacatatgcaaatcaataaatgtgattcatcacacaaacagaactaaagacaaaaaccacatgattatctcaatagatgcagaaaaggcttttgataaaattcaacatccttcatgagaaaaactctcaatatgctaggtactgaagaacatatctcaaaataataagaaccatttatgataaacccacactaaacatcacactgaatgggcaaaagctgaaagcattccccttgaaaactggcacaagacaaggatgccctctcatcattcatattcaacatagtattggaagtcctggccagagaaatcaggcaaaggagagaaacaaaggcattcaaatagaaagagagggagtcaaactatccctgtttgtagacagcatgattctatatctagaaaacctcatagtcttagctcaaaagctccttcagctgataaacaacttcagcaaagtttcaagatagaaaatcatcgtacaaaaatcactaacatacctatacaccaacaacagccaagccaaggtccaaatcaggaatgaaatcccattcaccattgccacaaaaagaacaaaatgtcggggaatacagttaatcagggaggtgattctctacaatgagaattacaaaacactgctcaaagaaatcagagatgacacaaacaaatggacaaacatttcatgctcatggatagaaagagttaatatcattaaaatggccatattgcccaaagccatttacagatccaatgctaatcctaccaaactaccaatgacattcttcacagaactagaaaaaaactattttaaaatacatatggaacaaaaacaaaaacaacaaaaacccaaatagcaaatgcagttctaagcaaaaaaacaaaaacaaacagacaaaaaaacaccaaagccagaggcatcatgttacccaatttcaaactatactacagggctacagtaaccaaaacactgtggtactggtactggtactggtacaaaaacagacatagaccagtggaacagaatagagagtccagaaataaggctgcatatctataaccatctgatattcgaccaagctgacaaaaacaagcaatggggaaaggacttcctattcaacacacagtgctaggagaactggctagccagaagattgaaattggatcccttccttacaccatatacaaaaatcaactcaagatggattaaagacttaaatgcaaaacccaaaactacaaaaaccctggaagacaacctagacaataccattctggacataggaactggcaaaggtttcataatgaagacaccaaaagcaattgcaacaaaagcaaaagtgacaaatgggatctaattaatcttaaaagcttctgcagatcaaaagaaactatcaacagagtaaacagacaacctacagaatgggagaaaatatttgcaaactatgtatctgacaaaggtctgatttccaacatctataagaaacttcaacaaatttagaagaaaaaagcagccccattaaaaagtgtgaaaagaacatgaacagacacttttcaaaagaagacatacatgtgaccaacatatggaaaaaagctcaatatcaccgatcattagagaaatgcaaattaaaaccacaatgagatgccatctcacaccagtcagaatggctattactaaaaagtaaaaaaaaaaaaaaaagtggacgctggtgaagttgtggagaaaaaaatgcttatacactgttggcgaaagtgtaaattagttcaaccattgtagaaagcagtgtggcgattcctcaaagagctaaaaatagaactaccattcaacccagcaatcccattactgggtatatacccaaaggaatataaatcattctaccataaagacacaggcactcgaatgttcattacagcactattcaaatagccaggatgtggaatcaacctaaatgcccatcaatggcaaattggataaagaaaatgtggtgcatatacaccatgtactatgccataaaaagcaatgagatcatgtcctttgcaggagcatggatggatctggaggccgttatccttagcaaactaacacagaaatagaaaaccaaataccacatgttctaacttgtaagtgggagctaaatcatgagaacacatggacacatagacaggaataacagacactggggctgccttgagggtggagggtgggaggaaggagaagatcaggaaaaataactattgggtactaggcttagtatctgggtgacaaaaataatctgtacaacagaccctcatggcatgagtttacctataaaacaaacctgcatatgtacccctaaacctaaaataaaagttaaaaa

SEQ ID NO: 760 - DNA, 795 bp, Homo sapiens
  source 1..795: mol_type = other DNA
cagccaccccatccgggaggtgaggggcgcctctgcccggccgcccctactgggaagtgaggagcccctctgcccggccagccgccccgtccgggagggaggtggggggggtcagccccccgcccggccagccgccccgtccgggagggaggtgggggggtcagcacccccgcccggccagccgccccgtccaggaggtgaggggcgcctctgcccggccgcccctactgggaagtgaggagcccctctgcccggccaccaccccgtctgggaggtgtacccaacagctcattgagaacgggccatgatgacaatggcggttttgtggaatagaaaggggggaaaggtggggaaaagattgagaaattggatggttgccgtgtctgtgtagaaagaggtagacatgggagacttttcattttgtgctgtactaagaaaaattcttcttccttgggatcctgttgatctgtgaccttgcccccaaccctgtgctctctgaaacatgtgctgtgtccactcagggttgaatggattaagggtggtgcaagatgtgctttgttaaacagatgcttgaaggcagcatgctcgttaagagtcatcaccactccctaatctcaagtacccagggacacaaacactgcggaaggccgcagggtcctctgcctaggaaaaccagagacctctgttcacttgtttatctgctgaccttccctccactattgtcctgtgaccctgccaaatccccctctgcgagaaacacccaagaatgatcaataaaaaaaaaaaagaaaaaaa

SEQ ID NO: 761 - DNA, 6140 bp, Homo sapiens
  source 1..6140: mol_type = other DNA
caagatggccgaataggaacagctccagtctacagctcccagcgtgagcgacgcagaagacaggtgatttctgcacttccaactgaggtaccaggttcatctcactggggcttgttggacagtgggtgtaggacggtgggtgcagcccactgagcatgagctgaagcagggcaaggcatggcctcacccgggaaggcaaggggtcagggaattccctttcctagccaagggaagctgtgacagacggcacctggaaaattgggtcactcccaccctaatactgcgtttttccaatggtcttagcaaacggcacaccaggagattatatcctgtgcctagctcggagggtcccacgcccatggagccttgctcattgctagcacagcagtctgagatcgaactgcaaggtggcagtgaggctaggggaggggagcccaccattgctgaggcttcagtaggtaaataaagcagccgggaagctcgaactaggtggagcccactgcagctcaaggaggcctgcctgcctgcctctgtagactccacctctgggggcatggcatagccgaacaaaaggcagcagaaatctctgcagacttcaatgtccctgtctgacagctttgaagagaccagtggttctcccagcacagagtttgagatctgagaacggagagactgcctcctcaagtgagtccctgacccccgagtagcctaactgggaggcacccccaagtaggggcagactgacaccccacatggccgggtacccctctgagatgaagcttccagaggaatgatcaggcagcaacatttgctgttcagcaatattcgctgttctacagcctccactgtgatacccaggcaaacagggtctggcgtggacgtccagcaaactccaacagacctgcagctggcggtcctgactgttagaaggaaaactaacaaacagaaaggacatccacaccaaaaccccatctgcacatcaccatcaccaaagaccaaaggtagataaaaccacaaagatggggaaaaaacagagcagaaaagctgaaaattctaaaaatcagagcgcctctccccctccaaaggaacatagctccttgccagcaacagaacaaagctggacggagaatgactttgacgagttgagagaagaaggcttcagatgatcaaacttctccaagctaaaagaggaagttcgaacccatcacaaagaacctaaaaaccttgaaaaaagattagacaaatggctaactagaataaccagcatagagaagtccttaaatgacctgatggagctgaaaaccatggcatgagaactacgtgacgaatgcacaagcttcagtagccaattcgatcaactggaagaaaggttatcagtgattgaagatcagatgaatgaaatgaagtgagaagagaagttaagagaaaaaagagtaaaaagaaacgaacaaagcttccaagaaatatgggactatgtgaaaagaccaaatctacgtctgattggtgtacctgaaagtgacggggagaatggaaccaagctggaaaacactctgcaggatattatccaggagaacttccccaatctagcaagggaggacaacattcaaattcaggaaatacagagaacgccacaaagatactcctcgagaagagcaactccaagacacataattgtcagattcaccaaagttgaaatgaaggaaaaaatgttaagggcagccagagagaaaggtcgggttacccacaaagggaagcccatcagactaacagctgatctctcagcagaaactctacaagccagaagagagtgggggtcaatattcaacgttcttgaagaaaagaattttcaacccagaatttcatatccagccaaactaagcttcataagtgaaggagaaataaaatcctttacaaacaagcaaatgctgagagattttgtcaccaccaggcctgccttacaagagctcctgaaggaagcactaaacatggaatggaacaaccagtatcagccactgcaaaaacatgccaaattgtaaagaccattgaggctaggaagaaactgcatcaactaacgagcaaaataaccagtgaacatcctagtgacaggatcaaattcacacataacaatattaaccttaaatgtaaatgggctaaatgctccaattaaaagacacagactggcacactggataaagagtcaagacccatcagggtgctgtattcaggaaacccatctcacgtacagagacacacacacataggctcaaaataaaaggatggaggaagatctaccaagcaaacggaaaacaaaaaaaaaggccggggttgcaatcctagtctctgataaaacagactttaaaccaacaaagatcaaaagagacaaagaaggccattacatgatagtaaagggatcaattcaacaagaagagctaactatcttaaatatatatgcacccaatacaggagcacccagattcataaaccaagtccttagagacctacaaagagatttagactcccacacaataacaatgggagactctaacaccccactgtcaatattagacagatcaacgagacagaaagttaacaaggatatccaggaattgaattcagctctgcaccaagcagacctaatagacatctacagaactctccaccccaaatcaacagaatatacattcttctcagcaccacatcgcacctattccaaaattgaccacatagttggaagtaaagcactcctcagcaaatgtaaaagaacagaaattataacatactgtctcagaccacagtgcaatcaaactagaactcaggattaagaaactcactcaaaaccactcagctacatggaaactgaacaacctgctcctgaatgactactgggtacataacaaaatgaaggcagaaataaagatgttctttgaaaccaacgagaacaaagacacaacataccagaatctctgggacacatttaaagcagtgtgtagagggaaatttacagcactaagtgcccacaagagaaagcaggaaagatctaaaattgacactctaacatcacaattaaaaatattagagaagcaagagcaaacacattcaacagctagcagaagacaagaaataactaagatcagagcagaactgaaggagacagagacacaaaaaaaccttcaaaaaatgaatgaatccaggagctggttttttgaaaagataaacacaattgatagaccgctagcaagactaataaacaagaaaagagagaagaatcaaataaatgcaataaaaaatgataaagtggatatcaccaccaatcccacagaaatacagagtacacagagaatactataaacacctctatgcaaataaactagaaaatctagaagaaatagataaattcctggacacatacaccctctcaaaactaaaccaggaagaagtttaatccctgaatagaccaataacaggctctgaaattgaggcaataattaatagcctaccaaccaaaaaaagtccaggacaagatggattcacagccgaattctaccagaggtacaaggaagagctggtaccattccttctgaaactattccaatcaatagaaaaagagggaatcctccctaactcattttatgaagccagcatcatcctgataccaaagcctggcagagacataacaaaaaaagagaactttagaccaatatccctgatgaaaatcaatgcaaaaatcctcaataaaatactggcaaactgaatccagcagcatatcaaaaagcttatccaccatgatcaagtgggcttcatccctgggatgcaaggctggttcaacatacacaaatcaataaaagtaatccagcatataaacagaaccaaagacaaaaaccacatgattatctcaacagatgcagaaaaggccttggacaaaattcaacagcccttcatgctaaaaactctcaatgaattaggtattgatgggacatatctcaaaataataagagctatctatgacaaacccacagccaatatcagactgaatgggcaaaaactggaagcattccctttgaaaactggcacaagacagggatgccctctctcaccactcctattcaacatagtgttggaagttctggccagggccatcaggcaggagaaagaaataaagggtattcaataaggaaaagaggaagtcaaattgtccctgtttgcagatgacatgattttatatttagaaaaccccatcatctcagcccaaaatctccttaatttgataagcaacttcagcaaaatctcaggatacaaaatcaatgtgcaaaaatcacaagcattcttatacaccaacaacagacaaacagagagccaaatcatgagtgaactcccattcacaactgcctcaaagagaataaaatacctaggaatccaacttacaagggatgtgaaggacctcttcaaggagaactacaaaccactgctcaaggaaataaaagaggacacaaacaaatggaagaacattccatgctcatggataggaagaatcaatatcgtgaaaatggctatactgcccaaggtaatttatagattcaatgccatccccatcaagctacccatgactttcttcatagaattggaaaaaactactttaaagttcatgtggaaccaaaaaagagcctgcactgccaaaacgatcctaagccaaaagaacaaagctggaggcatcacgctacctgatttcaaactatactacaaggctgcagtaaccaaaacagcatggtactagtaccaaaacagagatatagaccaatggaacagaacagagccctcagaaataataccacacatctacaactatctgatctttgagaaacctgacaaaaacaagaaatggggaaaggattccctatttaataaatggtgctgggaaaactggctagccacatgtagaaagctgaaactggatcccttccttacaccttatacaaaaattaattcaagatggattaaagacttaaatgttagacctaaaaccataaaaaccctagaagaaaacctatgcagtaccattcaggacacaggcatgggcaaggacttcatgtctaaaacaccaaaagcaatggcaacagaagccaaaattgacaaatgggatctcattaaactcaagagcttctgcacagcaaaagaaactaccatcagagtgaacaggcaacctacaaaatgggagaaaatttttgcaatctactcatctgacaaagggctaatatccagaatctacaaggaactcaaacaaacttacaagaaaaaaacaaaccccatcaaaaagtaggtgaaggatatgaagagacacttctcaaaagaagacatccatgcatccaacagacacatgaaaaaaatgctcatcatcatgggccatcagagaaatgcaaatcaaaaccacaatgagataccatctcacaccagttagaatgtcaatcattaaaaagtcaggaaacaacaggtgctggagaggatgtggagaaataggaacacttttacactggtggtgggactgtaaactagttcaaccattgtggaagacagtgtggcgattcctcagggatctagaactagaaataccatttgacccagccatcccattactgggtatatacccaaaggattataaatcatgctgctataaagacacatgcacacgtatatttattgtggcactgttcacaatagcaaagacttggaaccaacccaaatgtccatcaatgatagattggtttaagaagatgtggcacatatacaccatggaatactatgcagccataaaaaaggaagagttcatgtcctttatagggacatggatgaagctggaaaccatccttctcagcaaactattccaaggacaaaaaaacaaacaccgcatgttctcactcatagatgggaattgaacaatgagaacacttggacacaggaaggggaacatcacacaccggggcctgtcgaggggtggggagaagggggagggatagcattaggagatatacctaatgtaaatgacgagttaataggtgcagcacaccaacatggcacatgtatacatgtaacaaacctgcatgttgtacacatgtaccctagaacttaaagtataatttaaaaataaa

SEQ ID NO: 762 - DNA, 163 bp, Homo sapiens
  source 1..163: mol_type = other DNA
tgctgtataatcctcatactacttttatattccatttctctctctaacctgggactgtgagctgtttgaagcaggaatggtatcttcactcttgtctacccagaggccaggcatggtattcagcccaatcactttagcacataaatactgcttgaatgaataa

SEQ ID NO: 763 - DNA, 404 bp, Homo sapiens
  source 1..404: mol_type = other DNA
tgttctgggctgaactgtgttttcctcacattcatttgttgaagttctatttcctagtacctcagaatgtgactgtatttggatatagggcctttaagagttagataagttaaaatgaggttagtaggatagtgtccaactcaatatgacctgcatccttatacgaatctcttcttataagaagaggagattaggtcacagatgttcaataaggaaagaccatgtgaagacacaagaagatggtcatctgcaagccaagagaaatgtctcaaaaggaactggccctgctgacatcttgaccttgaatttccagcctcaggtactgtgggaaaatgaatttctgttatttaagccactcaatctttttttttctttttttttttactgaagccttaaaaactaat

SEQ ID NO: 764 - DNA, 6027 bp, Homo sapiens
  source 1..6027: mol_type = other DNA
gaggaggagccaagatggccgaataggaacagctccggtctacagctcccagcgtgagcgacgcagaagacgggtgatttctgcatttccatctgaggtaccgggttcatctcactagggagtgccagacagtgggcgcaggccagtgtgtgtgcgcaccgtgtgcgagccgaagcagggcgaggcattgcctcacctgggaagcgcaaggggtcagggagttccctttccgagtcaaagaaaggggtgacggacgcacctggaaaatcgggtcactcccacccgaatattgcgcttttcagaccggcttaagaaacggcgcaccacgagactatatcccacacctggctcagagggtcctacgcccacggaatctcgctgattgctagcacagcagtctgagatcaaactgcaaggcggcaacgaggctgggggaggggcgcccgccattgcccaggcttgcttaggtaaacaaagcagccgggaagctcgaactgggtggagcccaccacagctcaaggaggcctgcctgcctctgtaggctccacctctgggggcagggcacagacaaacaaaaagacagcagtaacctctgcagacttaagtgtccctgtctgacagctttgaagagagcagtggttctcccagcacgcagctggagatctgagaacgggcagactgcctcctcaagtgggtccctgacccctgacccccgagcagcctaactgggaggcaccccccagcaggggcacactgacacctcacacggcagggtattccaacagacctgcagctgagagtcctgtctgttagaaggaaaactaacaaccagaaaggacatctacaccgaaaacccatctgtacatcaccatcatcaaagaccaaaagtagataaaaccacaaagatggggaaaaaacagaacagaaaaactggaaactctaaaacgcagagcgcctctcctcctccaaaggaacgcagttcctcaccagcaacagaacaaagctggatggagaatgattttgacgagctgagagaagaaggcttcagacgatcaaattactctgagctacgggaggacattcaaaccaaaggcaaagaagttgaaaactttgaaaaaaatttagaagaatgtataactagaataaccaatacagagaagtgcttaaaggagctgatggagctgaaaaccaaggctcgagaactacgtgaagaatgcagaagcctcaggagccgatgcgatcaactggaagaaagggtatcagcaatggaagatgaaatgaatgaaatgaagcgagaagggaagtttagagaaaaaagaataaaaagaaatgagcaaagcctccaagaaatatgggactatgtgaaaagaccaaatctacgtctgattggtgtacctgaaagtgatgtggagaatggaaccaagttggaaaacactctgcaggatattatccaggagaacttccccaatctagcaaggcaggccaacgttcagattcaggaaatacagagaacgccacaaagatactcctcgagaagagcaactccaagacacataattgtcagattcaccaaagttgaaatgaaggaaaaaatgttaagggcagccagagagaaaggtcgggttaccctcaaaggaaagcccatcagactaacagcggatctctcggcagaaaccctacaagccagaagagagtgggggccaatattcaacattcttaaagaaaagaattttcaacccagaatttcatatccagccaaactaagcttcataagtgaaggagaaataaaatactttatagacaagcaaatgctgagagattttgtcaccaccaggcctgccctaaaagagctcctgaaggaagcgctaaacatggaaaggaacaaccggtaccagccgctgcaaaatcatgccaaaatgtaaagaccatcgagactaggaagaaactgcatcaactaatgagcaaaatcaccagctaacatcataatgacaggatcaaattcacacataacaatattaactttaaatataaacggactaaattctgcaattaaaagacacagactggcaagttggataaagagtcaagacccatcagtgtcctgtattcaggaaacccatctcacgtgcagagacacacataggctcaaaataaaaggatggaggaagatctaccaagccaatggaaaacaaaaaaaggcaggggttgcaatcctagtctctgataaaacagactttaaaccaacaaagatcaaaagagacaaagaaggccattacataatggtaaagggatcaattcaacaagaggagctaactatcctaaatatttatgcacccaatacaggagcacccagattcataaagcaagtcctcagtgacctacaaagagacttagactcccacacattaataatgggagactttaacaccccactgtcaacattagacagatcaacgagacagaaagtcaacaaggatacccaggaattgaactcagctctgcaccaagcagacctaatagacatctacagaactctccaccccaaatcaacagaatatacatttttttcagcaccacaccacacctattccaaaattgaccacatagttggaagtaaagctctcctcagcaaatgtaaaagaacagaaattataacaaactatctctcagaccacagtgcaatcaaactagaactcaggattaagaatctcactcaaagccgctcaactacatggaaactgaacaacctgctcctgaatgactactgggtacataacgaaatgaaggcagaaataaagatgttctttgaaaccaacgagaacaaagacaccacataccagaatctctgggacgcattcaaagcagtgtgtagagggaaatttatagcactaaatgcctacaagagaaagcaggaaagatccaaaattgacaccctaacatcacaattaaaagaactagaaaagcaagagcaaacacattcaaaagctagcagaaggcaagaaataactaaaatcagagcagaactgaaggaaatagagacacaaaaaacccttcaaaaaatcaatgaatccaggagctggttttttgaaaggatcaacaaaattgatagaccgctagcaagactaataaagaaaaaaagagagaagaatcaaatagacacaataaaaaatgataaaggggatatcaccaccgatcccacagaaatacaaactaccatcagagaatactacaaacacctctacgcaaataaactagaaaatctagaagaaatggatacattcctcgacacatacactctcccaagactaaaccaggaagaagttgaatctctgaatagaccaataacaggctctgaaattgtggcaataatcaatagtttaccaaccaaaaagagtccaggaccagatggattcacagccgaattctaccagaggtacaaggaggaactggtaccattccttctgaaactattccaatcaatagaaaaagagggaatcctccctaactcattttatgaggccagcatcattctgataccaaagccgggcagagacacaaccaaaaaagagaattttagaccaatatccttgatgaacattgatgcaaaaatcctcaataaaatactggcaaaccgaattcagcagcacatcaaaaagcttgtccaccatgatcaagtgggcttcatccctgggatgcaaggctggttcaatatacgcaaatcaataaatgtaatccagcatataaacagagccaaagacaaaaaccacatgattatctcaatagatgcagaaaaagcctttgacaaaattcaacaacccttcatgctaaaaactctcaataaattaggtattgatgggacgtatttcaaaataataagagctatctatgacaaacccacagccaatatcatactgaatgggcaaaaactggaagcattccctttgaaaactggcacaagacagggatgccctctctcaccactcctattcaacatagtgttggaagttctggccagggcaatcaggcaggagaaggaaataaagggtattcaattaggaaaagaggaagtcaaattgtccctgtttgcagacgacatgattgtttatctagaaaaccccatcgtctcagcccaaaatctccttaagctgataagcaacttcagcaaagtctcaggatacaaaatcaatgtacaaaaatcacaagcattcttatacaccaacaacagacaaacagagagccaaatcatgggtgaactcccattcacaattgcttcaaagagaataaaatacctaggaatccaacttacaagggatgtgaaggacctcttcaaggagaactacaaaccactgctcaaggaaataaaagaggatacaaacaaatggaagaacattccatgctcatgggtaggaagaatcaatatcgtgaaaatggccatactgcccaaggtaatttacagattcaatgccatccccatcaagctaccaatgactttcttcacagaattggaaaaaactactttaaagttcatatggaaccaaaaaagagcccgcattgccaagtcaatcctaagccaaaagaacaaagctggaggcatcacactacctgacttcaaactatactacaaggctacagtaaccaaaacagcatggtactggtaccaaaacagagatatagatcaatggaacagaacagagccctcagaaataatgccgcatatctacaactatctgatcttcgacaaacctgagaaaaacaagcaatggggaaaggattccctatttaataaatggtgctgggaaaactggctagccatatgtagaaagctcaaactggatgccttccttacaccttatacaaaaatcaattcaagatggattaaagatttaaacgttaaacctaaaaccataaaaaccctagaagaaaacctaggcattaccattcaggacataggcgtgggcaaggacttcatgtccaaaacaccaaaagcaatggcaacaaaagacaaaattgacaaatgggatctaattaaactaaagagcttctgcacagcaaaagaaactaccatcagagtgaacaggcaacctacaacatgggagaaaattttcgcaacctactcatctgacaaagggctaatatccagaatctacaatgaactcaaacaaatttacaagaaaaaaacaaacaaccccatcaaaaagtgggcgaaggacatgaacagacacttctcaaaagaagacatttatgcagccaaaaaacacatgaagaaatgctcatcatcactggccatcagagaaatgcaaatcaaaaccactatgagatatcatctcacaccagttagaatggcaatcattaaaaagtcaggaaacaggtgctggagaggatgcggagaaataggaacacttttacactgttggtgggactgtaaactagttcatccattgtggaagtcagtgtggcgattcctcagggatctagaactagaaataccatttgacccagccatcccattactgggtatatacccaaatgagtataaatcatgctgctataaagacacatgcacacgtatgtttattgcggcactattcacaatagcaaagacttggaaccaacccaaatgtccaacaatgatagactggattaagaaaatgtggcacatatacaccatggaatactatgcagccataaaaaatgatgagttcatatcctttgtagggacatggatgaaaatggaaaccatcattctcagtaaactatcgcaagaacaaaaaaccaaacaccgcatattctcactcataggtgggaattgaacaatgagatcacatggacacaggaaggggaatatcacactctggggactgtggtggggtcgggggaggggggagggatagcattgggagatatacctaatgctagatgacacattagtggatgcagcgcaccagcatggcacatgtatacatatgtaactaacctgcacaatgtgcacatgtaccctaaaacttagagtataattaaaaaaaaaaa

SEQ ID NO: 765 - DNA, 318 bp, Homo sapiens
  source 1..318: mol_type = other DNA
gctagcggaaaggttaactggttcagcctttttggatgtcatattagtaacatgttaagataatttttaaaattcatccttttggtggaataattttatatctagaaaataacaaggaaaaagaatatgtgcaaacatactcactatggcattatttataatgacaaaaattgccgacagccaaatgtatgacaataaggaaatagttacatatattagaacgtatatatgccttgaaatattgtgcaaccacttaaattgtgtttttaaaaatgactaaattattctagaaaatatgatattaagaaacgagaaaag

SEQ ID NO: 766 - DNA, 591 bp, Homo sapiens
  source 1..591: mol_type = other DNA
ttggggtggagaattatccccccaaatatcgagcttggtaatggtgggtgtttttgaaaattgagggttctcagaaacaagtctaagaatcaaggtccctctaactttgtcctgtttctcttccccaaatacagggagggactttctctggaatttcctgatatgaccaagaaagcttcttatcaaaagaagcacaattgccttcggttacctcattatctactgcagaaaagaagacgagaatgcaaccatacctagatggacttttccacaagctaaagctggcctcttgatctcattcagattccaaagagaatcatttacaagttaatttctgtctccttggtccattccttctctctaataatcatttactgttcctcaaagaattgtctacattacccatctcctcttttgcctctgagaaagagtatataagcttctgtaccccactggggggttggggtaatattctgtggtcctcagccctgtaccttaataaatttgtatgccttttctcttattaatcttgtcagttgattttcagtgaactttcagaggccaaaagggaggttttctcttggcccctgc

SEQ ID NO: 767 - DNA, 169 bp, Homo sapiens
  source 1..169: mol_type = other DNA
ccatgctgggtagctcacacctgtagctccagctactcaggaggctgaggcgagaagatcacttgagcccaggagtttcaggctgcagtaagctatgatcgcaccactcactgcactccagtctgggtgacagagtgagacccatctcctaaaacaaaggaaaaggaaa

SEQ ID NO: 768 - DNA, 1453 bp, Homo sapiens
  source 1..1453: mol_type = other DNA
tctccctctccctttccccactgtctccctctccctctccctctccctctctctccacggtctccctctgatgccgagccgaagctggactgtactgccaccatctcagctcactgcaacctccctgcctgattctcctgtctcagcctgcccagtgcctaggattgcaggcgcgcgccgccacgcctgattggttttcctatttttttggtggagacggggtttcgctgtgttggccgggctggtctccagctcctaaccgcgagtgatctgccagcctcggcctcccgaggtgctgggattgcagacggagtctcaatcactcagtgctcaatgttgcccaggctggagtgcagtggcgtgatctcggctggctacaacctccaccttccagctgcctgccttggcctcccaaagtgccgagattgcagcctctgcccggctgccaccccgtctgggaagtgaggagcgtctctgcctggccgcccattgtctgggatgtgaggagcccctctgcctggccgcccagtctgggaagtgaggagcgcctcttcccggccgccatcccatctaggaagtgaggagcatctctgccgggccgcccatcgtctgagatgtggggagcgcctctgccccgccgccacgtctgggatgtgaggagcgcctctgcccagccgcgaccccgtctgggaggtgaggagcgtctctgcccggccgccccgtctgagaagtgaagagcccctccgcccggcagccgccccgtctgggaagtgaggagcatctccgcccggcagccgccccgtcagggagggaggtgggggggcagcccccgcccggccagccgccctgtccgggaggtgaggggcacctccgcccggcagccccgactgggaagtgaggagcccctctgcccggcagccaccccgtctgggaggtgaacccaacagctcattgagaaccggccatgatgacgatggcggttttgtcgaatagaaagggggaaatgtggggaaaagatagagaaatcagattgttgctgtgtctgtgtagagggaagtagacaggggagactccattttgttctgtactaagaaaaattcttctgccttgggatgctgttaatctataaccttacccccaaccccgtgctctctgaaacatgtgctgtgtccactcagggttaaatggattaagggcggtgcaccatgtgctttgttaaacagatgcttgaaggcagcatgctcgttaagagtcatcaccactccctaatctcaagtacccagggacacaaacactgcggaaggccgcggggtcctctgcctaggaaaaccagagacccttgttcacttgtttatctgctgaccttccctccactattgtcctatgaccctgccaaatccccctctccgagaaacacccaagaatgatcaataaatactaaaaaaaaaaaaaa

SEQ ID NO: 769 - DNA, 3984 bp, Homo sapiens
  source 1..3984: mol_type = other DNA
ctaaatgctccaattaaaagacacagactggcaaattggatcaagagtcaagacccatcagtgtgctgtattcaggaaacccatctcacatgcagagacacacataggctcaaaataaaaggatggaggaagatctaccaagcaaatggaaaacaaaaaaaggcaggggttgcaatcctagtctctgataaaacagactttaaaccaacaaagatcaaaagagacaaagaaggccattacataatggtaaagggatcaattcaaccagaagagctaactatcctaaatatatatgcacccaatacaggagcacccagattcataaagcaagtcctgagtgacctacaaagagacttagactcccacacaataataatgggagactttaacaccccactgtcaacattagacagatcaacgagacagaaagttaacaaggatacccaggaattgaactcagctctacaccaagcagacctaatagacatctgcagaactctccaccccaaatcaacagaatatacattttttttcagcaccacaccacacctattccaaaactgaccacatagttggaagtaaagctctcctcagcaaatgtaaaagaacagaaattataacaaactgtctctcagaccacagtgcaatcaaactagagctcaggattaagaaactcactcaaaacctctcaactgcatggaaactgaacaacctgctcctgaatgactactgggtacctaacgaaatgaaggcagaaataaagatgttctttgaaaccaacgagaacaaagacacaacataccagaatctctgggacacattcaaagcagtgtgtagagggaaatttatagcactaaatgcccacaagagaaaggaggaaagatccaaaattgacaccctaacatcacaattaaaagaactagaaaagcaagagcaaacacattcaaaagctagcagaaggcaagaaataacgaaagtcagagcagaactgaaggaaatagagacacaaagaacccttcaaaagatcaatgaatccaggagctggttttttgaaaggatcaacaaaattgatagactgctagcaagactaataaagaaaaaaagagagaagaatcaaatagacgcaataaaaaatgataaaggggatatcaccaccaatcccacagaaatacaaactaccatcagagaatactacaaacacctctacgcaaatacactagaaaatctagaagaaatggataaattcctcgacacatacactctcccaagactaaaccaggaagaagttgaatctctgaatagaccaataacaggctctgaaattgtggcaataatcaatagcttaccaacgaaaaagagtccaggaccagatggattcacagccaaattctaccagaggtacaaggaggaactggtaccattccttctgaaactagtccaatcaatagaaaaagagggaatcctccctaactcattttatgaggccagcatcatcctgatcccaaagccgggcagagacacaaccaaaaaagagaattttagaccaatatccttgatgaacattgatgcaaaaatcctcaataaaatactggcaaaccgaatccagcagcacatcaaaaagcttatccaccatgatcaagtgggcttcatccctgggatgcaaggctggttcaatatacacaaatcaataaatgtaatgcagcatataaacagaaccaaagacaaaaaccacatgattatctcaatagatgcagaaaaggcctttgacaaaattcaacaacccttcatgctaaaaactgtcaataaattaggtattgatgggacgtatctcaaaataataagagctatctatgacagacccacagccaatatcatactgaatgggcaaaaacgggaagcattccctttgaaaactggcacaagacagggatgccctctctcaccactcctattcaacatagtgttggaagttctggccagggcaattaggcaggagaaggaaataaagggtattcaattaggaaaagaggaagtcaaattgtccctgtttgcaggcaacatgattgtatatctagaaaaccccatggcctcagccccaaatctccttaagctgataggcaacttcagcaaagtctcaggatacaaaatcaatgtacaaaaatcacaagcattcctatacacccataacagacaaacagagagccaaatcatgagtgaactcccattcacagttgcttccaagagaataaaatacttaggaatccaacttacaagggacgtgaaggacctcttcaaggagaaatacaaaccactgctcaatgaaataaaagaggatacaaacaaatggaagaacattccatgctcatgggtaagaagaatcaatatcgtgaaaatggccatactgcccaagataatttatagattcagtgccatccccatcaagctaccaatgactttcttcacagaattggaaaaaactactttaaagttcatatggaaccaaaaaagagcccgcatcgccaagtcaatcctaagccaaaagaacaaagctggaggcatcaagctacctgacttcaaactatactacaaggctacagtaaccaaaacagcatggtactggtaccaaaacagagatatagatcaatggaacagaacagagccctcagaaataacaccgcgtatctacaactatccgatctttgataaacctgacaaaagcaatggggaaaggattccctatttaataaatggtgctgggaaaaccagctagccatatgtagaaagctgaaactggatcccttccttacaccttatacaaaaattaattcaagatggattaaatacttaaatgttagacctaaaaccataaaaaccctagaagaaaacctaggcattaccattcaggacataggcatgggcaaggacttcatgtctaaagcaccaaaagcaatggcaacaaaagccaaaattgacaaatgggatctaattaaactaaagagcttctgcacagcaaaagaaactaccatcagagtgaacaggcaacctacaaaatgggagaaaattttcgtaacctactcatctgacaaggggctaatatccagaatctacaatgaactccaacaaatttacgggaaaaaaacaaacaaccccatcaaaaagtgggcaaaggatatgaacagacacttctcaaaagaagacatttatgcagccaaaagacacatgaaaaaacgctcatcatcactggccatcagagaaatgcaaatcaaaaccacaatgagataccatctcacaccagtgagaatggcgatcattaaaaagtcaggaaacaacaggtgctggagaggctgtggagaaataggaacacttttacactgttggtgggactgtaaactagttcaaccattgtggaagtcagtgtggcaattcctcagggatctagaactagaaatactatttgacccagccatcccattactgggtatatacccaaaggtctgtaaatcatgctgctataaagacacatgcacccatatgtttattgcagcactattcacaatagcaaagacttggaaccaacccaaatgtccaacaatgatagactggattaagaaaatgtggcacatatacaccatggaatactatgcagccataaaaaatgatgagttcatgtcctttgtagggacatggatgaaattggaaatcatcattctcagtaaactatcacaaggccaaaaaaccaaacaccgcatgttctcactcataggtgggaattgaacaatgagaacacatggacacaggacggggatcatcacactctggggcctgttgtggggtgggggtaggggggagagatagcattaggagatatacctaatgctaaatgacgagttaatgggtgcagcacaccagcatggcacatgtatacatatgtaactaacctgcacattgtgcacacgtaccctaaaactttaataaaaaaaaaaa

SEQ ID NO: 770 - DNA, 6143 bp, Homo sapiens
  source 1..6143: mol_type = other DNA
gggggaggagccaagatggccgaataggaacagctccggtctgcatctcccagcgtgagcgacgcagaagacgggtgatttctgcatttccatttgaggtaccgggttcatctcactagggagtgtcagacagtgggcgcaggagagtgggtgcagcgcaccgtgcgccagccgaagcagggtgaggcattgcctcactcgggaagcacaaggggtcggggagttagttccctttcctggtcaaggaaaggggtgacagacggcacctggaaaatcgggccactcccacccgaatactgcgcttttccaatgggcttaggaaacggtgcaccaggagatgatatcccacacctggcttggagggtcctacgcccaccgagtctcactgattgctagcacagcagtctgagatcaaactgcaaggcggcagcgaggctggcggaggggcgcctgccattgcccaggcttgcttaggtaaacaaagcagcctggaagatcgaactgggtggagcccaccacagctcaaggaggcctgcctgcctctgtaggctccacctctgggggcagggcacagacaaaaagacagcagtaacctctgcagacttaaatgtccctgtctgacagctttgaggagagcagtggttctcccagcactcagctggagatctgataatgggcagactgcctcctcaggtgggtccccgagcagcctaactgggaggcaccccccagtaggggcagactgacacctcgcacggccgggtactcctctgagacaaaacttccagaggaacgatcagacagcagcattcgcggatcacgaaaatccgcggttctgcagacactgccgctgatacccaggcaaacagggtctggagtggacctctagcaaattccaacagacctgcagctgagggtcctgtctgttagaaggaaaactaacaaacagaaaggacatccacaccaaaaacccatctgtacatcaccatcatcaaagaccaaaagcggataaaaccataaagatggggaaaaaaacagagcagaaaaactggaaactctaaaaagcagagcgcctctcctcctccaaaggaacgcagttcctcaccagcaacggaacaaagctggatggagaatgactttgacgagttgagagaagaaggcttcagacgatcaaactactccgagctacaggaggaaattcaaaccaaaggcaaagaagttgaaaactctgaaaaaactttagacgaatatataactacaataaccaatacagagaagtgcttaaaggagctgatggagctgaaagccaaggctcgagaactacgtgaagaatgcagaagcctcaggagctgatgcgatcaactggaagaaagggtatcagcgatggaagattaaatgaatgaaatgaagcaagaagggaagtttagagaaaaaagaataaaaagaaatgaacaaagcctccaagaaatatgggactatgtgaaaagaccaaatctgcgtctgatcagtgtacctgaaagtgacggggagaatggaaccaagttggaaaacactctgcaggatattatccaggagaacttccccaatctagcaaggcaggccaacattcagattcaggaaatacagagaacgccacaaagatactccttgagaggagtaactccaagacacgtaattgtcacattcaccaaagttgaaatgaaggaaaaaatgttaaggagaaccagagagaaaggtcaagttacccacaaagggaagctcatcagactaacagcagatctctcggcagaaactctacaagccagaagagagtgggggccaatattcaacattcttaaagaaaagaattttcaacccagaatttcatatccagccaaactaagcttcataagtgaaggagaaataaaatcctttacagacaagcaaatgctgagagattttgtcaccaccaggcctgccctaaaagagcgcctgaaggaagcactaaacatggaaaggcacaacaggtaccagccgctgcaaaatcaagccaaaatgtaaagaccattgagactaggaagaaactgcatcaactaacgagcaaaataaccagctaacatcataatgacaggatcaggttcacacataacaatattaactttaaatgtaaatggactaaatgctccaattaaaagacacagactggcaaattggatcaagagtcaagacccatcagtgtgctgtattcaggaaacccatctcacgtgcagagacacacataggctcaaaataaaaggatggaggaagatctaccaagcaaatggaaaacaaaaaaaggcaggggctgcaatcctagtctctggtaaaacagactttaaaccaacaaagatcaaaagagacaaagaaggccattacgtaatggtaaagggatcaattcaacaagaagagctaactatcctaaatatatatgcacccaatacaggagcacccagattcataaagcaagtcctgagtgacctacaaggagacttagactcccacacaataataatgggagactttaacaccccactgtcaacattagacagatcaatgagacagaaagttaacaaggatacccaggaattggactcagctctgcaccaagcagacgtaatagacatctacagaactctccaccccaaatcaacagaatatacatttttttcagcaccacaccacacctattccaaaactgaccacatagttggaagtaaagctctcctcagcaaatgtaaaagaacagaaattataacaaactgtctctcagaccacagtgcaatcaaactagaactcaggattaagaaactcactcaaaaccgctcaactgcatggaaactgaacaacctgctcctgaatgactactgggtacctaacgaaatgaaggcagtaataaagatgttctttgaaaccaacgagaacaaagtcacaacataccagaatctctgggacacattcaaagcagtgtgtagagggaaatttatagcactaaatgcccacaagagaaagcaggaaagatccaaaattgataccctaacatcacaattaaaagaactagagaagcaagagcaaacacattcaaaagctaacagaaggcaagaaataacgaaaatcagagcagaactgaaggaaatagagacacaaaaaacccttcaaaaaattaatgaatccaggagctggttttttgaaaggatcaacaaaattgatagaccgctagcaagactaataaagaaaaaaagacagaagaatcaaatagatgcaataaaaaatgataaaggggatatcaccaccaatcccacagaaatacaaactaccatcagagaatactacaaacacctctatgcaaataaactagaaaatctagaagaaatggataaattcctcaacacatgcactctcccaagactaaaccaggaagaagttgaatctctgaatagaccaataacaggctctgaaattgtggcaataatcaatagcttaccaaccaaaaagagtccaggaccagatggattcacagccgaattctaccagaggtacaaggaggagctggtaccattccttctgaaactagtccaatcaatagaaaaagagggaatcctccctcactcattttgtgaggccagcatcatcctgatcccaaagccgggcagagacacaaccaaaaaagagaattttagaccaatatccttgatgaacattgatgcaaaaatcctcaataaaatactggcaaaccgaatccagcagcacatcgaaaagcttatccaccatgatcaagtgggtttcatccctgggatgcaaggctggttcaatatacgcaaatcaataaatgtaatgcagcatataaacagaaccaaagacaaaaaccacatgattatctcaatagatgcagaaaaggcctttgacaaaattcaacaactcttcatgctaaaaactgtcaataaattaggtattgatgggatgtatctcaaaataataagagctatctatgacagacccacagccaatatcatactgaatgggcaaaaactggaagcattccctttgaaaactggcacaagacagggatgccctctctcaccactcctattcaacatagtgttgaaagttctggccagggcaattaggcaggaaaaggaaataaagggtattcaattaggaaaggaggaagtcaaattgtccctgtttgcagacgacatgattgtatatctagaaaaccccattgtctcagcctaaaatctccttaagctgataagcaacttcagcaaagtctcaggatacaaaatcaatgtacaaaaatcacaagcattcttgtacaccaataacagacaaacagagagccaaatcatgagtgaactcccattcacagttgcttccaagagaataaaatacttaggaatccaacttacaagggacgtgaaggacctcttcaaggagaactacaaaccactgctcaatgaaataaaagaggatacaaacgaatggaagaacattccatgctcatgggtaggaagaatcaatatcttgaaaatggccatactgcccaaggtagtttatagattcaatgccatccccatcaagctaccaatgactttcttcacagaattggaaaaaactactttaaagttcatatggaatcaaaaagcccgcatcaccaagtcaatcctaagccgaaagaacaaagctggaggcatcacgctacctgacttcaaacaatactacaaggctacagtaaccaaaacagcatggtactggtaccaaaacagagatatagatcaatggacagaacagagccctcagaaataacaccacatatctacaactatctgatctttgacaaacctgagaaaaacaagcaatggggaaaggattccctatttaataaatggtgctgggaaaactggcaaccatatgtagaaagctgaaactggatcccttccttataccttatacaaaaattaattcaagatggattaaagacttaaacgttagatctaaaaccataaaaaccctagaagaaaacctaggcattaccattcaggacataggcatgggcaaggacttcatgtctaaaacaccaaaagcaatggcaacaaaagccaaaattgacaaatgggatctaattaaactaaagagcttctgcacagcaaaagaaactaccatcagagtgaacaggcaacctacaaaatgggagaaaatttttgcaacctactcatctgacaaagggctaatatccagaatctacaatgaactccaacaaatttacaggaaaaaaacagacaaccccatcaaaaagtgggcaaaggatatgaacagacacttctcaaaagaagacatttatgcagccaaaagacacatgaaaaaatgctcatcatcactggccatcagagaaatgcaaatcaaaaccacaatgagataccatctcacaccagttagaatggcaatcattaaaaagtcaggaaacaacaggtgctggagaggatgtggagaaataggaacacttttacactcttggtgggactgtaaactagttcaaccgttgtggaagacagtgtggcgattcctcagggatctagaactagaaataccatttgacccagccatcccatttctgggtatatacccaaaggactataaatcatgctgctataaagacacatgtacatgtatgtttattgtggcactattcacaatagcaaagacttggaaccaacccaaatgtccaacaatgatagactggattcagaatatgtggcacatatgcaccatggaatactatgcagccataaaaaatgatgagttcatgtcctttgtagggacatggatgaaattggaaatcatcattctcagtaaactatctcaaggacaaaaaaccaaacaccccatgttctcactcatagatgggaattgaacaatgagaacacatggacacaggaaggggaacatcacactctggggaatgttatggggtggggggaggggggagggatagcattaggagatatacctaatgctaaatgacgagttaatgggtgcagcacaccagcatggcacatgtatacatatgtaactaacctgcatattgtgcacatgtaccctaaaacttaaagtataatattaaaaaaaaa

SEQ ID NO: 771 - DNA, 1533 bp, Homo sapiens
  source 1..1533: mol_type = other DNA
ctctgcctctgcctctgcctctccccacggtctccctctccctctctttccacggtctccctctgatgccgagtcgaagctggactgtactgctgccatctcggctcactgcaacctccctgcctgattctcctgcctcagcctgccgagtgcctgcgattgcaggcgcgcgccgccacgcctgactggttttcgtatttttttggtggagacagggtttcgctttgttggccgggctggtctccagctcctaaccgcgagtgatccgccagcctcggcctctcgaggtgccgggattgcagacggagtctcgttcactcagtgctcaatggtacccaggctggaatgcagtggcgtgatctcggctcgctacaaccacctcccagccgcctgccttggcctcccaaagagccgagattgcagcctctgcccggctgccaccccgtctgggaagtgaggagcgtctctgcctggctgcccatcgtctgggatgtgaggagaccctctccctggctgcccagtctggaaagtgaggagcgtctctgcccggccaccatcccatctaggaaatgaggagcgtctctgcccggccgcccatcgtctgagatgtgggaagcgcctctgccccgctgccccgtctgggatgtgaggagcgcctctgaccggccgcgaccccgtctgggaggtgaggagcgtctgtgcccagccgccccatctgagaagtgaggagaccctctgcctggcaaccaccccgtctgagaagtgaggagtccctccgcccggcagctgccccgtctgagaagtgaggagcccctccgtccggcagccgccccgtctgagaagtgaggagcgtctccgccccgcagccaccccgtccgggagggaggtgggggggtcagccccccgcccggccagccgccccgtccgggaggtgaggggtgcctctgcccggccgcccctactgggaagtgaggagcccctctgcccggccaccacctggtctgggaggtgtacccaacagctcattgagaacgggccatgatgacaatggcggttttgtggaatagaaagggcggaaaggtggggaaaagattgagaaatcggatggttgccgtgtctgtgtagaaagaagtagacatgggagacttttcattttgttctgtactaagaaaaattcttctgccttgggatcctgttgatctgtgaccttacccccaaccctgtgctctctgaaacatgtgctgtgtccactcagggttaaatggattaagggcggtgcaagatgtgctttgttaaacagatgcttgaaggcagcatgctcgttaagagtcatcaccactccctaatctcaagtacccagggacacaaacactgcagaaggccgcagggtcctctgcctaggaaaaccagagacctttgttcacttgtttatctgctgaccttccctccactattgtcctatgaccctgccaaatccccctctctgggaaacacccaagaatgatcaataaatactaaaaaaaaaaaaaaaaa

SEQ ID NO: 772 - DNA, 6425 bp, Homo sapiens
  source 1..6425: mol_type = other DNA
ggcaagatgacagaataggaacagctctcatctgcagctcccagtgatatcaacacagaggcgggtgatttctgcatttacaactgaggtacctggctcatctcattgcgactggttagacagtgggtacagcccacggagggcaagctgaagcaaggtggggctttgcctcacccagggagtgcaaggggtcggggaattccctctcctagccaagggaagctgtgagggactgtgctgtgagaaatggtacattccggctcagatacttcgcttttcccatggtcttcgcaacctgcagatcaagagattccctcaggtgcctacaccaccagggccctgggtttcaagcacaaaactgggtggccatctgggcagacactgagctagctgctgtttgttttgttttgtttcttttcataccccagtggtgcctggaacgccagcaagacagaaccgtttacccccctggaaagggggctgaagccagggagccaagtggtccagctcagcggatcccacccccacagatcccagcaagctaagatccactggcttgaaattcttgctgccagcacagcagtctgaagtcgacctggggtgctggagcttggtggggggaggggtgtccaccattactgaagcttgagtaggcagttttcccctcacagtataaacaaagcctccaggaagttcgaactgagtggagccccctgcagctcaacaaagctgctgtagccagactgcctctctagattactcctctctgggcaggacatctctgaaacaaaggctgcagccccagtcaggggcttatagataaaactcacatctccctgggacagagcacctgggggaaggggcggctgtgggtgcagcttcaacagacttaaatgtttctgcctgctggctctgaagagagcagcagatctcccaacataggactcaagctctgctaagggacagactgcctcctcacgtggatccatgacccccgtgcctcccgactgggagacacctcccagcaggggtcaacagacacctcatacaggagagctctggctggcatctggcgggtggccctctgggacaaagcttccagaggaaggaccaggcagcaatctttgctgttctgcagcctctgctggtgacatccagacaaacagggtctggagttggcttccagcaaactccagcagacctgcagcagaggggcctgactgtttgaaggaaaactaacaaacagaaaggaagagcatcaacatcaacaaaaggatgtccacacaaaaaccctatctgaaggtcaccaacatcaaagaccaaaggtagataaatccaagaagatggggaaaaaccagtgcaaaaaggctgaaaataccaaaaaccaggacgccttttctcctccaaaggatcacaactccttgccagcaagggaaaaaaactagacagagaatgagtttgacgaattcacagaagtaggcttcagaaggtgggtaataacaaactcctctgagctaaaggagcatgttctaacccaatgcaaggaagctaagaaccttgaaaaaaggttagaggaattgctaactagaataaccagtttagagaagaacataaatgacctgatggagctgaaaaaaacagcacaagaacttcatgaagcatacacaagtatcaatagccagattaatcaagcagaagaaaggatatcagaggttgaacatgcacttaatgaaataaagcctgaagacaagtttacagaaaaaagaatgaaaaagaatgaacaaagcatccaagaaatatgggactttgtgaaaagaccaaacctacatttgattgatgtacctgaaagtgacagggagaatggaaccaagttggaaaacactcttcaagatattatccaggagaacttccccaacctagcaaggcagaccaacattcaaattcaagaaatacagaaaacaccacaaagatactcctcgagaagagcaaccccaagacacataattgtcagattcaccaaggttgaaatgaaggaaaaaatgttaagggcagccagagagaaaggtcaggttacccagaaagggaagcccctgagactaacagccagtctctctgcagaaaccctacaagccagaagagagtgggggccaataatcaacattcttaaagaaaagaattttcaacccagaatttcatatccagccaaactaagcttcatagcaaagaagaaataaaatcctttacagacaagcaagtgctgagatattttgttaccaccaggcctgccttacaagagctgctgaaggaagcactaaatatggaaaggaaaaaccggtaccagctactgcaaaaacatactgtaaagaccatcgacactgtgaagaaactgcatcaactaacgggcaaaataaccagctagcatcataatgacaggatcaaatccacacatgtaaatgggctaaatgccccaattaaaagacacagactggcaaattggatagagtcaagacccattggtgtgctgtattcaggagacccaactcacgtgcagaaacacacttaggctcaaaataaagagatggaggaatatctaccaagcaaatggaagggaaaaaaaaaaacgggttgcaatcctagtctctggtaaaacagactttaaaccaacaaagatcaaaaaagacaatgaagggcattacataatggtaaagggatcaatgcaacaagaagagctaactcttctaaatatatatgcacccaatacaggagcacccagattcataaagcaagttcttcgagacctacaaagagacttagactcccacacaataatagtgggagactttaacaccccactgtcaatattagacagatcagcgagacagaaaattaacaaagatattcaggacttgaactcagctctggaccaagcggacctaatagacatctacagaactctccaccccaaatcaatggaatatacattcttctcagcaccacattgcacttattctaaaattaaccacataattggaagtaaaacactcctcagcaaatgcaaaagaatggaaatcataacaaacagcctctcagaccacagtgcaatcaaattagaactcaggattaagaaactcactcaaaaccacacaactacatggaaactaaacaaagaatgactactgggtacataacgaaattaaggcagaaataagtaagttctttgaaaccaatgagaacaaagacgtgatgtaccagaatctctaggacacatttaaagcagtatgtagagggaaatttatagcactaaatgcccacaggagaaagcaggaaagatctaaaatcaacaccctaacatcacaattaaaagaactagagaagcaagatcaaacaaattcgaaagctagcagaagacaggaaataactaagatcagagcagaactgaaggagatagagacacaaaaagcccttcaaaaaattaatgaatccaggagctggttttttaaaagattaacaaaatagatagactgctagccagactgattaaagaagaaaagagaagaatcaaatagacgcaataaaaaatgataaaggggatgtcaccactaatcccacagaaatacaaactaccatcagagaatactataaacacctctatgcaaataaattagaaaatctagaagaaatgaataaattccccgacacatacatcctcccaagactaaaccaggaagaagtcgaatccctgaatagaccaataacaagttctgaaattgacgcagtaattaatagcctaccaaacaaaaagagcccagaacaagatggattcacagccgaattttaccaggggtacaaagaggagctactaccatttaccagggatacaaagaggagctagtaaaattccaaataacagaaaaagagggatgcctccctaactcattttatgaggacagcatcatcctgataccaaaacctggcagagaaaacaaaaaaagaaaattttagttcaatatccctgatgaaaattgatgcgaaaatcctcaataaaatactggcaaagcgaatccagcagcacattaaaaaacttatccaccacaatcaagtcgtctccattcctgggatgcaagggatgtgttcaacatacgcaaatgagtaaacgtaattcatcacataaacagaaccaatgacaaaaaccacatgattatctcaatagatgcagaaaaagccttcgataaaattcaaaaccccttcatgctaacaactctcaataaactaggtgttgatgtaacgtatctcaaaataataagagctatttatgacagacccacagccgatatactgagtgggcaaaagctggaagcattccctttgaaaactggcacaagacaaggatgccctctctcaccactcctattcaacatagtattggaagttctgtccgtggcagtcaggcgagagaaagaaataaagagtattcaaataggaagagaggaagtcaaattgtctctgtttgcagatgacatgattgttatatttagaaaaccccaccgtctcagcccagtatcttcttaagctgataggcaacttcagcaaagtgtcaggatacaaaatcaatgtgcaaaaatcattagcattcctatacaccaataatagacaagcacagagtgaaatcatgagtgaactcccattcacaattgctacaaagagaataaaatacctaggaatccaacttacaaaggatgtgaaggacctcttcaaggagatctacaaaccactgctcaaggcaataagagaggacagaaacgaatggaaaaacattccatgctcatggataggaagaatcaatatcgtgaaaatggccatactacccaaagtaatttatagattcagtgctatccccatcaagctaccattgactgtcttcacagaattagaaaaagctactttaaatctcatatggaaccaaaaaagaccccatatagccaatagattcgtaaggaaaaagaacaaagctggaggcatcacgctacctgacttcaaactatactacaaggctacagtaaccaaacagcatggtactggtaccaaaacagatatatagaccaatggaacagaacagaggcctcagaaatagagccacacatctacaaccatctaatctttgacaaacctgacacaaacaagcaatggggaaaggattccctatttaataaatggtgttgggaaaactggctagccatatgcagaaaactgaaactggatcccttccttacaccttacacaaaaattaactcaagatggattaaagacttaaatgtaagacccaaaactataaaaaccctagaagaaaacctaagcaatatcattcaagacataggcatgggcaaagacttcatgactcaaacaccaaaagcaatggcaacaaaagccaaaattgacaaatgggatctaattaaactaaatagcttctgcacagcaaaagaaactatcatcagaatgaacaggcaacctacagaatgggggaaaatttttgcaatctatccccctgacaaagggctaatgtcgagaatctacaaggaacttaaacaaatttagaagaaaacaaaaacactgatcaaaaaatgggcaaaggatatgaacagacacttctcaaaaaaagacatttatgtagccaacaaacatgaaaaaaagctcatcgtcactggtcattagagaaatgcaaatcaaaaccacaatgagataccatctcacgccacttagaatggtgatcattaaaaagtcaggaaacaacagatgctggagaagatgtggagaaataggaacgcttttacactgttggtgagagtgtaaattagttcaaccattgtggaagacagtgtggcaattcctcaaggatctagaaccaaaaataccatttgacccagcaattccattactgggtatatatacccaaaggattataaatcattgtactataaagacacatgcacacatgtgtttattgcagcactattcacaataccaaagacttggaaccaacccaaattcccatctgtgatagactggataaagaaaatatgtcacatggaatactatgcagccatagaaaggatgagttcatgtcctttgcagggacatggatgaagctggaaaccatcattttcagcaaactaacacaggaacagaaaaccaaacactgcatgctctcactcataagtgggagtcgaacaatgagaacacatggacacagggaggggaacatcacacaccggggcctgttgggggctggggggctaggagagggatagcattaggagaaatacctaatgtagatgacaggttgatgggtgcagcaaaccaccatggcacgtgtataactatgtaacaaacctgcacgttctgcacatgtagcccagaacttaaagtat

SEQ ID NO: 773 - DNA, 6031 bp, Homo sapiens
  source 1..6031: mol_type = other DNA
ggaggaggagccaagatggccgaataggaacagctccggtctacagctcccagcgtgagcgacgcagaagacgggtgatttctgcatttccatctgaggtaccgggttcatctcactagggagtgccagacagtgggcgcaggccagtgtgtgtgcgcaccgtgcgcgagccaaagcagggcgaggcattgcctcacctgggaagcgcaaggggtcagggagttccctttccgagtcaaagaaaggggtgacggacgcacctggaaaatcgggtcactcccacccgaatattgcgcttttcagaccggcttaagaaacggcgcaccacgagactatatcccacacctggctcagagggtcctacgcccacggaatctcgctgattgctagcacagcagtctgagatcaaactgcaaggcggcaacgaggctgggggaggggcgcccgccattgcccaggcttgcttaggtaaacaaagcagccgggcagctcgaactgggtggagcccaccacagctcaaggaggcctgcctgcctctgtaggctccacctctgggggcagggcacagacaaacaaaaagacagcagtaacctctgcagacttaagtgtccctgtctgacagctttgaagagagcagtggttctcccagcacgcagctggagatctgagaacgggcagactgcctcctcaagtgggtccctgacccctgacccccgagcagcctaactgggaggaaccccccagcaggggcacactgacacctcacacggcagggtattccaacagacctgcagctgagggtcctgtctgttagaaggaaaactaacaaccagaaaggacatctacaccgaaaacccatctgtacatcaccatcatcaaagaccaaaagtagataaaaccacaaagatggggaaaaaacagaacagaaaaactggaaactctaaaacgcagagcgcctctcctcctccaaaggaacgcagttcctcaccagcaacagaacaaagctggatggagaatgattttgacgagctgagagaagaaggcttcagacgatcaaattactctgagctacgggaggacattcaaaccaaaggcaaagaagttgaaaactttgaaaaaaatttagaagaatgtataactagaataaccaatacagagaagtgcttaaaggagctgatggagctgaaaaccaaggctcgagaactacgtgaagaatgcagaagcctcaggagccgatgcgatcaactggaagaaagggtatcagcaatggaagatgaaatgaatgaaatgaagcgagaagggaagtttagagaaaaaagaataaaaagaaatgagcaaagcctccaagaaatatgggactatgtgaaaagaccaaatctacgtctgattggtgtacctgaaagtgatgtggagaatggaatcaagttggaaaacactctgcaggatattatccaggagaacttccccaatctagcaaggcaggccaacgttcagattcaggaaatacagagaacgccacaaagatactcctcgagaagagcaactccaagacacataattgtcagattcaccaaagttgaaatgaaggaaaaaatgttaagggcaaccagagagaaaggtcgggttaccctcaaaggaaagcccatcagactaacagcggatctctcggcagaaaccctacaagccagaagagagtgggggccaatattcaacattcttaaagaaaagaattttcaacccagaatttcatatccagccaaactaagcttcataagtgaaggagaaataaaatactttatagacaagcaaatgctgagagattttgtcaccaccaggcctgccctaaaagagctcttgaaggaagcgctaaacatggaaaggaacaaccggtaccagccgctgcaaaatcatgccaaaatgtaaagaccatcgagactaggaagaaactgcatcaactgatgagcaaaatcaccagctaacatcataatgacaggatcaaattcacacataacaatattaactttaaatataaatggactaaattctgcaattaaaagacacagactggcaagttggataaagagtcaagacccatcagtgtgctgtattcaggaaacccatctcatgtgcagagacacacataggctcaaaataaaaggatggaggaagatctaccaagccaatggaaaacaaaaaaaggcaggggttgcaatcctagtctctgataaaacagactttaaaccaacaaagatcaaaagagacaaagaaggccattacataatggtaaagggatcaattcaacaagaggagctaactatcctaaatatttatgcacccaatacaggagcacccagattcataaagcaagtcctcagtgacctacaaagagacttagactcccacacattaataatgggagactttaacaccccactgtcaacattagacagatcaacgagacagaaagtcaacaaagatacccaggaattgaactcagctctgcaccaagcagacctaatagacatctccagaactctccaccccaaatcaacagaatatacatttttttcagcaccacaccacacctattccaaaattgaccacatagttggaagtaaagctctcctcagcaaatgtaaaagaacagaaattataacaaactatctctcagaccacagtgcaatcaaactagaactcaggattaagaatctcactcaaagccgctcaactacatggaaactgaacaacctgctcctgaatgactactgggtacataacgaaatgaaggcagaaataaagatgttctttgaaaccaacgagaacaaagacaccacataccagaatctctgggacgcattcaaagcagtgtgtagagggaaatttatagcactaaatgcctacaagagaaagcaggaaagatccaaaattgacaccctaacatcacaattaaaagaactagaaaagcaagagcaaacacattcaaaagctagcagaaggcaagaaataactaaaatcagagcagaactgaaggaaatagagacacaaaaaacccttcaaaaactcaatgaatccaggagctggttttttgaaaggatcaacaaaattgatagaccgctagcaagactaataaagaaaaaaagagagaagaatcaaatagacacaataaaaaatgataaaggggatatcaccaccgatcccacagaaatacaaactaccatcagagaatactacaaacacctctacgcaaataaactagaaaatctagaagaaatggatacattccttgacacatacactctcccaagactaaaccaggaagaagttgaatctctgaatagaccaataacaggctctgaaattgtggcaataatcaatagtttaccaaccaaaaagagtccaggaccagatggattcacagccgaattctaccagaggtacaaggaggaactggtaccattccttctgaaactattccaatcaatagaaaaagagggaatcctccctaactcattttatgaggccagcatcattctgataccaaagccgggcagagacacaaccaaaaaagagaattttagaccaatatccttgatgaacatggatgcaaaaatcctcaataaaatactggcaaaccgaatccagcagcacatcaaaaagcttatccaccatgatcaagtgggcttcatccctgggatgcaaggctggttcaatatacacaaatcaataaatgtaatccagcatataaacagagccaaagacaaaaaccacatgattatctcaatagatgcagaaaaagcctttgacaaaattcaacaacccttcatgctaaaaactctcaataaattaggtattgatgggacgtatctcaaaataataagagctatctatgacaaacccaccgccaatatcatactgaatgggcaaaaactggaagcattccctttgaaaactggcacaagacagggatgccctctctcaccgctcctattcaacatagtgttggaagttctggccagggcaatcaggcagaagaaggaaataaagggtattcaattaggaaaagagaaagtcaaattgtccctgtttgcagacgacatgattgtttatctagaaaaccccatcgtctcagcccaaaatctccttaagctgataagcaacttcagcaaagtctcaggatacaaaatcaatgtacaaaaatcacaagcattcttatacaccaacaacagacaaacagagagccaaatcatgggtgaactcccattcacaattgcttcaaagagaataaaatacctaggaatccaacttacaagggatgtgaaggacctcttcaaggagaactacaaaccactgctcaaggaaataaaagaggacacaaacaaatggaagaacattccatgctcatgggtaggaagaatcaatatcgtgaaaatggccacactgcccaaggtaatttacagattcaatgccatccccatcaagctaccaatgactttcttcacagaattggaaaaaactactttaaagttcatatggaaccaaaaaagagcccgcattgccaagtcaatcctaagccaaaagaacaaagctggaggcatcacactacctgacttcaaactatactacaaggctacagtaaccaaaacagcatggtactggtaccaaaacagagatatagatcaatggaacagaacagagccctcagaaataacgccacatacctacaactatctgatctttgacaaacctgagaaaaacaagcaatggggaaaggattccctatttaataaatggtgctgggaaaactggctagccatatgtagaaagctgaaactggatcccttccttacaccttatacaaaaatcaattcaagatggattaaagatttaaacgttaaacctaaaaccataaaaaccctagaagaaaacctaggcattaccattcaggacataggcgtgggcaaggacttcatgtccaaaacaccaaaagcaatggcaacaaaagacaaaattgacaaatgggatctaattaaactaaagagcttctgcacagcaaaagaaactatcatcagagtgaacaggcaacctacaacatgggagaaaattttcgcaacctactcatctgacaaagggctaatatccagaatctacaatgaactcaaacaaatttacaagaaaaaaacaaacaaccccatcaaaaagtgggcgaaggacatgaacagacacttctcaaaagaagacatttatgcagccaaaaaacacatgaagaaatgctcatcatcactggccatcagagaaatgcaaatcaaaaccactatgagatatcatctcacaccagttagaatggcaatcattaaaaagtcaggaaacaacaggtgctggagaggatgcggagaaataggaacacttttacactgttggtgggactgtaaactagttcaaccattgtggaagtcagtgtggcgattcctcagggatctaggactagaaataccatttgacccagccatcccattactgggtatatacccaaatgactataaatcatgctgctataaagacacatgcacacgtatgtttattgcggcactattcacaatagcaaagacttggaaccaacccaaatgtccaacaatgatagactggattaagaaaatgtggcacatatacaccatggaatactatgcagccataaaaaatgatgagttcatatcctttgtagggacatggatgaaattggaaaccatcattctcagtaaactatcgcaagaacaaaaaaccaaacaacgcatattctcactcataggtgggaattgaacaatgagatcacatggacacaggaaggggaatatcacactctggggactgtggtggggtcgggggaggggggagggatagcattgggagatatacctaatgctagatgacacattagtgggtgcagcgcaccagcatggcacatgtatacatatgtaactaacctgcacaatgtgcacatgtaccctaaaacttagagtataataaaaaaaaaaaa

SEQ ID NO: 774 - DNA, 7501 bp, Homo sapiens
  source 1..7501: mol_type = other DNA
tctggtgcccaacgtggaggcttttctctagggtgaaggtacgctcgagcgtggtcattgaggacaagtcgacgagagatcccgagtacgtctacagtcagccttacggtaagcttgtgcgctcggaagaagctagggtgataatggggcaaactaaaagtaaaattaaaagtaaatatgcctcttatctcagctttattaaaattcttttaaaaagagggggagttaaagtatctacaaaaaatctaatcaagctatttcaaataatagaacaattttgcccatggtttccagaacaaggaactttagatctaaaagattggaaaagaattggtaaggaactaaaacaagcaggtaggaagggtaatatcattccacttacagtatggaatgattgggccattattaaagcagctttagaaccatttcaaacagaagaagatagtatttcagtttctgatgcccctggaagcggtataatagattgtaatgaaaagacaaggaaaaaatcccagaaagaaaccgaaagtttacattgcgaatatgtagcagagccggtaatggctcagtcaacgcaaaatgttgactataatcaattacaggaggtgatatatcctgaaacgttaaaattagaaggaaaaggtccagaattagtggggccatcagagtctaaaccacgaggcacaagtcctcttccagcaggtcaggtgcctgtaacattacaacctcaaaagcaggttaaagaaaataagacccaaccgccagtagcctatcaatactggcctccggctgaacttcagtatcggccacccccagaaagtcagtatggatatccaggaatgcccccagcaccacagggcagggcgccataccctcagccgcccactaggagacttaatcctacggcaccacctagtagacagggtagtgaattacatgaaattattgataaatcaagaaaggaaggagatactgaggcatggcaattcccagtaacgttagaaccgatgccacctggagaaggagcccaagagggagagcctcccacagttgaggccagatacaagtctttttcgataaaaatactaaaagatatgaaagagggagtaaaacagtatggacccaactccccttatatgaggacattattagattccattgctcatggacatagactcattccttatgattgggagattctggcaaaatcgtctctctcaccctctcaatttttacaatttaagacttggtggattgatggggtacaagaacaggtccgaagaaatagggctgccaatcctccagttaacatagatgcagatcaactattaggaataggtcaaaattggagtactattagtcaacaagcattaatgcaaaatgaggccattgagcaagttagagctatctgccttagagcctgggaaaaaatccaagacccaggaagtacctgcccctcatttaatacagtaagacaaggttcaaaagagccctatcctgattttgtggcaaggctccaagatgttgctcaaaagtcaattgccgatgaaaaagcccgtaaggtcatagtggagttgatggcatatgaaaacgccaatcctgagtgtcaatcagccattaagccattaaaaggaaaggttcctgcaggatcagatgtaatctcagaatatgtaaaagcctgtgatggaatcggaggagctatgcataaagctatgcttatggctcaagcaataacaggagttgttttaggaggacaagttagaacatttggaggaaaatgttataattgtggtcaaattggtcacttaaaaaagaattgcccagtcttaaacaaacagaatataactattcaagcaactacaacaggtagagagccacctgacttatgtccaagatgtaaaaaaggaaaacattgggctagtcaatgtcgttctaaatttgataaaaatgggcaaccattgtcgggaaacgagcaaaggggccagcctcaggccccacaacaaactggggcattcccaattcagccatttgttcctcagggttttcagggacaacaacccccactgtcccaagtgtttcagggaataagccagttaccacaatacaacaattgtcccccgccacaagtggcagtgcagcagtagatttatgtactatacaagcagtctctctgcttccaggggagcccccacaaaaaatccctacaggggtatatggccccctgcctgaggggactgtaggactaatcttgggaagatcaagtctaaatctaaaaggagttcaaattcatactagtgtggttgattcagactataaaggcgaaattcagttggttattagctcttcagttccttggagtgccagtccaggagacaggattgctcaattattactcctgccatatattaagggtggaaatagtgaaataaaaagaataggagggcttggaagcactgatccaacaggaaaggctgcatattgggcaagtcaggtctcagagaacagacctgtgtgtaaggccattattcaaggaaaacagtttgaagggttggtagacactggagcagatgtctctatcattgctttaaatcagtggccaaaaaattggcctaaacaaaaggctgttacaggacttgtcggcataggcacagcctcagaagtgtatcaaagtatggagattttacattgcttagggccagataatcaagaaagtactgttcagccaatgattacttcaattcctcttaatctgtggggtcgagatttattacaacaatggggtgcggaaatcaccatgcccgctccattatatagccccacgagtcaaaaaatcatgaccaagaggggatatataccaggaaagggactagggaaaaatgaagatggcattaaaattccatttgaggctaaaataaatcaaaaaagagaaggaatagggtatcctttttaggggcggccactatagagcctcctaaacccataccattaacttggaaaacagaaaaaccggtgtgggtaaatcagtggccgctaccaaaacaaaaactggaggctttacatttattagcaaatgaacagttagaaaagggtcatattgagccttcgttctcaccttggaattctcctgtgtttgtaattcagaagaaatcaggcaaatggcgtatgttaactgacttaagggctgtaaacgccgtaattcaacccatggggcctctccaacccgggttgccctctccggccatgatcccaaaagattggcctttaattataattgatctaaaggattgcttttttaccatccctctggcagagcaggattgtgaaaaatttgcctttactataccagccataaataataaagaaccagccaccaggtttcagtggaaagtgttacctcagggaatgcttaatagtccaactatttgtcagacttttgtaggtcgagctcttcaaccagttaaagttttcagactgttatattattcattatattgatgatattttatgtgctgcagaaacgaaagataaattaattgactgttatacatttctgcaagcagaggttgccaatgctggactggcaatagcatctgataagatccaaacctctactccttttcattatttagggatgcagatagaaaatagaaaaattaagccacaaaaaatagaaataagaaaagacacattaaaaacactaaatgattttcaaaaattactaggagatattaattggatttggccaactctaggcattcctacttatgccatgtcaaatttgttctctatcttaagaggagactcagacttaaatagtaaaagaatgttaaccccagaggcaacaaaagaaattaaattagtggaagaaaaaattcagtcagcgcaaataaatagaatagatcccttagccccactccaacttttgatttttgccactgcacattctccaacaggcatcattattcaaaatactgatcttgtggagtggtcattccttcctcacagtacagttaagacttttacactgtacttggatcaaatagctacattaatcggtcagacaagattacgaataataaaattatgtggaaatgacccagacaaaatagttgtccctttaaccaaggaacaagttagacaagcctttatcaattctggtgcatggaagattggtcttgctaattttgtgggaattattgataatcattacccaaaaacaaagatcttccagttcttaaaattgactacttggattctacctaaaattaccagacgtgaacctttagaaaatgctctaacagtatttactgatggttccagcaatggaaaagcagcttacacagggccgaaagaacgagtaatcaaaactccatatcaatcggctcaaagagcagagttggttgcagtcattacagtgttacaagattttgaccaacctatcaatattatatcagattctgcatatgtagtacaggctacaagggatgttgagacagctctaattaaatatagcatggatgatcagttaaaccagctattcaatttattacaacaaactgtaagaaaaagaaatttcccattttatattactcatattcgagcacacactaatttaccagggcctttgactaaagcaaatgaacaagctgacttactggtatcatctgcactcataaaagcacaagaacttcatgctttgactcatgtaaatgcagcaggattaaaaaacaaatttgatgtcacatggaaacaggcaaaagatattgtacaacattgcacccagtgtcaagtcttacacctgcccactcaagaggcaggagttaatcccagaggtctgtgtcacgcatgtaccttcatttggaagattatcatatgttcatgtaacagttgatacttattcacatttcatatgggcaacttgccaaacaggagaaagtacttcccatgttaaaaaacatttattgtcttgttttgctgtaatgggagttccagaaaaaatcaaaactgacaatggaccaggatattgtagtaaagctttccaaaaattcttaagtcagtggaaaatttcacatacaacaggaattccttataattcccaaggacaggccatagttgaaagaactaatagaacactcaaaactcaattagttaaacaaaaagaagggggagacagtaaggagtgtaccactcctcagatgcaacttaatctagcactctatactttaaattttttaaacatttatagaaatcagactactacttctgcagaacaacatcttactggtaaaaagaacagcccacatgaaggaaaactaatttggtggaaagataataaaaataagacatgggaaatagggaaggtgataacgtgggggagaggttttgcttgtgtttcaccaggagaaaatcagcttcctgtttggatacccactagacctttgaagttctacaatgaacccatcagagatgcaaagaaaagcacctccgcggagacggagacaccgcaatcgagcaccgttgactcacaagatgaacaaaatggtgacgtcagaagaacagatgaagttgccatccaccaagaaggcagagccgccgacttgggcacaactaaagaagctgacgcagttagctacaaaatatctagagaacacaaaggtgacacaaaccccagagagtatgctgcttgcagccttgatgattgtatcaatggtggtaagtctccctatgcctgcaggagcagctgcagctaactataccaactgggcctatgtgcctttcccgcccttaattcgggcagtcacatggatggataatcctatagaagtatatgttaatgatagtgtatgggtacctggccccatagatgatcgctgccctgccaaacctgaggaagaagggatgatgataaatatttccattgggtatcgttatcctatttgcctagggagagcaccaggatgtttaatgcctgcagtccaaaattggttggtagaagtacctattgtcagtcccatctgtagattcacttatcacatggtaagcgggatgtcactcaggccacgggtaaattatttacaagacttttcttatcaaagatcactaaaatttagacctaaagggaaaccttgccccaaggaaattcccaaagaatcaaaaaatacagaagttttagtttgggaagaatgtgtggccaatagtgcggtgatattacaaaacaatgaatttggaactattatagattggacacctcaaggtcaattctaccacaattgctcaggacaaactcagtcgtgtccaagtgcacaagtgagtccagctgttgatagcgacttaacagaaagtttagacaaacataagcataaaaaattgcagtctttctacccttgggaatggggagaaaaaggaatctctaccccaagaccaaaaataataagtcctgtttctggtcctgaacatccagaattatggaggcttactgtggcctcacaccacattagaatttggtctggaaatcaaactttagaaacaagagatcgtaagccattttatactgtcgacctaaattccagtctaacacttcctttacaaagttgcgtaaagcccccttatatgctagttgtaggaaatatagttattaaaccagactcccagactataacctgtgaaaattgtagattgcttacttgcattgattcaacttttaattggcaacaccgtattctgctggtgagagcaagagagggcgtgtggatccctgtgtccatggaccgaccatgggaggcctcaccatccatccatattttgactgaagtattaaaaggtgttttaaatagatccaaaagattcatttttactttaattgcagtgattatgggattaattgcagtcacagctacggctgctgtagcaggagttgcattgcactcttctgttcagtcagtaaactttgttaatgatgggcaaaaaaattctacaagattgtggaattcacaatctagtattgatcaaaaattggcaaatcaaattaatgatcttagacaaactgtcatttggatgggagacagactcatgagcttagaacatcgtttccagttacaatgtgactggaatacgtcagatttttgtattacaccccaaatttataatgagtctgagcatcactgggacatggttagacgccatctacagggaagagaagataatctcactttagacatttccaaattaaaagaacaaattttcgaagcatcaaaagcccatttaaatttggtgccaggaactgaggcaattgcaggagttgctgatggcctcgcaaatcttaaccctgtcacttgggttaagaccattggaagtactacgattataaatctcatattaatccttgtgtgcctgttttgtctgttgttagtctgcaggtgtacccaacagctccgaagagacagcgaccatcgagaacgggccatgatgacgatggcggttttgtcgaaaagaaaagggggaa

SEQ ID NO: 775 - DNA, 6026 bp, Homo sapiens
  source 1..6026: mol_type = other DNA
gggggaggagccaagatggccgaataggaacagctccggtctacagctcccagcgtgagcgacgcagaagacggtgatttctgcatttccatctgaggtaccgggttcatctcactagggagtgccagacagtgggcgcaggccagtgtgtgtgcgcaccgtgcgcgagccgaagcagggcgaggcattgcctcacctgggaagcgcaaggggtcagggagttccctttccgagtcaaagaaaggggagacggacgcacctggaaaatcgggtcactcccacccgaatattgcgcttttcagaccggcttaagaaacggcgcaccatgagactatatcccacacctggctcggagggtcctacgcccacggaatctcgctgattgctagcacagcagtctgagatcaaactgcaaggcggcaacgaggctgggggaggggcgcccaccattgcccaggcttgcttaggtaaacaaagcagccaggaagctcgaactgggtggagcccaccacagctcaaggaggcctgcctgcctctgtaggctccacctctgggggcagggcacagacaaacaaaaagacagcagtaacctctgcagacttaagtgtccctgtctgacagctttgaagagagcagtggttctcccagcacgcagctggagatctgagaacgggcagactgcctcctcaagtgggtccctgactcctgacccccgagcagcctaactgggaggcaccccccagcaggggcacactgacacctcacacggcagggtattccaacagacctgcagctgagggtcctgtctgttagaaggaaaactaacaaccagaaaggacatctacaccgaaaacccatctctacatcaccatcatcaaagaccaaaagtagataaaaccacaaagatggggaaaaaacagaacagaaaaactggaaactctaaaactcagagcgcctctcctcctccaaaggaacgcagttcctcaccagcaacagaacaaagctggatggagaatgattttgacgagctgagagaagaaggcttcagacgatcaaattactctgagctacgggaggacattcaaaccaaaggcaaagaagttgaaaactttgaaaaaaatttagaagaatgtataactagaataaccaatacagagaagtgcttaaaggagctgatggagctgaaaaccaaggctcgagaactacgtgaagaatgcagaagcctcaggagccgatgcgatcaactggaagaaagggtatcagcaatggaagatgaaatgaatgaaatgaagcgagaagggaagtttagagaaaaaagaataaaaagaaatgagcaaagcctccaagaaatatgggactatgtgaaaagaccaaatctacgtctgattggtgtacctgaaagtgatgtggagaatggaaccaagttggaaaacactctgcaggatattatccaggagaacttccccaatctagcaaggcaggccaacgttcagattcaggaaatacagagaacgccacaaagatactcctcgagaagagcaactccaagacacataattgtcagattcaccaaagttgaaatgaaggaaaaaatgttaagggcagccagagagaaaggtcgggttaccctcaaaggaaagcccatcagactaacagcggatctctcggcagaaaccctacaagccagaagagagtgggggccaatattcaacattcttaaagaaaagaattttcaacccagaatttcatatccagccaaactaagcttcataagtgaaggagaaataaaatactttatagacaagcaaatgttgagagattttgtcaccaccaggcctgccctaaaagagctcctgaaggaagcgctaaacatggaaaggaacaaccggtaccagccgctgcaaaatcatgccaaaatgtaaagaccatcgagactaggaagaaactgcatcaactaatgagcaaaatcaccagctaacatcataatgacaggatcaaattcacacataacaatattaactttaaatataaatggactaaattctgcaattaaaagacacagactggcaagttggataaagagtcaagacccatcagtgtgctgtattcaggaaacccatctcacgtgcagagacacacataggctcaaaataaaaggatggaggaagatctaccaagccaatggaaaacaaaaaaaggcaggggttgcaatcctagtctctgataaaacagactttaaaccaacaaagatcaaaagagacaaagaaggccattacataatggtaaagggatcaattcaacaagaggagctaactatcctaaatatttatgcacccaatacaggagcacccagattcataaagcaagtcctcagtgacctacaaagagacttagactcccacacattaataatgggagactttaacaccccactgtcaacattagacagatcaacgagacagaaagtcaacaaggatacccaggaattgaactcagctctgcaccaagcagacctaatagacatctacagaactctccaccccaaatcaacagaatatacatttttttcagcaccacaccacacctattccaaaattgaccacatagttggaagtaaagctctcctcagcaaatgtaaaagaacagaaattataacaaactatctctcagaccacagtgcaatcaaactagaactcaggtttaagaatctcactcaaagccgctcaactacatggaaactgaacaacctgctcctgaatgactactgggtacataacgaaatgaaggcagaaataaagatgttctttgaaaccaacgagaacaaagacaccacataccagaatctctgggacgcattcaaagcagtgtgtagagggaaatttatagcactaaatgcctacaagagaaagcaggaaagatccaaaattgacaccctaacatcacaattaaaagaactagaaaagcaagagcaaacacattcaaaagctagcagaaggcaagaaataactaaaatcagagcagaactgaaggaaatagagacacaaaaaacccttcaaaaaatcaatgaatccaggagctggttttttgaaaggatcaacaaaattgatagaccgctagcaagactaataaagaaaaaaagagagaagaatcaaatagacacaataaaaaatgataaaggggatatcaccaccgatcccacggaaatacaaactaccatcagagaatactacaaacacctctacgcaaataaactagaaaatctagaagaaatggatacattcctcgacacatacactctcccaagactaaaccaggaagaagttgaatctctgaatagaccaataacaggctctgaaattgtggcaataatcaatagtttaccaaccaaaaagagtccaggaccagatggattcacagccgaattctaccagaggtacaaggaggaactggtaccattccttctgaaactattccaatcaatagaaaaagagggaatcctccctaactcattttatgaggccagaatcattctgataccaaagccgggcagagacacaaccaaaaaagagaattttagaccaatatccttgatgaacattgatgcaaaaatcctcaataaaatactggcaaaccgaatccagcagcacatcaaaaagcttatccaccatgatcaagtgggcttcatccctgggatgcaaggctggttcaatatacgcaaatcaataaatgtaatccagcatataaacagagccaaagacaaaaaccacatgattatctcaatagatgcagaaaaagcctttgacaaaattcaacaacccttcatgctaaaaactctcaataaattaggtattgatgggacgtatttcaaaataataagagctatctatgacaaacccacagccaatatcatactgaatgggcaaaaactggaagcattccctttgaaaaccggcacaagacagggatgccctctctcaccgctcctattcaacatagtgttggaagttctggccagggcaatcaggcaggagaaggaaataaagggtattcaattaggaaaagaggaagtcaaattgtccctgtttgcagacgacatgattgtttatctagaaaaccccatcgtctcagcccaaaatctccttaagctgataagcaacttcagcaaagtctcaggatacaaaatcaatgtacaaaaatcacaagcattcttatacaccaacaacagacaaacagagagccaaatcatgggtgaactcccacaattgcttcaaagagaataaaatacctaggaatccaacttacaagggatgtgaaggacctcttcaaggagaactacaaaccactgctcaaggaaataaaagaggatacaaacaaatggaagaacattccatgctcatgggtaggaagaatcaatatcgtgaaaatggccatactgcccaaggtaatttacagattcaatgccatccccatcaagctaccaatgactttcttcacagaattggaaaaaactactttaaagttcatatggaaccaaaaaagagcccgcattgccaagtcaatcctaagccaaaagaacaaagctggaggcatcacactacctgacttcaaactattctacaaggctacagtaaccaaaacagcatggtactggtaccaaaacagagatatagatcaatggaacagaacagagccctcagaaataatgccgcatgtctacaactatctgatctttgacaaacctgagaaaaacaagcaatggggaaaggattccctatttaataaatggtgctgggaaaactggctagccatatgtagaaagctgaaactggatcccttccttacaccttatacaaaaatcaattcaagatggattaaagatttaaacgttaaacctaaaaccataaaaaccctagaagaaaacctaggcattaccattcaggacataggcgtgggcaaggacttcatgtccaaaacaccaaaagcaatggcaacaaaagacaaaattgacaaatgggatctaattaaactaaagagcttctgcacagcaaaagaaactaccatcagagtgaacaggcaacctacaacatgggagaaaatttttgcaacctactcatctgacaaagggctaatatccagaatctacaatgaactcaaacaaatttacaagaaaaaaacaaacaaccccatcaaaaagtgggcgaaggacatgaacagacacttctcaaaagaagacatttatgcagccaaaaaacacatgaagaaatgctcatcatcactggccatcagagaaatgcaaatcaaaaccactatgagatatcatctcacaccatttagaatggcaatcattaaaaagtcaggaaacaacaggtgctggagaggatgcggagaaataggaacacttttacactgttggtgggactgtaaactagttcaaccattgtggaagtcagtgtggcgattcctcagggatctagaactagaaataccatttgacccagccatcccattactgggtatatacccaaatgagtataaatcatgctgctataaagacacatgcacacgtatgtttattgcggcactattcacaatagcaaagacttggaaccaacccaaatgtccaacaatgatagactggattaagaaaatgtggcacatatacaccatggaatactatgcagccataaaaaatgatgagttcatatcctttgtagggacatggatgaaattggaaaccatcattctcagtaaactatcgcaagaacaaaaaaccaaacaccgcatattctcactcataggtgggaattgaacaatgagatcacatggacacaggaaggggaatatcacactctggggactgtggtggggtcgggggaggggggagggatagcattgggagatatacctaatgctagatgacacattagtgggtgcagcgcaccagcatggcacatgtatacatatgtaactaacctgcacaatgtgcacatgtaccctaaaacttagagtataataaaaaaaaaaaa

SEQ ID NO: 776 - DNA, 5380 bp, Homo sapiens
  source 1..5380: mol_type = other DNA
taaaaaatcaaaaaaagaaaagcttaagcttcaaacattcttaggaagtgtggggaaaaatatatgtatacattctaactttctaatgcagcacagaatagatacataagcaaaatagttgttttcataataaagaagattgaatgccaaaaaaaaaaaaagaacatacacaccaaaatcccatccgaaggtcaccgacatcaaagactaaatgtagataaatccaaaggtgaggaaaaaccagcacaaaaaggctgaaaattccaaaaaccagaatgcctcttctcctccaaaggatcacaactccttgccatcaagggaacaaaactggacagagaatgagtttaacaaattgacagaagtaggcttcagaagatgagtaataacaaactcctctgagttaaaggaggatgttctagcccaatgcaacaaagctagaaccttgaaaaaaggttagacaaattgctagctagaataaccagtttacagaagaatataaatgacttgatggagctgaaaaacagcacgagaacttcgtgaagcatacacaagtatcaatagctgaattgatcaagtggaagaaaggatatgagatattgaagatcaacttaatgatataaagcatgaagccaagattagagaaaaaagaatgaaaaggaatgaacaaagcctccaagaaatatgggactatgtgaaaagaccaaatctacatttgataggtgtacctgaaagtgatggggagaatggaactaagttggagaatactcttcaggatattatccaggagaacttccccaacctagcaaggcaggccaacgttcaaattcaggaaatacagagaacaccacaaagatactcctcgagaagagcaaccccaaggcacataatcttcagattcaccaagattgaaatcaaggaaaaaatgttaagggcaaccagagagaaaggtcaggttacccacaaatggaagcccatcaaactaacagtggatctctctgcagaaaccctacaagccagaagaagagtgggggccaatgttcaacattcttaatgaagagaattttcaacccagaatttcatatctagccaaactaagcttcataagtgaaagagaaataaaatccttacagacacgtaaatgctgagagattttgtcaacactaggcctgccttacatgagctcctgaaggaagcactaaatatggaaaggaacaatgggtaccagccgctgcaaaaacatacaaaattgtaaagaccattgacactatgaagaaactgttatcaactaatgggcaaaataaccagctagcatcgtaatgacaggatcaaattcctatgcaactatattaaccttaaatgtaaatgggctaaatgccccaattaaaaaacacagactggcaaattggatacagagtcaagacccatctgtgtgctgtatttaggagacccatctcacatgcaaagacacacataagctcaaaataaagggatggagtaatatttcccaagcaaatggaaagcaaaaagaagcaggggttgcaatcctagtctctggtaaaacagacttcaaaaaaacaaataccaaaaaagacaaagaagggcattacataatggtaaagagatcaacaccacaagaagagctagctatcttaaatatatatgcaccccatagaggagcatccagattcataaagcaagttcttaaagaccttcaaagaaacttagactcccacacaataatagtgggagagtttaacaccccattgtcaatattagacagatcaatgggacagaaaatttaaaaagatattcaggacttaaactcagctctagaccaagcagacctaatagacatctacagaaccctccaccccaaatcaacagaatatacattcttctcagcattacattgcacttattctaaaattgacctcataattggaagtaaaacactcctcagcaaatgcaaaaaaaaaaaaaaaaaaaaaaaaaaaaaaaaacaaatcaaagcaaagtctcttagaccacagtgcaatcaaattagcactcaggattaaaaaactcactcaaaatcacacaactacagggaaactgaacaacctgctcctgaatgactactgggtacataacaaaatgaaggcagaaataaagatgttctttgaaaccaatgagaacaaagacacaacgtaccagaatctctgggacacagctaaagcagtgtttagaggaaaatttacagcactaaatgcctgcaggagaaagtgggaatgatctaaaatcgacaccctaatatcacaattaaaagaactagagaagcaagagcaaacaagttcaaaagctagcagaagacaagaaataattaagatcagagcagagctgaaggagatagagacatgaaaaacccttcaaaaaatcagtgaatccaggagctggttttttaagaagattaacaacatagaccactagccagactaataaagaagaaaagagaagaatcaaatagacacaagaaaaaatgataaaggggatatcaccactgatcccacagaaatataaactaccatcagagaatactataaacacctctaggcaaataaactagaaaatctagaagaaatagataaattcctagacacatacgccctcccaagactaaaccaggaagaagttgaatccctgaatagaccaataacaatttcttaaattgaggcagtaattaatagcctactaaccaaacacacacacacacacacccaggaccagacagattcacagctgaattctaccagaggtacaaagaggagctggtgccattgcttctgaaactattccaaacaatacaaaaagagggactcatccctaactcattttatgaagccagcatcattctgataacaaaacctggcagagacacaccaaaaaaagaaaatttcaggccaatatccttgataaacatcgatgcgaaaatcctcaataaaatactggcaaactgaatccagcagcacctcaaaaaacttatccaccacaatcaagtcagcttcatccctggaatgcaaagctgtttcaacatacacaaatcaataaacataatccatcacataagcagaaccaatgacaaaaccacatgattatctcaatagatgcagaaaaggcctttaacaaaattcaacaccccttcatgctaaaaactctcaataaactaggtgttgatggaatgtatctcaaaataataagagctatttatgacaaacccacagccaatatcatactgaatgggcaaaaactggaagcattccttttgaaaactggcacaagacaaggatgccctctctcaccactcctattcaacatagtattggaagttctgcccagggcaattaggcaagagaaagaaatacagtgtatccaaataggaagaaaagaagtcaaattgtctctgttcacagataacatgattgtatatttagaaaaccccatcgtctcagcccaaagtcttcttaagccgataagcaacttcagcaaagtctcaggatataaaatcaatgtttgaaaatcgcaagcattcctatgcaccaataatagacaaacagagaaccaaaccatgagtgaactcccattcacgattgctagaaagagaataaaatacctaggaatacaacttacaagtgatgtgaaggacctcttcaatgagaactacaaaccactgctcaaggaaataagagaggatacaaacaaatggaaaagcatttcatggtcatggataggaagtatcaatatcacgaaaatggccatactgcccaaagttatttatagattcaatgctatccccatcaagctaccactgactttctttgcagaattagaaaaaaattaagtttcttatggaaccaaaaaaagcctatacagccaagacaatcctaagcaaaaagaacaaaaatggaggcatcatgctacctgactttgagctatactacaaggctacagtaaccaaaatagcatggtactggtacccaaacagatatatagaccaatggaacagaacagaggcctcagaaataacaccacacatctacaaccatctgatctttgacaagcctgacaaaaataagcaatagggaaaggattacctatttaataaatggtgttgggaaaactggctagccatatgcacaaaactgaaactagacctgctccttacatcttctacaaaaattaactcaagatggattaaagacttaaaggtaagacttaaaaccataaaaaccctagaagaaaacctaggcaataccactgaagacataggcatgggcaaagacttcatgactaaaacaccaaaagcaacggcaacaaaagccaaaattgacaaatgggatctaattaaactaaagagcttctgcacagcaaaagaaactatcatcagagtcaacaggcaacctataaaatgggagaaaatttttgcaatctatccatctgacaaagggctaatatccagaatctacaagaaacttaaataaatttacaagaaaaaaaaaacaaccccatcaaaaaatgagcaaaggacattaatagacacttctccaaagaagacatttatgcagccaacaaatatatgaaaaaatgctcatcatcactggtcattaaagaaatgcaaaccaaaaccacaatgagataccatctcacgccagttagaatggcgatcattaaaaagtcaggaaacaacaggtgctggagaggatgtggagaaataggaccacttttacactgttggtgggagtgtaaattagttcaaccattgttgaagacagtgtggcgattcctcaaggatctagatccagaaataccatttgacccagcaatcccattcctgggtatatacccaaaggattataaatcattctactataaagacacatacacacatatgtttattgcagcactgtttacaatagcaacgacttggcaccaagccaaatgcccatcattgatagactggataaagaaaatgtggcacatacacaccatagaatactaagcagccttaaaaaaggttgagttcatgtcctttgcagggacatggatgaagctggaaaccatcattctcagcaaactaacacaggaacagaaaaccaaacaccacatgttctcactcatgagtgggagttgaacaatgagaacacatggacacagggaggggaacatcatactagggggcctatccaggggaagggggattggggagggatagcattaggagaaatacctaatgtagatgatgagttgatgggtgcagcaaaccaccatggcatgtgtatacatatataacaaacctgcatgttctgcacatgtatcccagaacttaaagtataataaaacaaacaaa

SEQ ID NO: 777 - DNA, 6069 bp, Homo sapiens
  source 1..6069: mol_type = other DNA
tccgttccaagatgaccgaataagaacagctccggtgtgcagctcccagtgtgatcgacacagaagacaggtgatgtctgcatttccaatggaagcacctggttcatctcactgggactggttggacagtgggtgcagcccatggagggtgagccaaagcaggttggggtgtcacctcacctgggaggtgcaaggggtcgggggattcccctttcatagccaagggaagtggtgacagactgttcctggaaaaactggacactcccgcccaaatactgcacttttcccatgatcttagcaactggcagaccaggagatgccctcctgtgcctggcttggtgggtaccgcccccatggaaccttgctcactgtcagtgcagcagtctgagatcgacctgcaaggcagcagcctgctggcgggaggggagtctgcaattgctgaggcttgactaggtaaacaaagctgccaggaagttcaaactgggtggagcccaccacagctcagtaatgcctactgcctctgtagactccacatctgtgggcagggcatagctgaacaaaaggcagcagaagcttctgcagacttcaacgtccctgtctgacagttctgaagagagcagtggttctcccagcagggcatttgagctctgagaatggacagagtgcctcctcaagtgggtccctgacccccgtgtagcctaactgggagacatctcccagtaggggccaacagatacctcatgcagacaggtgcccctctgggaagaagcttccagaggaaggatcaggcagaaatatttgctgttctgtaatatttgctgttctgcaccctctgctggtgatacccaggcaaacagggtctggagtggagctccagcaaactccagcagggacaagcagttccctgcagctgagggacctgactgttagaaggaaaactaacaaacagaaagtaatagcatcaacatcaataaaaaggacatccacaccaaaaccccatctgtaggtcaccaacatcgaagaccaaaggtagataaaaccacaaagatggggagaaagcagagcagaaaaactgaaaattccaaaaacagagcacatcttctcctccaaaggatcacagctcctcaccagcaatggaacaaagctggacagagaatgactttgacaagttgacagaagtaggcttcagaaggttggtaataacaaatttctccaagctaaaggagcatgttctaacccattgcaaggaagctaaaaaccttgaaaaaaggttaggtgaatggctaactagaataaacagtgtagagaagaccttaaatgacctgatggagctgaaaaccatggcacaagaacttcgtgacacatgcacaaacttcaatagctgattcgatcaagtggaagaaaggatatcagtgactgaaaatcaaattaatgacataaagcaagatgacaagattggagaaaaaagagtaaaaggaaacaaacaaatcctccaagaaatatggggccatgtgaaaagaccaaatctatgtttgattgttgtacctgaaagtgacggggagaaaggaaccaagttggaaaacacttttgaggatattatccaggagaacttctccaactagcaaggcagaccaacattcaaattcaggaaatacagagaacaccacaaagatactccttgagatgagcagtcccaagacacataatcatcagattcaccaagatgaaatcaaggaataaatgttaagggcagccagagagaaaggtcgggttacccacaaatggtagcccatcagactaacagtggaactcttggcagaaactttataagccagaagagagtggaggccaatattcaacattcttaaccaaaagaattttcaacccagaatttcatctccagccaaactaagcttcataagtgaaggagaaataaaatcctttaccgacaagcgaatgctgacagattttgtcaccaccaggcctgccttacaagagctcctgaaggaagcagtaaacatggaaaggaacaaccggtaccagccactgcaaaaacatgccaaattatagagaccatcaattctatgaagaaattgcatgaaataatgggcaaaataaccagctaacgtcataatgacaagatcaaattcacacataacaatattaaccttaaatgtaaatgggctaaatgccacaagtacaagacacagactggcaaatttgataaagagtcaagacccatcagtgtgttgtattcaggagactcatctcacatgcagagacacacacaggctcaaaataaagggatggaggaagatctaccaagcaaatggaaagcaaaaaaaaagcaggggttgcaaacctagtctctgataaaccagactttaaaccaacaaagatcaatagagacaatgaaggccattacataatggtaaagggatcaattcaacaagaagagctaactatcctaaatatatatgcacccaatacaggagcacccagattcataaagcaagtccttagagacctacaaagagacttagactcccacacaataataatgggaaactttaacaccctactgtcaatattagaaaaatcaacgagacagaaggttaacaaggatatacaggacttgaactcaactctgcaccaagtggacctaatagacatctacagaactctccatgccaaaatcaacagaatatacattctgtaaaagaacagaaaccacaacaaactgtgtctcagaccacagtgcaatcaaattagaattcaggattaagaaactcattcaaaactgctcaactacatggaaactgagcaacctgcccctgaatgactactgggtacataaaaaaatgaaggcaggaaaaaagatgttctttgaaaccaatgagaaaaaagacaaaatgtaccagaatctctgggacacatttaaagcagtgtgtagagggaaacttatagcactaaatgcccacaagagaaagcaggaaagatctaaaatcgacaccctaacattacaattaaaagaactagagacgcaagagcaaacaaattcaaaagctagcagaaggcaagacataactaagatcagagcagaactgaaagagatagagacacaaaaaacccttcaaaaaatcaatgaatccaggagctgtttttcgaaaagatcaacagaatcgatagactgctggcaagactaataagaaaagaaagaagaatcaaatagacacaataaaaaataataaaagggataacaccaccgatcccacaaaaatacaaactaccatcagagaatactataaacacctctatgcaaataaactagaaaatctagaagaaatggataaattcctggacacatacaccctcccaagggtaaaccaggaagaagctgaatctctgaatagaccaataacagcctctgaaattgaggcaataattaatagcctaccaatgaaaaaaaggccaggaccagatgaattctaccagaggtacaaagaggagctggtaccattccttctgaaactattccaataggaaagagggaatcctccctaattcattttatgaggccggcatcatcctgataccaaaacctggtagagacacaacaaaaaaacagaattttagaccaatatccctgatgaacatcgatgcaaaaatcctcaataaaatactgtcaaaccgaatccagcagcacgtcaaaaagcttatccaccacgatcaacttggcttcatccctgggatacaaggctggttcaacatacacaaatcaataaacgtaattcatcatataaacagaaccagcgaagaaaaccacatgattatctcaatagatgccaaaaaggcttttgacaaaattcaacagcccttcatactaaaaactctcaataaactaggtattgattgaacatatctcaaaataataagagctatttataacaaacacgcagccaatatcatactgaatgggcaaaatttggaagcattccctttgaaaagtgctataagacaaggatgccctctcttaccactcctattcaacatagtgttggaagttctggccagggtaatcaggcaagagaaagaaataaaaggtattcagttaggaaatgaggaagtcaaattgtccctgtttgcagatgacatgattgtatacttagaaaaccccattgtctcagcccaaaatctccttaagctgataagcaacttcagcaaagtctcaggatacaaaatcaatgtgcaaaaatcacaagcattcctatacaccaataacagacaaacagagagtgaaatcatgagtgaactcccattcacaattgcttcaaagagaataaaatacctaggaatccaacttataagggatgtgaaggacctcatcaaggacaactacaaaccactgttcaatgaaataaaagaggacacaaacaaatggaagaacattccatgctcatgggtaggaagaatcaatatcgtgaaaatggccatactgcctaaggtaatttatagattcaatgccacccccatcaagctaccaatgactttcttcacagaattggaaaaaattactttaaagttcatatggaaccaaaaaaacctgcattgccaagacaatcctaagccaaaagaacaaagctggaggcatcacgctacctgacttcaaactatactacaaggctatagcaaccaaaacagcatggtactggtaccaaaacagagatgtagaccagtggaacagaacagagacctcagaaataataatacacatctacaaccatctgatctttgacaaacctgacaaaaacaagaaatggggaaatgatttcctacttaacaaatggtgctgggaaaactggctagccatatgtagagagctgaaactggatccctttcttacaccttatacagaaattaattcaagatggattaaagactttaatgttgaacctaaaaccataaaaaccctagaagaaaacctaggcaataccattcaggacataggcatgggcaaaaacttcatgactaaaacaccaaaagcaatggcaacaaaagccaaaatagacaaatgggatctaattaacctaaagagcttctgcacaacaaaagaaactaccatcagagtgaacaggccacctatagaatggcagaaaatttttgcatagtacccatccaacaaagggctaatatccagaatctacaaagaacttaaacaaatttacaagaaaaaaacaaacaacctcatcaaaaagtgggcaaaggatatgaacagacacttctcaaaagaagacatttatgaagccaaaaaacgtgaaaaaatgctcatcatcagagaaatgcaaatcaaaaccacaatggaataccatctcacaccggttagaatgaagatcattaaaaagtcaggaaacaacagatgctggaggggatgtggagaaataggaacgcttttgcactgttggtgggagtgttaattagttcaatcattgtggaaggcagtatggtgattcctcaaggatctagaactagaaataccatttgacccagcgatcctattactgggtataaacccaaaggagtataaatcatgctgccataaagacacatgcacacgtatgtttattgcagcactactcacaatagcaaagacttggaaccaacccaaatgtccatcagtgatagactggattaagaaattgtggcatatataccccatggaatactatgcagccaaaaaaaggatgagttcgtgtcctttgtagggacatggatgaagttggaaaccatcattctcagcaaactgtcacaaggacagaaaacaaacactgcatgttctcactcataggtgggaattgaacattgagaacacgtgggcacagggaggggaacatcacacactggggcctgtcagggggagggggactaggggagagagatagcattaggagaaatacctaatgtaaatgatgagttgatgggtgcagcaaaccagcatggcacatagataactacgtaacaaacctgcacgttctgcacatgtaccctggaacttaaagtataataaaaaaa

SEQ ID NO: 778 - DNA, 1591 bp, Homo sapiens
  source 1..1591: mol_type = other DNA
ccctctccctctccctctccccacggtctccctctgcctctctttccatggtcacggtctccctctgatgccgagccgaagctggactgtactgctgccatctcggctcactgcaacctccctgcctgattctcctgcctcagcctgccgagtgcctgcgattgcaggcgcgcgccgccacgcctgactggttttcgtatttttttggtggagacggggtttcactgtgttggccgggctggtctccagctcctaaccgcgagtgatccgccagcctcggcctccggaggtgccgggattgcagacggagtctcgttcactcggtgctcaatgttgcccaggctggagtgcagtgtcgtgatctcggctagctacaacctccacctcccagccgcccgccttggcctcccaaagtgccgagattacagcctctgcccggccgccaccccctctgggaagtgcggagtgtctctgcctggccgcccattgtctgggatgtgaggagcccctctgcccggctgcccagtctgggaagtgaggagcgcctcttcctggccgccatcccatctaggaagtgaggagtgtctctgcccggctgcccatcatctgagatgtggggagcacctcagccccgccgccccgtctgggatgtgaggagcgcctctgcccggccgcgacccagtctgggaggtgaggagcgtctctgcccagccgccccgtctgagaagtgaggagcccctccgcctggcagccgccccgtctgagaagtgaggagcccctccgcccggcagccgccccgtccgggagggaggtggggggtcagccccctcccggccagccgcgccgtccgggagggaggtggggggtcagcccccgcccggccagccgcgccttccgggagggaggtgggggatcagtccccgcccggccagccgccccgcccgggagcgaggtggggggcgcctccgcccggccgctgtcccgtccgggaggtggggggtcgcctctgcccggccgccccgtctgggaggtgaggagcccctctgcccggccaccaccccgtctgggaggtgtacccaacagctcattgagaacgggccatgatgacgatggcggttttgtggaatagaaaagggggaaaggtggggaaaagatagagaaatcagattgttgccgtgtctgtgtagaaagaagtagacatgggagacttcattttgttctgtactaagaaaaattcttctgccttgggatgctgttaatctaagaccttacccccaaccccgtgctctctgaaatatgtgctgtgtccactcagggttaaatggattaagggcggtgcaagatgtgctttgttaaacagatgcttgaaggcagcatgctccttaagagtcatcaccactccctaatctcaagtacccagggacacaaacactgcggaaggccgcagggtcgtctgcctaggaaaaccagagacctttgttcacttgtttatctgctgaccttccctccactattgtcctatgaccctgccaaatccccctctgcgagaaacacccaagaatgatcaataaaaaattaaaaaaaaaaaaaa

SEQ ID NO: 779 - DNA, 6549 bp, Homo sapiens
  source 1..6549: mol_type = other DNA
agcttaggtaccagcttggcctcagtggggagcagcaccaagcaggctcttgtggtccccgattccaggccttggctcttgggtggcatttctggacctgccctgggctggaagagagcccactgccctgaagggtgagttccaggcctggcagcactcaccacaagctgactgaaaggtccttcagccttaagtgaatgttggcggtagccaggcattacctcccacgggcctgtggtagtggtggaaatgaggagagaccactctgcctggggaaaggggaaggaagggtgggaaggactttgtctggtggtttcagcaccagctcagctgcagtagagtagagcatcaggtagatttctaaggtgtctgactccaggccctggctcctggacagcagcatctctggacctgactatgacctgggggatcttgccaccctgaagggaaggtcaccagcctggtttgctttgccacctgctgactgttgagccctacaccttgagcaaacttaggtggtggccaggcagtagttacaatgagctttgggtaagacccagtgctgtgctagcttcaggtctgacccaacacattcccagtagtggtggccacagagatgcttatatcaccccacccccagctccaggtagcttagcacagagaaagagagagagagagactccatatgggagagagtaagggaagagaacaagagcttctgcctgctaatcctgagaattctggattttatccaagaccaccaaggtagtacctctaagagtctgcaatagcttcagcattactgggcatggggtgcctcctagtgcagatacagccgccgcgaccagaaacttagatcacaacaccaaagtccctttgaatacctggaaagcctttccaacaaggatgggtacaaacaagcccagactgcaaaaactataataaataccaaactcttcaatgcccagacaccgacaaacatccacaagcatcaaaaccatgcaggaaaacatgacctcaccaaacaaactaaataaggcactagggggccaatcctggagagacagagatatgtggcctttcagacagagaattcaaaatagctgtgctgaggaaagtcaacgaaattcgaggtaacacagagaaggaattagtaatcttatcagataaagttaacaaataaatcaaaataattaaaaagcagaaattctggagctgaaaaatgcaactgacatgctgaagaatgtatcagtctcttaatagcagaactgatcaagcagaagaaagaattagtgagcttaaattaaagacaggctgcttgaaaatacacagaggaggtgaaaaaagaataaaaaagaatgaagcatactttcaagatctagaagtagcctttaaagggaaaaatctaagagttattggccttaaagaggaggtagagacagcagtaggaagtttattcaaaagtacaacagaacttctcaaagttagagaaaatatcaatattcaagcacaagaaggttatagaacatcaagcagatttaacccaaagactaactcaagtcatttaatatcaaactcccaaagatcaaggataaagaaaggatcctaaaggcagcaagagaaaagaaacaaataacatacaatggagatctaatagatctggcagcagacttttcagtggaaaccttacaggccaggaaagcatgccatgacatatttaaagtgaaggaaaaaaccttttacctgagagtagtgtatccagagaaaatgtgcttcaaacctaaaggagaagacttcccagtgaaacaaaagctgtgaaatttcattcacaccagacctatcctataagaaatgctaaagggagttcttcaatctgaaagaaaaggaccttaatgaggaagaaataatcggaaggtacaaaactcactggtaatagtgagtacacagagaaacacaatattatagcagtgtcattatggtatataaactacttatatgataagtagaaagacaaaaagatgaaccaataaaaaataactacaacaacttttcaagagacagtacaataagatataaatagaaacaagaaaaaggtaaaaagtcgggagatgaagttaaagtttagaatttttactagctttcttttggctcatttgtttatgcaatcagtgttgtcatcagtttaaaataatgggttataagatattatttgcaagcctcatggcaacctcaggtttaaaaccatacaattgatgtacaaaaaataaaaagcaataaattaaaacacaccaccagagaaaatcgccttcaatgaaagaaaaagaggaaggaagagaagaccacaaaacaatgagaaaacaaataacgaaatggcaggggcaagtccttaacaataataactctgaaggtaaatgggctgaactctccaatcaaaagacaaagagtagctgaataataaaacaaaacactaagaatctgttacctacaagaaacacactttacttataaaggcaaatatagactgaaaacaaagggatggaaaattatattccatgccgatggaaaccataaaagagcaggaatagccatacttgtatcagacacaatagattacaagacaaaaactataaaaagagacaaagaaggtcattatataatgataaaggggttcattcagcaagagtatataacaattgtaaatatatatacacccaatactggagcacccggatacataaagcaaatattatcagagcaaaagagagagacagatcccaatacaataatagcctgagacttcaacaccacaccttcagcagtggacaggtcatctagacagaaaatcaacaaagaaacactgaacttaatctgcactatagatcaaaaggacctaacagatacttacagaacatttcatccaacatctacagaatacacatccttctcctcagcacatggctcattcctcaaggatagaccacaaaacaaggataggccacaaaacaagccttaaaacattttttaaaaattgaaacaacataatgtatcttctctgaccacaatggaaaaaaaactagaaatcagtagcaaaaggaattttggaaactctacaaacatagaaattcaagaatatgctcctgaatgaccggtgggttaataaagaaattaagaaggaaattgaaaatgttcttgaaacaaatgataatgaaaacacaacacatcaaaacctatgggatacagcgaaagcagtattaagagggaagtctgtagctgtaagtgcccacatcaaaaaagaagaaaaacctcaaattaacaactcaatgatgcatcttaaaaaactagaaaagggcaaacaaaacccaaagttagtaagagaaatgaaataataaagatcagagcagaaataaatgaaattgcaatgaagaaaacagtataaaagatcaactggttttctgaaaagataaaattaacaaacctttagccagactaagaaaaaaagacagaaggcccaaataaataaaatcagagataataaaaggagacattataaccaatattgcagaaattaaaggatcatcagagactaccatgagcaactgtatgccgataaattggaaaacctagaaatggataaatccctagatacataaaacctaccaagattgaactatatagaaatccaaaacctgaacagaacaatcacaggtaatgagatcaaatctctaatgaaaagtctctcagcaaagaaaagcccaggacctgatggcttcactgctgaattttatcaaacatttaaagaagaactaatatcaatcctactctaacgattccaggaaatagaggaggaaggaatacttccaaacccattgtatgagaccaatatcactttaataccaaaaccatacaaagacccatcaaaaaaaactacgggctaaaatctctgattaatgttaatgtaaaaatcctcaacaaaatactagcaaactgaattcaataacacattaaaaagattattcatcatgaccaaataggatttatctcagggacgcaaagatggttcaacatagcaaatcaatgtcatatcaacacaagaggaaaaatcatatgatcatctcatctccatagatgcaggaaaatcatttggtaaaattcaacataccttcatgataaaaaccttcaaataaactgggtatagaaggaacattaatcaacataaagaagctatatacagcaaatgcacaagtagtatcatagtatcatactgagtgaggaaacactgaaagcctttcttctaagatctgggacatgacaaggatgctcactttttaccacattattcaacatagtactggaaatcctaactagagcaatcagacaagagaaagaaataaagggcatccaaatttgaaaggaagaggccaaattatcattgttcacagatgatatgatcttatatttagaaaaacctaaagtctccacaaaaaaaaaaaaactattagaactgataaattcagtaatgttgtaggatacaaaatcatacaaaaatcattaatgtttctatatgccaacagagaataacctgagaaagaaaatttaaaaagtaattccatttacagtagccacatataaaattaaatacctagaaattaaccaaagaaatgaaagatctctagaatgaaagctatacaaaactggagaaagaaattgaagaagatacaaaaaatggaaagctattccatgttcaagcattggaagaatcaatattgttaaaatgtccatactattcaaagcaatctacagattcaatgcaatccccatcaaactactaatgatattcctcacagaaatagaaaaaatgatccttatgtattcgaaaacacaaaagacctagaatagccaaagctaccctgagcaagaagaacataactgaaggaatcacaatacctgacttcaaattatactacagaagtatagtaaccaaaacatcatggtactgccataaaaacagacacacagaccagtggaacagaatggagaacccagaaagaaatccatacatctacagtaaactcattttttacagcagtcccaaaaacatacactggggaaagggcaatctcttcaaaaaatggtgctgggaaaactgaatatccatatgcagaagaatgaatctacacccctatctcttgccatatacaaaactcaaatccaaatggattaaagccttaaatctaagacctcaaactctgaaattactacaagaaaactttggggaaactctccaggactttggtttggacaaagatttcttgagtaaatacctgggaagcacaggcaaccaaagcaaaaatgaacaaatgggatgacatcaagtgtaaaagcttctgcaaagcaaaggaaacaatcagcaaagtgaagaaacaacccaaagaataagcgaaaatatttgcaaactaccaatctgacaaggaattaataaccagaatatataaggagctcaaacaactctgtaggaaaagaaaatctaaaaatctactttaaaaatgggcaaaagatctgaatagccatttctcgaaagaaaacatacaagtggcaaacaggtacatgaaaaggtgctcaacatcactgatcatcagagaaatgcaaatcaaaactacagtgaaatagcatctcactccagttaaaatggctattactcaaaaggcaggcaataacaaatggctgttatccaaaagacaggaaaagatgtggagaaaagggaactctcatacacttttggtgaaaatgtaaattagtacaaccactatgtaaaagagtttggaggttcctcaaaaaactaaaaatagagttaccacatgatccagcaatcctactcttagatatataccccaaagaaaggaaataaatatttagaagaggtatgtgcactcccatgtttattgcagcacttctcacaatagcctagatttggaagcaacctaagtgtccatcaacaggtgaatggataaagaaaatgtggtacatagacacaacgcagtgctattcagccataaaaacgaatgagatcctttcataaaaaaagaatgagatcctatccataacatggatggaactggaggtcattacattaattgaaataagccaggtacagaaagacaaactttgcaggttcttatttgtgggagctaaaaattaaaagagttgaactcatggagatcaagaatacaatgatggttaccagaggctgggaaggatagtgagggggtggaggggaagtgaggatggttaatgtgcacaaacaaaatagaatggataagatgcagtgtttggtaacacagaagggtgactatagtcaacaaaattttactgtacatttaaaaataactgagagagtataactggattgtttgtaacacaaaggatcaatgcttcaggtgatggatactccatttaccctgatgtgattattacacattgtatgcctgtatcaaaatatcccatctaccccataaatatatacacctgctctgtacccacataaattaaaaa

SEQ ID NO: 780 - DNA, 1407 bp, Homo sapiens
  source 1..1407: mol_type = other DNA
gagaggtgacagcatgctggcagtcctcagagcccttgcttgctctcggcacctcccctgcctgggctcccgctttggtggcatttgaggagcccttcagtcccccactgcactgtgggagcccctttctgggctggccaaggccggagcccactccctcagcttgcagggaggtgtggagggagagacacgagcgggaaccggggctgtgtgctgcacttgcgggccatctggagttccgggtgggcgtgggcttggtgggccccgcactcagagcagccagccagccctgctggccccgggcaatgggggacttagcacctgggccagtggctgcggagggtgtactgagtcccccagcagtgctggcccaccggcgctgcgctcgatttctcgctgggccttggctgccttcccacggggcagggctcgggacctgcagcccgccatgcctgagcctcctacccaatccatgggctcctgtgcggcctgagcctccccgacgagcaccaccccctgctccacggcgcccagtcccatcgaccacgcaagggctgaggaatgcgagcgcccggcacaggactggcaggcagctccacctgcagccccagtgcaggatccactaggtgaagccagctgggctcctgagtctggtggggacgtggagagtctttatatctagctcagggattgtaaatacaccaatcagcaccctgtgtttagctcaaggtttgtgagtgcaccagtcaacactctgtatctagctgctctggtgagggcgtggagagtctttatgtctagctcaaggattgtaaatacaccaatcagcactctgtgtctagctcaaggattgtaaatacaccaatcggcactctgtatctagctcaaggtttgtaaacacaccaatcagcaccctgtgtttagctcaaggtttgtgagtgcaccagtcgacactctgtatctagctgccctgatggggacgtggagaacctttgtatctagctcagggattgtaaacgcaccaatcagcgccctgacgaaacaggccactcggctctaccaatcagcaggatgtaggtggggccagataagagaataaaagcgggctgcccgagccagcattggcaacccgctcgggtccccttccacactgtggaagctttgttctttcgctctttgcaataaatcttgctactgctcactctttgggtccacgctgcttttgtgagctgtaacactcaccatgaagatctgcagcttcactcctgagcccagcgagaccacgagcccaccgggaggaacgaacaactccagacacgccaccttaagagctgtaacactcaccgcgagggtccaccgcttcattcttgaagtcagtgagaccaagaacccaccaattccggacac

SEQ ID NO: 781 - DNA, 1893 bp, Homo sapiens
  source 1..1893: mol_type = other DNA
ccccatagtcttggcccaaaagctcctctagctgataaacaacttcagcaaagttgcaggatacaaaatcaatgtacaaaactcgctagcatttctatacaccaacaacagccaaaccgagagccaaatcagaaaggcaatcccattcataattgccacaaaaagtgtaaaatacctaggaatacagctaaccagggagatgaaagatttctactatgagaattacaaaacactgctccaagaaaccagagaagacacaaacaaatggaaaaacatcccatgctcatggataggacgaatcaaaatcattaaaatggctatattgcccaaaacaatttacagattcagtgatgttcctatcaaaccaccaacaacattctttacagaactattaatagaaaaaactattttaaaattcatatgcaatcaaaaaagagcccaaatagccaaggcaatcctaaccaaaaagaacgaagttggaggcatcacattacctgacttcaaactatactagaagacaacagtaaccaaaacagcatgatactggtacaaaaacaggcacagacaccaatgaaacagaacagagagcccagaaataaggccacgcatctacaaccatctgacctttgacaaagctgacaaaaataagcaatggggaaaagactccctattcaataaatggtgctaggataactggctaaccatatacagaagattggagctggaccccttccttatatcacacacaaaaatcaaccaagatagattcaagacttaaatgtcaaacctaaaactataaaaaccctggaagatgacttggcaataacatcctggacattgaaatgggcaaagatttcatgataaagacaccaaaagcaatcacagcaaaagcaaaaattgacaagtgaaatctaattaaacgtacaagtttctgcacagcaaaataaattatcaagagtaaatagacaacctacagaatgggagaaaatatttgcaaactatgcatctgacaaaggtctaatatcccacatccataaggaacttaaatttacaagagaaaaacaactccattaaaaagcgggcaaaggacatgaacagacacttctcaaaagaagacatacacaggcataagcttaatatcactgatcattagagaaatgcaaatcaaaaccacaattagataccatctcacaccagtcaaaatggatattgttaaaaagtcaaaaaaacaacagatgctggtgaggttgtggagaaaagggaacacttacacactgttggtgggaatgtaaattaattcgaccattgtgggaagcagtatggtaattcctcaaagagctacaaggaaaactaccattcaacacagcaatcccattaactgggtatatacccagaggaatagaaatcatcctaccataaagacacatgtacgtgaatgtccatcacagcactattcacaatagcaaagacatggaatcagcctaaatgcccatcaatgacaaattggaagaagaaaatgtggtacatacacaccattgaatactatgcaaccataaaaaagaacaagattatgtcttttgcaggaatgtggatgaggctagaggctattactcttagcaaactaatgcaggaacagaaaaccaaacaccacatgttctcacttctaagtgggagtaaataagaacttatgaacacaaagaaggaaacaacagacactggagtctgcttgatgggggaggtggggggagggagaggagcagaaaagataacttgggcactgggcttaatacctgggtgatgcagtaatatgtacaacaaacccctatgacatatgtttaccaatgtaacaaatcttcacatatacccccaaacctaaaagttaattaaaaaaaa

SEQ ID NO: 782 - DNA, 2306 bp, Homo sapiens
  source 1..2306: mol_type = other DNA
attataacaaactatctctcagaccacagtgcaatcaaactagaactcaggattaagaatctcactcaaagccgctcaactacatggaaactgaacaacctgctcctgaacgactactgggtacataacgaaatgaaggcagaaataaagatgttctttgaaaccaacgagaacaaagacacaacataccagaatctctgggacgcattcaaagcagtgtgtagagggaaaattatagcactaaatgcccacaagagaaagcaggaaagatccaaaattgacaccctaacatcacaattaaaagaactagaaaagcaagagcaaacacattcaaaagctagcagaaggcaagaaataactaaaatcagagcagaactgaaggaaatagagacacgaaaaacccttcaaaaaatcaatgaatccaggagctggttttttgaaaggatcaacaaaattgatagaccgctagcaagactaataaagaaaaaaagagaggagaatcaaatagacacaataaaaaatgataaaggggatatcaccaccgatcccacagaaatacaaactaccatcagagaatactacaaacacctctacgcaaataaactggaaaatctagaagaaatggatacattcctcgacacatacactctcccaagactaaaccaggaagaagttgaatctctgaatagaccaataacaggagctgaaattgtggcaataatcaatagtttaccaaccaaaaagagtccaggaccagatggattcacaaccgaattctaccagaggtacaaggaggaactggtaccattccttctgaaactattccaatcaatagaaaaagagggaatcctccctaactcattttatgaggccagcatcattctgatagcaaagccgggcagagacacaaccaaaaaagagaattttagaccaatatccttgatgaacattgatgcaaaaatcctcaataaaatactggcaaaccgaatccagcagcacatcaaaaagcttatccaccatgatcaagtgggcctcatccctgggatgcaaggctggttcaatatacgcaaatcaataaatgtaatccagcatataaacagagccaaagacaaaaaccacatgattatctcaatagatgcagaaaaagcctttgacaaaattcaacaacccttcatgctaaaaactctcaataaattaggtattgatgggacgtatttcaaaataataagagctatctatgacaaacccacagccaatatcatactgaatgggcaaaaactggaagcattccctttgaaaactggcacaagacagggatgccctctctcaccactcctattcaacatagtgttggaagttctggccagggcaatcaggcaggagaaggaaataaagggtattcaattaggaaaagaggaagtcaaattgtccctgtttgcagacgacatgattgtttatctagaaaaccccattgtctcagcccaaaatctccttaagctgataagcaacttcagcaaagtctcaggatacaaaatcaatgtacaaaaatcacaagcattcttatacaccaacaacagacaaacagagagccaaatcatgagtgaactcccattcacaactgcttcaaagagaataaaatacctaggaatccaacttacaagggatgtgaaggacctcttcaaggagaactacaaaccactgctcaaggaaataaaagaggatacaaacaaatggaagaacattccatgctcatgggtaggaagaatcaatatcgtgaaaatggccatactgcccaaggtaatttacagattcaatgccatccccatcaagctaccaatgactttcttcacagaattggaaaaaactactttaaagttcatatggaaccaaaaaagagcctgcatcgccaagtcaatcctaagccaaaagaacaaagctggaggcatcacactacctgacttcaaactatactacaaggctacagtaaccaaaacagcatggtactggtcccaaaacagagatacagatcaatggaacagaacagagccctcagaaataacgccgcatacctacaactatctgatctttgacaaacctgagaaaagcaatggggaaaggattccctatttaataaacggtgctgggaaaactggctagccatatgtagaaagctgaaactggatcccttccttacaccttatacaaaaatcaattcaagatggattaaagatttaaacgttagacctaaaaccataaaaaccctagaagaaaacctaggcattaccattcaggacataggcatgggc

SEQ ID NO: 783 - DNA, 6115 bp, Homo sapiens
  source 1..6115: mol_type = other DNA
caagatggccgaataggaacagctccagtctacagctcccagggtgagcaacgcagaagacgggtgatttctgcatttccaactgaggtactgggttcaactcacttgggcttgtcggacagtgggtgcggcccacggtgcagggcggggcatcgcctcaactgggaagcacaaggggtcagggaattcccattcctagctaaaggaagccatgacagacagtatctggaaaatcgggacactcccaccctaatactgcgcttttccaacagtcttagcaaacggcacaccaggagattatatcccgcgcctggttaggagggtccaacacccacacagcctcaatcactgctagcacagaagtctgagatcaaactgcaaggcggcagcgaggctagggaaggggcatccaccattactgaggcttgagtaggtaaacaaagcagcctggaagctcaaactgggtggagcccaccgcagctcaaggaggcctgcctgcctctgtagactccacctctggcagcagggcatagctgaacaaaaggcaccaaaaacttctgcagacttaaatgtccctgtctgacagctttgaagagagtagtggttctctgggcacggagtttgagatctgagaatggacagactgcctcctcaagtgggtccctgaaccccgagtagcctaactgggagacacctcccagtaggggccaactgacacctcatacagctgggtgcccctatgagacaaagcttccagagaaaggatcaggcagcaacatttgccgttctgcaatatttgctgttctgtagcctctgctggtgatacccaggaaaacagggtctggagtggacctccagcaaactacaacagacctgcagctgagggtcctgactgttagaaggaaaactaacaaacagaaaggacatccacaccaaaaccccatttgtacgtcaccatcatcaaagaccaaaggtagataaaccacaaagatggggagaaaccagagcagaaaagctaacgattctaaaaatcagagcgcctcttctcctccaaaagaacacagctcctcgccaccaacagaacaaagcaggaaagagaatgactttgacgagttgagagaaggcggcttcagacaatcagtaataacaaacttctccaagctaaaggaggatgttcgaacccactgcaaagaagctaaaaaccttcaaaaaagattagacaaatggctaactagaataaacagtacagacaagaccttaaatgacctgatggagctgaaaaccatggcacaagaactacgtgatgcatgcacaagattcagtagccaatttgatcaagtggaagaaagggtatcagtgactgaagatcaaatgaatgaaatgaagcgagaagacaagtttagagaaaaaagagtgaaaagaaatgaacaaagcctccaagaaatatgggactatgtgaaagaccaaatctgcgtctgattgttgtacctgaaagtgacggggagaaaggaaccaagttggaaaacactcttcaggatattatccaggagaacttccctaacctagcaaggcaggctaacactcaaattcaggaaatacagagaatgccacaaagatactcctcgagaaaagcaactccaagacacataactgtcagattcaccaaagttgaaatgaaggaaaaaatgttaagggcagccagagagaaaggtcgggttacccacaaagggaagcccatcagactaacagtggatctctcggcagaaactctacaagccagaagagaatgggggccaatattcaacattcttaaagaaaagaattttcaacccagaatttcatatccagccaaactaagcttcataagtggaggagaaataaaatcctttacagacaagcaaatgctgagagattttgtcaccaccaggcctgccctaaaagagctcctgaaggaagcactaaacatggaaaggaacaactggtaccagccactgcaaaaacatgccaaattgtaaagaccatccacgctaggaaggaactaacatcaactaatgagcaaaataaccagctaacatcataatgacaggatcaaatttacacataacattattaaccttaaatgtaaatgggctaaatgctccaattaaaagacacagactgacaaagtggataaagagtcaagattcatcagtgtcctgtattcacaagacccatctcacgtgcagagatacacatagcttcataataaagggatggaggaagatctaccaagcaaatggaaaacaaaaaaaaagccggggttgcaagcctagtgtctgataaaacagactttaaaccaacaaagatcaaaagagacaaagaaggccattacataatggtaaagggatcaattcaacaagagctaactatcctaaatgtatatgcacccaatacaggagcacccagattcataaagcaagtccttagtgacctacaaagagacttagactcccacacaataataatgggagactttaacaccccactgtcaacattagacagatcaatgagacagaaagttaacaaagatatccaggaattgaactcagctctgcaccaagcagacctagtagacatctacagaactctccaccccaaatcaacagaacatacattcttctcagcaccacatcacacttaatgcaaaactgaccatatagttgcaagtaaagcacccctcagcaagtgtaaaagaactgaaattctaacaaactgtctctcagaccacagtgcaatcaaactagaattcaggattaagaaactcactcaaaaccactcaactacatggaaaccgaacaacctgctcctgaatgactactgggtacacataacgaaatggaggcaaaaataaagatgttctttgaaaccaatgagaacaaagaaacataccagaatctctgggacacatttaaagcagtgtgtagagggaaatttatagcactacatgcccacaagagaaagcaggaaagatctaaaattgacaccctaacatcacaattaaaagaactagagaagcaagaccaaacacattcaaaagctagcagaatgcaagaaataactaagatcagagcagaactgaaggagataaagacacaaaaaaacccttcaaaaaaaaaaaatcaatgaatccaggagctggttttttgaaaagatcaacaaaattgacagaccgctagcaagactaacaaagaataaaagagagaagaatcaaatagatgcaataaaaaatgataaaggggatatcaccaccgatcccacagaaatacaaactaccatcagagaatactataaacacctctatgcaaatcaactaaaaaacctagaagaaatggataaattcctggacacatacatcctcccaggactaaacgaggaaaaagtcgaatccctaaatagaccaataacaggctctgaaattgaggcaacaattaatagcctactaaccaaaaagagtccaggaccagacggattcacagccaaattctaccagaggtacaaagaggagctggtaccattccttctgaaactattccaaacaatagaacaagagggaatcctccctaactcattttatgaggccagcatcatcctcataccaaagcctggcagagacacaacaaaaaaagggaattttagaccaatatccctgatgaacatcgatgcaaaaatcctcaatgaaatactcgcaaactgaatccagcagcacatcaagaaacttatccaccatgatcaagtgggcttcatccctgggatgcaaggctggttcaacatacgcaaatcaataaacgtaatccatcatatgaacagaaccaaatacaaaaaccacatgattatctcaatagatgcagaaaaagccttcaacaaaatttaacagcccttcgtgctaaaaactctcaataaactaggtactgatgggacatatctcaaaataataagagctatctaggacaaacccacagtcaatatcatactgaatgggcaaaaactggaagcattccctttgaaaactggcacaagacagggatgccctctctcaccactcctattcaatatagtgttggaagttctggccagggcaatcaggcaggagaaagaaataaagggtattcaattaggaaaagaggaagtcaaattgtccctgtttgcagatgacatgattttatatttagaaaaccacatcgtctcagcccaaaatctccttaagctgataagcaacttcagcaaactctcaggatacaaaatcaatgtgcaaaaatcacaagcattcttacacaccaataacatacagagagccaaatcatgagtgaactcccattcacaattgcttcaaagagaataaaatacctaggaatccaacttacaagggatgtgaaggacttcttcaaggagaactacaaaccactgctcaacgaaataaaagaggacacaagcaaatggaagaacatttcatgctcatggataggaagaatcaatatcatgaaaatggccatactgcccaaggtaattcacagactcaacgccatcccaatcaagctaccaatgacttccttcacagaattggaaaaaactactttaaagttcatgtggagccaaaaaagagcccgtattgccaagacaatcctaagtcaaaagaacaaagctggaggcatcatgctacctgacttcaaactatcctacaaggccacagtaaccaaaacagcatggtactgttaccaaaacagatatagatcaatggaacagaacagagccctcagaaataataccacacatctacaaccatctgatctttgacaaacctgagaaaaacaagaaatggggaaaggattccctatttaataaatggtgctggggaaactggttagccatatgcagaaagctgaaagtggatcccttccttacaccttatacaaaaattaattcaagatggattaaagacttacatgttagacctaaaaccataaaaaacctagaagaaaacctagccagtaccattcaggacataggcatgggcaaagatttcatgactaaaacaccaaaagcaatggcaacaaaagccaaaacaaacaagtgccatctaagtaaactaaagagcttctgcacagcaaaagaaactaccatcagagtgaacaggcaacctacagaatgggagaaaatttttataacctacccatctgacaaagggctaatatccagaatctacaaagaatttaaacacatttacaagaaaaaatcaaaaaaccccatcaaaaaggcaaaggatatgaacagacacttctcaaaagaagacatttatgcagccaacagacgtgaaaaaatgttcatcatcactggccatcagagaaatgcaaatcaaaaccacaatgagataccatctcacaccagttagaatggcgatcattaaaaagtcaggaaacaacaggtgctggagaggatgtgaagaaataggaacacttttacactgttggtgggactgtaaactagttcaactgttgtggaagacagtgtggcgattcctcaaggatctagaaccagaaataccatttgacccagccatcccattactgggtatatacccaaaggattataaatcatgctgctataaagacacatgcacacgtatgtttattgcggcactattcacaatagcaaagacttggaaccaacccaaatgtccatcagtaatagactggattaaggaaatgtggcacatatataccatggaatactatgcagccataaaaaaggatgagttcatgccctttgtagggacatggatgaagctggaatccatcattctgagcaaactatcgcaaggacagaaaaccaaacaccgcatgttctcactcataggtgggaattgaacaatgagaacacttggacacagagtgcaaaacatcacacaccggggcctgtcatggggtggggggaggggcgagagatagcattaggagatatacctaatgtaaatgatgagttaacgggtgcagcacaccaacatggcacatgtatacatatgtaacaaatctgcacgttgtacacatgtaccctagaacttaaagtataataaaaaaaaaaa

SEQ ID NO: 784 - DNA, 1425 bp, Homo sapiens
  source 1..1425: mol_type = other DNA
tagtgggacactttaacaccctgctgtcaatattagacagatcagtgagacagaaaattaacagggatatttaggacttgaactcagctctggaccaagcagacctgatagacatctacagaactctccaccccaaatcaacagaatatacattctttccagcaccacatcacacttattctaaaattgaccacataattggaagtaaaacactcctcaccaaatgcagaagaacagaaatcataacagtctgtcagaccacactgcaatcaaattagaactcaggattgagaaactcattcaaaaccacacaactacatggaaactgatcaacctgctcctgagtgactactgggtaaataacgaaattaaggcagaaataaataagttctttgaaaccaatgagaacaaagacacaatgtaccaggatcacaatgtacagctaaagcagtgtttagagggaaatttatacactaatgtctacaggacaaagtgggaaagatctaaatttgataccctaacatcacaattaaaagaactagagaagcaaccgaaacaaattcaaaagctagcagaaaacaagaaataactaagatcagagcagaactaaaggcgatagagacatgaaaaacccttcaaaaaatcaataaatccaggagctggttttttgaaaagattaacaaaatagaccactagccagactaataaagaagaaagagagaagagtcaaatagacacaataaaaaatgataaaagggatatcaccactgatcccacagaaatacaaactaccaccatatagagtatagagaatactataaacacctctacgcaaataaactagaaaatctagaagagatggataaattcctggacacattcaccctcccaagactaaactaggaagaagtcaaatccctgaatagaccaataagaagttctgaaattgaggcagtaattaatagcctaccaaccaaaaaaagcccaggaccagatggatttacagccaaattctaccagaggtacaaaaaggagctggtaccattccttctgaagctattccaagcaacagaaaaagagggtatcctccctaactcattttgtgaggccagcatcatcctgataccaaaacctggcagagacacaacgaaagtagaaaatttcaggccaatatccctgatgaacattgatgcaaaaatcctcaataaaatactggcaaactgaatccagcagcacatcaaaaagcttatccaccacaatcaattcggcttcatccctgggatgcaaggctggttcaacatatgcaaatcaataaacataatctatcacataaagagaaccagtgacaaaaaccacatgatcatcttaatagatgcagaaaaggccttcgacaaaattcaacagcccttcatgctaaaaactctc

SEQ ID NO: 785 - DNA, 2881 bp, Homo sapiens
  source 1..2881: mol_type = other DNA
ggtggctagaaagatggctgaataggagcagctccaatctgcagctcccagcaagatcgatgcagaaggtgggtgatttctgcattcccagctgaggtacctggttcatctcattgggactggttagacagtggaagcagcccacagagggcgagccgaagcagggtgggggtgtcacctcactcaggaagtgcaaggggtcggggaactcccccccccccccagccaagggaagccgtgagggactgtgccatgaggaacaggaggaacagtgcattccggcccagatagtatgctttgcccatggtctttgcaatccacagaccaggagattccctggggtgcctacaccaccagggcactgggtttcaagcaaaaaactgggcgaccatttgggcagacaccgagctagctgcaggagttttttttcataccccagtggtgcctggaacgccagtgagacagaaccattcactcccctggaaagggagctgaagccagggagccaagtgatctagctcagcggatcccacccccatgaagcccagcaagctaagatccactgatttgaaattctggctgccaacactgcagtctgaagtcgacctgggatgctctaagttggtggggtatgggcatctgccattactgaggcttgggtaggtggttttcccttcacagtgtaaacaaacccaccaggaagtttgaactgggcagagcctaccacagctcagcaaagcctctgtacccagactgcctctctagattcctcctctctgggcagggcatcactgaaagaaaggcagcagccccagtcaaaggcttatagatcaaagtcccatctctctgggacagagcacctgggggaaggggcagctgtgggcgcagcttcagcagatttaaacattcctgctgctggctctgaaaagagcagcagatctcccagcacagtgctcgagctctgctaagggagagactgcctcctcaagtgggtccctgacccccgtgcctcctgactgggagacacctcccagcaggggtcgacagacacctcatacaggagagctccggctgacatctggcaggtgcccttctgggatgaagcatccagaggagggaacaggcagcaacctttgctgttctgcagccttcgctggtgatacccaagcaaacagtgtctggagtggacctccagcaaactccagcagacctgcagcagagggccctgactgttagaacaaaaactaacaaacagaaagaaatagcatcagcatcaacaaaaagggcgtccacacaaaaaacccatatgaaggggtcaccaacatcaaagaccaaaggtagataaatccacaaagatgaggaaaaaccagtacaaaaggtctgaaagttccaaaaacgagaatgcctcttctcctccaaaggatcacaactactcaccagcaagggaacaaaactggacagaaaatgagtttgacgaattgacagaagtgggcttcagaaggtgggtaatagtaaactcctctgagctaaaggagcttattctaacccaatgcaaggaagctaagaaccttgaaaaaaggttagaggaattgctaattagaataaccagtttagagaagaacataaatgaccggatggagctgaaaaacacagcacgagaacttcgtgacgcatacacaagtattgatagctgaatcaaacaagtggaagaaaggataacagagatagaagatcaacttaatgaaataaagtgtgaagacaagattagagaaaaaagaatgaaaaagaatgaatgaagtctccaagaaatatgggactatgtgaaaagaccaaacctacgtttgattggtgtacctgaaagtgacagggagaatggaaccaagttggaaaacacttttcaggatattatccaggagaacttccccaacctagcaagagaggccaacattcaaattcaggaaatacagagaacaccacaaagatactcctcaagaagagcaaccccaagacaaataatcatcagattcaccaaggttgcaatgaaggaaaaaatgttaaggacaaccagagagaaaggttgggttctccacaaaggaaagcccatcagactaacagcggatcttttggcagaaaccctacaagccagaagaaagtgggggccaatattcaacattcttaaagaaaagaattttcaacccagaatttcatatccagccaaactaagcttcgtaagtaaaggagaaataaaaatcctttacagacaagcaaatcctgaggggttttgtcaccaccaggcctgccttacaagatctcctgaaggaagcactaaatatggaaaggaaaaaccagaaccagccactgcaaaaacataacgaattgtaaacaccatcgacactatgaagaaactgcatcaactaacgcgcagaataaccagctagcatcataatgacaggatcaaattcacacataacaatattaaccttaaatgtaaagggctaaatgcccaaattaaaagacgcaggctggcaaattggataacgaatcaagacccatcagtgtgctgtattcaggagaccagcctcatgtgcaaatacacacataggctcaaaataaagggatggaggaatatttaccaagcaaatgaaaagcaaaaaaaaaaaaaaaaggcaggggttgcagttgtagtctgataaaacagactttaaaccagcaaagatcaaaaaagacaagggtattacataatggtaaagggatcaatgcaacaagaagagctaactatcccaaaaatatatggagccaatacagaagcacccagattcataaagcaagttcttagagacatacaaagacacttagactcccacacaaaaatagtgggaga

SEQ ID NO: 786 - DNA, 6148 bp, Homo sapiens
  source 1..6148: mol_type = other DNA
ttccaagatggccgaataggaacagatctggtctacagctcccagcaagatcgacacagaagacgatgatttctgcattctgcatttccaactgaggtacctggttcatctcactgggactggttggacagtgggtgcagcccatggagggcgagccaaagcagggtggggtgtcgcctcactggggaagcgcaaggggtcagggggatttccctttcctagccaagggaagctgtgagtgactgtatctggaggaacggtatgctcctgcccaaatactgtgcttttcctatggtcttcacaaccagcagaccagattacctcctgtgcctggtgtggcaggtcccacgcccacggagcattgctcactgctagtgcagcagcctgagattgacctgggaccctggagcttggtgcggggaggggcgtccgccgttgctgaggcttgagtagctggttctgtgctcaccgtgtaaacaaagtggcagggaagctcaaactgggcagaacccacttcagctcagcaaggcttactgcctctctagataccacctctagggcagggcatatctgaacaaaaggcagcagacgacttctgcagacttaaacgtccctgcctgacagctctgaagagaccagtggttctcccagcactgcatttgagatccgataatggacagactgccttctccagtgggtccctgacccctgtgtagcctgtctgggagacacctcccagtagggactgacaaacacctcatacaggtgggtgcccctctgagatgaagcttccagaggaaggatcaggcagcaatacttgctgttcagcagccttcgctggtgatactcaggcaaacagggtctggagtggacctccagcaaactccagcagacctgcagcggaggggcctgttagagggaaaactaacaaacaggaagcaatagcatcaacatcaatgaaaaggacatctacatcaaaaccccatctctaggtcaccaacatcaaagaccaaaggtagataaaaccacaaagatgaggagaaaccagagcagaaaggctgaagattccaaaaaccagaaggcctcttctcctccaaaggaacataactccttaccagcaagggaacaaaactggatagagaatgagtttgacgagttgacagaagtaggcttcagaaggttggtagtaacacacttctccgagctaaagaagcatgttctaacccatcacaaagaaggtaaaaaccttgaaaaaagcttagatgaatggctaactagaataaccagtgtagagaagacctcaaatgacctgatggagctgaaaaccacagtacaagaactttgagaagcatacacaagcttcaatagcctattcgatcaagcagaagaaaggatatcagtgattgaagaccaaattaatgaaataaagcgagaagacaagattagagaaaaaagagtgaaaagaaatgaacaaagcctccaagaaatatgggacaatgtgaaaataccaaatctacatttgattggtatacctgaaagtgacagggagaatggaaccaagttagaaaacacttttcagggtattatccaggagaacttccccaacctagcaaggtaggccaacattcaaattcaggaaatacagagaacaccacaaagatacacctcgagaagagcaaccccaagacacatagttgtcagattcaccaaggttgaaatgaaggaaaaaatgttaagggcagccagagagaaaggtcgggttacccacgaagggaagtccatcagactaacagcggatctctctgcagaaaccctacaagccagaagagagtgggggccaatattcaacattcttaaagaaaagaattttcaacccagaatttcatatccagccaaactaagcttcaaaagtgaaggagacataaaatcctttacagacaagcaaatgctgagagattttgtcaccaccaggcctgccttacaagagctcctgaaggaagcactaaacatggaaatgaacaaccagtaccgccactgcaaaagcatgacaaattgtaaagaccatcaacgctatgaagaaactgcatcaattaatgggcaaaataatcaggtagcaccataatgacaggatcaaattcacacctaacaatattatccttaaatgtaaatgggctaaatgcccaaattaaaagacacagactggcaaattagataaagagtcaagacccatcattgtgctgtattcaggagacccacctcatgtgcacagacacacataggctcaaaataaagggatggaggaagatctaccaagcaaacggaagcaaaaaaaaaaagcaggagttacaatcttagtctctgataaaacagactttaaaacaacaaagatcaaaagagacaaagaaggccattacataatggtaaagggatcaatgcaacaagaagagttaactatcctaaatatatatgcacccaatacaggagcacccagattcataaagcaagttcttaaagacctacaaagagacttagactcccacacagtaataatgggagactttaacaccccactgtgaatattagacagatcaacaagacagaaaattaacaaggatatccaggacttgaactcaactctggaacaaccagacctaatagacatctacagaactctccaccccaaatcaacagaatatacattcttctcagcaccacatcgcacttattctaaaattgaccacgtaattggaagtaaaacactcctcagcaaatgtaaaagaaaagaaatcacacaaactgcctctcagaccacagtgcaatcaaattagaactcgggattaagaaactcactcaaaaccgcacaactacatggaaactgaacaacctgcacctgaatgactactgggtaaattacgaaattaaggcagaaataaagatgttctttgaaaccaacgagaacaaagacacgatgtaccagaatctctgggacacatttaaagcagtgtgtagagggaaatttatagcactaaatgcccacaagagaaagcaggaaagatctaaaatcaacaccctaacatcacaattaaaagagctagagaagcaagagcaaacaaattcaaaagctagcagaagacaataaataactaagatcagagcagaactgaaggagatagagacacgaaaaacccttcaaaaaatcagtgaatccaggagctggctttttgaaaagatcaacaaaattgagagaccgcctgcaagactaataaagaaaagagagaagaatcaaatagatgcaaaataaaatgataaaggggatatcaccatcgatcccgcagaaatacaaactaccatcagagaatactataaacacctctacacaaataaactacaaaatctagaagaaatggataaattcctggacaaatacgctctttgaagactaaaccaggaagaagttgaatctctgaatagatcaataacaggtctgaaattgaggcaataattaatagcctaccaatcaaaaaagtccaggacaagatggattcccagctgaattctaccagaagtacaaagaggagctggtaccattccttctgaagctattccgatcagtagaaaaagagggaatcctccctaactcattttatgaggccagcatcatcctgataccaaagtctggcagagacacagcaaaaaaagagaattttaggccaatatctgtgatgaatatcgatgcaaaaatcctcaataaaatactggcaaaccgaatgcagcagcacatcaaaaagcttatccaccacgagcaagttggcttcatccctgggatgcaaggctggttcaacatacgcaaatcaataaacgtaatccatcacataaacagaaccagtgaccaaaaccacatgattatctcaatagatacagaaaaggccttcaacaatatccaacagcctttcatgctaaaaaactttcaataaatgaggtattaatggaatgtacctcaaaataataagagctttatgacaaacccacagctaatgtcatactgaatgggcaaaaactggaagcattcccattgaaagccagcacaagacaaggatgccgtctgtcgccactcctattcaaaatgtattggaagttctggccaggacaatcaagcaagagaaagaaataaagtgtattcaattaggaaaagaggaagtcaaattgtctttgtttgcagatgacgtgactgtatatttagaaaaccccatcatctgagcccaaaatctcgttaagctgataagcaacttccgcaaagtctcaggatacaaaatcaatgtgcaaaaaccacaagcattcctatacaccaataacagacaaacagagagccaaatcatgagtgaactcccattcacaattactacaaagagaataaaatacctaggaatccaacttacaagagtagtgaaggacctcttcaaggagaactacaaaccactcctcagtgaaataaaagaggacacaaacaaatggaaaaacatgccatgctcatggataggaggaatcaatatcctgaaaatagccatactgcccaaggtaatttgtagattgaatgctatccctatcaaactaacactgactttcttcacagaattggaaaaaactactttaaatttcatatggaacaaaaaagagcccacatagccaagacaatcctaagcaaaaagagcaaagctggaggcatcacgctacctgacttcaaactacactacaaggctacagtaaccaaaacagtgtggtactggtatcagaacagatacagaccaatggaacagaacagagacctcagaaataacaccacacatctaccaccatctaatctttgacaaacctgagaaaaacaagcaatggggaaaggattccctatttaataaatggtgctgggcaaactggctagccatatgtagaagttgaaactagatccctttcttacatcttacacaaaaattaactgaagatggattaaagatttaaatgttaggcccaaaaccataaaaaccctagaagaaaacctaggcaataccatttaggacataggcatgggcaaagacttcataactaaaacaccaaaagcaatggcaacaacagccaaaatagacaaatgggatctaattaaactaaagagcttctgcacagcaaaagaaactatcatcagagtgaacaggcaacctacagaacgggagaaaatttttgcaatctactcatctgacaaagggctaatatccagaatctacaaagatcttaaacaaatttacaagaaaaaaacaaccgcataaaaagtgggcaaaggtatgaatggacatttttcaaaagaagacatttatgcagccaacagacatatgaaaaaaagctcatcatcactggtcatcagagaaatgcaaatcaaaaccacaatgagataccatctcacaccagttagaagggcgatcattaaaaagtcaggaaacaacagattctggagaggatgtagagaaataggaacgcttttacactgttggtgggactgtaaactagttcaaccattgtggaagacagtgtggcgattcctcaaggatctagaactagaaataccatttgacccagccatcccattactgagtgtatacccaaaggattataaatcatgctactataaagacacatgtacacttttgtttattgcggcactattcacaatagcaaagacttggaaccaacccaaatgcccatcaataatagactggataaagaaaatatggcacatgtataccatggaatgctatgcagccataaaaaaggatgagttcatgtcctttgtagggacatggatgaagctggaaaccatcattctcagcaaaatatcacaaagacagaaaaccaaacaccacatgttctcactcataagtgggagttgaacaatgagaacacatggacacagggaggggaatatcacacaccagggcctgttggcaggtggggggctgggggagggatagcgttaggagaaatacttaaatgacgagttgataggtgcagcaaaccaacatggcacatatatacctatgtaacaaatctgtatattgtgcacatgtaccctagaacttaaagtataataataataaagaaaaaa

SEQ ID NO: 787 - DNA, 6162 bp, Homo sapiens
  source 1..6162: mol_type = other DNA
gggggagggttccaagatggctgaataggaacagctccagtctacagctcccagcttgagcgacacagaagacggttgatttctgcatttccaacttaggtactgggttcatctcactggggcttgtcggacaggggtgcaggacagtgggtgcagcccactgagtgagagccgaagcaaggtgaggcatcacctcacctgggaagcgcaaggggtcagggaattccctttcctagccaagggaatctgtgacagatggcacctggaaaatcgggtcactcccatcctaatactacgcttttccaaaggtcttagcaaacggcacacagtttatattatatataaacagagattatatctggcacctggctcggagggtcccacgcccacagagccttgcttgttgctagcacagcagtctgagatcgatctgcaaggtggcagcgaggctgggggaggggcgcccaccattactgaggcttgagtagataaacaaagctgccgggaagctcgaactgggtagagtccacctcagctcaaggaggcctgcctgcctctgtagattccacctctgggggcagggcatagctgaacaaaaggcagcagaaacttctgcagacttaaatgtccctgtctgacagctttgaagagagtagtggttctcccagcacagagtttgagatctgagaatggacactctgcctcctcaagtgggtccctgacctccgagtagcctaactgggaggcacccccaagtaggggcagactgacaccccacacggctgggtacccctctgagacgaagcttctagaggaatgatgaggcagcaacatttgctgttctgcaatattcactgttctgcagcctctgctgatacccaggcaaacagggtctgaagtagacctccagcaaaccccaacagacctgcagccgagggtcctgactgttagaaggaaaactaacaaacagaaacgacatccacaccaaaaccccatctgtacgtcaccatcatcaaagaccaaaggtagataaaaccacaaagatggggagaaaccagagcagaaaagctgaaaattctacaaatcagagcacatcttctccaaaggaacacagctccttgccagcaacggaacaaagctggacggagaatgactttgacgagttgagagaagagggcttcagacgatcaaacttctctgagctaaaggaggatgttcaaacccatcgcaaagaagccaaaaaccttgaaaaaagattagacgaatggctaactagaataaccagtgtagagaaatccttaaatgacctgatggagctgaaaaccatggcacgagaactacgtgacgcatgaacaagcattagtagccaatttgatcaactgtaagaaagggtatcagtgattgaagatcaaatgaatgaaatgaagtgagaagagaagtttagagaaaaaagtaaaaagaaatgaacaaagcctccaagaaatatgggactatgtgaatagaccaaatctacgtctgattggtatacctgaaagtgacgaggagaatggaaccaagttggaaaacactctgcaggatattatccaggagaacttccccaacatagcaaggcaggccaacattcaaattcaggaaatacagagaacaccacaaagatactccttgagaagagcaactccaagacacataattgtcagattcaccaaagttgaaatgaaggaaaaaaggttaagggcagccagagagaaaggttgggttaccaacaaagggaagcccatcagactaacagcggatctctcggcagaaactctgcaagccagaagagagtggggccaatattcaacattcttaaagaaaagaattttcaacccggaatttcatatccagccaaactaggcttcataagtgaaggagaaataaaatcctttactgacaagcaaatgctgagagattttgtcaccaccaggcctgccttacaggagctcctgaaggaagcactaaacatggaaaggaataaccggcaccagccactgcaaaaacatgccaaattgtaaagaccatcaaggctaggaagaaactgcatcaactaatgagcaaaataaccagctaacatcataatgacaggatcaaattcacacataacaatattaaccttaaatgtaaatgggctaaatgctccaattaaaagacacagactggcaaattggataaagagtcaagacccatcagtgtgctgtattcaggaaacccatctcacatgcagagacacacataggctcaaaataaagggatggaggaagatctaccaagcaaatggaaaacaaaaaaaaagcaggggttgcaatcctggtctctgataaaacagactttaaaccaacacagatcaaaagagaccaagaaggccattacataatggtaaagggatcaattcaacaagaagagctaactatcctaaatatatatgcacccaatacaggagcacccagattcataaagcaagtccttagtgacctacaaagagacttagactcccacacaataataatgggagactttaacaccccactgtcaacattagacagatcaacaagacagaaagttaatagggatatccaggaattgaactcagctctgcaccaagcagacctaatagacatctatagaactttccaccccaaatcaacagaatatacattcttctcagcaccacaccacacctattccaaaactgaccatatagttggaagtaaagcactccttagcaaatgtaaaagaacagaaactataacaaactgtctctcagaccacagtgcaatcaaactagaactcaggattaagaaactcattcaaaactgctcaactacatggaaactgaacaacctgctcctgaatgactactgggtacataatgaaatgaagacagaaataaagatgttctttgaaaccaatgagaacaaagacacaacataccagaatctctgggacacatttaaagcagtgtgtagagggaaatttatagcactaaatgcccacaagggaaagcaggaaagatctaaaattgacaccctaacatcacaattaaaagatctagagaagcaagagcaagcacattcaaaagctagcagaagacaagaaataactaagatcagagcagaactgaaggagatagagacacgaaaaactgttcaaaaaatcaatgcatccaggagctggttttttaaaaaaatcaacaaaattgatagactgctagcaagactaataaagaagaaaagagagaagaatcaaatagatgcaataaaaaatgataaaggggtatcaccaccgattccacagaaatacaaactaccaccagtattttctgatggtaaatcagaaaatggtaaaacacctctacgcaaataaactagaaaatctagaagaaatggataaattccccgacacatgtaccctcccaagactaaaccaggaagaagttgaatccctgaatagaccaataacagactctgaaattgaggcaataattaatagcctaccaaccaaaaaaagtccaggaccagatggattcatagccgaattctaccagaggtacaaggaggagctggtaccattccttctgaaactattccaatcaatagaaaaagggaatcctccctaagtcattttatgaggccagcatcatcctgataccaaagcctggcagagacataacaaaaaagagaattttggaccaatatccccgatgaatgtcggtgaaaaaatcctcaataaaatactggcaaaccgaatccagcagcacatcaaaaagcttatccaccatgatcaagtgggcttcatctctgagatgcaaggctcattcaacatacacaaatcaataaacgtaatccagcatataaacagaaccaaagacaaaaaccacatgactatctcaatagatgcagaaaaggcctttgacaaaattcaacagcccttcatgccaaaaactctcaataaattagatattgttgggacatatctcaaattaataagagctatttatgacaaacccatagccaatatcatactgaatggacaaaaactggaagcattccctttgaaaactggcacaagacagggataccctctctcaccactcctattcaacatagtgttggaagttctgcccagggcaatcaggcaggagaaagaaataaagggtattcagttaggaaaagaggaagtcaaattgtccctgtttgcagatgacatgattgtatacttagaaaaccccatcatctgagccccaaatctccttaagctgattagcaacttcagcaaactctcaggatacaaaatcaatatgcaaaaatcacaagcattcctatacaccaataacaaacagagagccaaatcatgagtgagctcccattcacaattgcttcaaagagagtaaaatacctaggaatccaacttacaagggatgtgaaggacctcttcaaggagaactacaaacgactgctcaacgaaataagagaggacacaaacaaatggaagaacatttcatgctcatggataggaagaatcaatatcgtgaaaatggccatactgcccaaggtaatttatagattcaatgccatccccatcaagctaccaatgactttcttcacagaattggaaaaaactactttaaagttcatatggaaccaaaaaagagcccacattgccaagaaaaacctaagtcaaaagaacaaagctggaggcatcatgctacctgacttcaaactatactacaaggctacagtaaccaaaacagcatggtactggtaccaaaacagagatatagacaatggaacagaacagagccctcagaattaatgccgcatatctacaaccatctgatctttgacaaacctgacaaaaacaagcaatggggaaaggattccctatttaataaatggtgctgggaaaactggctagccgtatgtggaaagctgaaactgaatcccttccttacaccttatacaaaaattaattcaagatggattaaagacttacatgttagacctaaaaccataaaaaccctagaagaaaacctaggcaataccattcaggacataggcatgggcaagcacttcaagtctaaaacaccaaaagcaatggcgacaaaagccaaaattgacaaatgggatctaatcaaactaaagagcttctgcacagcaaaagaaactaccatcagagtgaacaggcaacctacagaatgggagaaaatttttgcaatctacccatctgacaaagggctaatatccagaatctacaaagaacttaaacaaatttacaagaaaaaatcaaacaacctcatcaaaaagtgggcaaaggatacgaacagacatttctcaaaagaagacatttttgcagccaacagacacttgaaaaaatgctcatcatcactggccatcagggaaatgcaaatcaaaaccacaatgagataccatctcacaccagttagaatggagatcattaaaaagtcaggaaacaacaggtgctggagaggatgtggagaaataggaacacttttacactgttgatgggactgtaaactagttcaaccattgtggaagtcagtgtggcaattcctcagggatctagaactagaaatgccatttgacccagccatcgcattactgggtatatacccaaaagattataaatcatgctgctataaagacacatgcacacatatgtttattgcagcactattcacaatagcaaagacttggaaccaactcaaatgtccatcaatgatcgactggattaagaaaatgtggcacatatacaccatggaatactatgcagccataaaaaaggatgagtttatgtcctttgcagggacatggatgaagctggaaaccatcattctcagcaaactatcacaaggacagaaaaccaaacactgcatgttctcactcataggtgggaatggaacaatgagaacacttggacacaggaaggggaacatcacacaccctgttgtggggtggggggagggggagggatagcattaggagatatacctaatgtaaatgacgagttaatgggtgcagcacatcaacatggcacatgtatacatatgtaacaaacctgcacgttgtgcacatgtaccctagaacttaaagtataataataaaa

SEQ ID NO: 788 - DNA, 1125 bp, Homo sapiens
  source 1..1125: mol_type = other DNA
aaaaaccctagaagaaaacccaggcattaccattcaggacataggcatgggcaaggacttcatgtccaaaacaccaaaagcaatggcaacaaaagacaaaattgacaaatgggatctaattaaactaaagagcttctgcacagcaaaagaaactaccatcagagtgaacaggcaacctacaacatgggagaaaattttcgcaacctactcatctgacaaagggctaatatccagaatctacaatgaactcaaacaaatttacaagaaaaaaacaaacaaccccatcaaaaagtgggcgaaggacatgaacagacacttctcaaaagaagacatttatgcagccaaaaaacacatgaagaaatgctcatcatcactggccatcagagaaatgcaaatcaaaaccactatgagatatcatctcacaccagttagaatggcaatcattaaaaagtcaggaaacaacaggtgctggagaggatgcggagaaataggaacacttttacactgttggtgggactgtaaactagttcaaccattgtggaagtcagtgtggcgattcctcagggatctagaactagaaataccatttgacccagccatcccattactgggtatatacccaaatgagtataaatcatgctgctataaagacacatgcacacgtatgtttattgcggcactattcacaatagcaaagacttggaaccaacccaaatgtccaacaatgatagactggattaagaaaatgtggcacatatacaccatggaatactatgcagccataaaaaatgatgagttcatatcctttgtagggacatggatgaaattggaaaccatcattctcagtaaactatcgcaagaacaaaaaaccaaacaccgcatattctcactcataggtgggaattgaataatgagatcacatggacacaggaaggggaatatcacactctggggactgtggtggggtcgggggagtggggagggatagcattgggagatatacctaatgctagatgacacattagtgggtgcagcgcaccagcatggcacatgtatacatatgtaactaacctgcacaatgtgcacatgtaccctaaaacttagagtataataaaaaaaaaaaaa

SEQ ID NO: 789 - DNA, 6431 bp, Homo sapiens
  source 1..6431: mol_type = other DNA
aagatggccaaatagcaacagctctggtcttagcaacagctctagtctgtagttcccagcgagatcgacacagaaggcaggtgatttctgcatttccaactgaggtaccccgttcatctcaatgggactggttggtcagtgggtgcagcccaaggagggcgagctgaagcagggtggggcatcacctcacccgggaagtgcaaggagtcggggaactccctctcccagccaagggaagccattagggactgtactgtgcactctggcccagatactgtgctttccccacggtgattccttctggtgcctacaccaccagagccctgggtttccagcccaaaactgggcggccatttgggcagacactgagctagctggaggagtttttttttttcatgtcacagtggcgcctggaacaccagtgaaacagaaccgttcactccccctgcaaagggggctgaagccagggagccaagtagtctggttcgtcggagcccagatggagctcagcaagctaagatccacttgttgaaattcttgctgccagcacagcagcagtctgagttcgacctgggacacctgagcttggtgggtggtggggactccaccattgctgaggcttaagtaggtggtttcaccctcacagtgtaaacaaagccaccaggacgttcgaactgggtggagcccaccccagctcagaaaggctgctgcagccagactgtctcctctctgagcagggaatctctgaaaaaaaggcagcagccccagtcagggacttatagatataacccccacctccctgggacagagcacctggggaaagtggtggttgtaggcgcagcttcagcagacttaaacgtccctacctggcagctctgaagagagcagtgggtctaccagcacagcgtttgagctctgataagggacagactgcctcctcaagtaggtccctgacccctgtgtatcctgactaggagacacctcccagtaggagccaacagacacctcatacaggagagctctggctggcatctggtgggtgcccctccgggttgaagcttccagaggatagaataggcagcaatctttgctgctctgcagcctccgctggtgctacccaggcaaacagggtctggagtggacctccagcaaactccagcagacctgcagcagagaggcctgactgttagaaggaaaactaacaaacagataggaatagtatcaacatcaacaaaaaggatgtccactcagagaccccatctgaaggtcatcgacttcaaagaccaaaggtagataaatccatgaaggtggggagaaaccagtgcaaaaaggctgaaaattccaaaaaccagaatgcttcttctcctccaaaggatcacaactcctcgccagcaagggaacaaaactggatagagaatgagtttgacaaattgacagacgttaagctccagaagatgggtaataacaaactcctctgagctaaaggagcatgtcttaacccaatgtaaggaagttaaaaaccttgaaaaaaggttaaacgaattgctaactagaataaccagttgagtgaagaatacaaatgacctgatgggctgaaaaacatagtacgagaatttcgtgaagcatacacaagtatcaatagctgaattgatcaagaggaagaaaggatatcagagacagaagatcaactcaatgaaataaagcaagcaaacaagattagagaaacaagattgaaaagaaatgaacaaagcctccaagaagtatgggactatgtgaaaagaccaaatctacgtttgattggtgtacctgaaagtgacggggagaatggaaccaagttggaaaacactcccaggatactatccaggagaacttccccaacctagcaaggcaggccaacattcaaattcaggaaatgcagagaataccacaaagatactcctcgagaagagcaactccaagacacataattgtgagattcaccaaggttgaaatgaaggaaaaaatgttaagggcagccagagagaaacgtcaggttacccacaaagggaagcccatcagactaacagtggatctctctgcagaaaccctacaagccagaagagagtgggggccaatattcaacattcttaaagaaaagaattttcaaaccagaatttcatatccagccaaactaagcttcataagtgaaggagaaataaaatcctttacagacaagtaaatgctgagagattttgtcaccaccaggcctgccctacaggaactcctcaaggaagcactaaacatggaaaggaacaaccagcaccagccactgcaaaaacatatcaaattgtaaagaccatcgacactatgaagaaactgcataaactaatgggcaaaataaccagctagcatcataatggcaggatcaaattcacacataacaatattaaccttaaatgtaaatgggctaaatgctccaattaaaagacacagactggcaaattggatgaagagtcaagacccaatggtgtgctgtattcaggagacccatctcacatgcaaagacacacataggctcaaaataaagggatggaggaatatttaccaagcaaatggaaagaaagaaaaaaaaagcaggggttgcaatcctagtctctgataaaacagactttaaaccaacaaagatcaaaacagacaaagaaggacattacataatgggaaagggatcaatgcaacaagaagagctaagtatcctaaatatatatgcacccaatacaggagcacccagattcatgaagcaagttcttagagacctatctagagacttagactcccacataataatagtgggagactttaataccccactgtcaacattagacagatccatgagacagaaaattaacaaggatattcaggacttgaactcagctctggaccaagcaaacctagtagacatctacagaactctgcacctcaaatcaacagaatatacattcttctcagcaccacattgtacttattctaaaatttaccgcataattggaagtaaaacatgccacagcaaatgcaaaataatgcacatcataatagtctctcagaccacagtgcaatcaaattagaactcaggattaagaaactcactcaaaactgcacaactatatagaaactgaacaacctgctcctgaatgactactgggtacataacaaaatgaaggcagaaataaacatgttctttgaaaccagtaagaacaaagacacaatgtaccagaatctctgggacacatgtaaagcagtgtgtagagggaaatttatagcactaaatgcctacaagagaaagcaggaaagatctaaaatcgacatcctgacatcacaattgaaagaactagagaagcaagagcaaacaaattcaaaagctagcagaagacaaaaaataactaagatcagtgcagaactgaaggagacagagacacaaaaaacccttcaaaaaaatcagtgaatccaggaggtagttttttgaaaagatcaacaaaattgatagaccactagcaagactaataaagaaacaagagagaagaatcaaatagatgcaataaaaaatgataaaggggataccaccaattcccacagaaatataaactaccatcagagaatactataaacacctctacacaaataaatagaaaatctagaagaaataggtaaattcctggacacatacaccctcctaagactaaaccaggaagaagtggaatccctgaatacaccaataacaagttctgaaactgaggcaacaattaatagcctaccaaccaaaaaaagtccgagaactgatggattcatagccgaattctaccagaggtacaaagaggagctggtaccattcctcccgaaactattccaaacaacagaaaaagagggaatccttcctaactcatttatgaggcaagcaccatcctgataccaaaacctggcagagacacaacaaaaaaggaaatttcaggccaatattcctgatgaacatcgatgtcaaaatcctcaataaaatattagcaaatcaaatccagcagcacatcaaaaggcttatccaccacgatcaaggtggcttcatccctgggatgcaaggctggttcaacatatgcaaatcaataaacgtaatccatgacataaacagaaccaatgacaaaaaccacatgattatatcaatagatgcagaaaaagccttcgaaaaaattcaacagcccttcatgctaaaaactctcgataaactaggcattgatggaacgtatttcaaaataataaacacgatttatgacaaactgacagccaatatcatactgaatgggcaaaaactggaagcattccctttgaaaaccagcacaagaccaggatgccctctctcaccacaccattcaacacagtattggaagttctggccagggcaatcaggcaagagaaagaaataaagggtattcaattaggaaaagaggaagtcaaattgtctctgtttgaagatgacatgattgtatattcagaaaacctcatcatctcagcccaaaatctccttaagctgataagcaacttcagcaaagtctcaggatacaaaatcaatgtgcaaaaatccaaagcattcctgtacaccaataacagacaaacagagagccaaatcacaagtaactcccattcacaattgttacaaagagaataaaatacctaggaacccaacttataatggatgtgaaggacctcttcaaggagaactataaaccactgctcaaagaaataagagaggacacaaacaaatggaagaacattccatgctcatggataggaagaatcaatatcatcaaaatggccatactgccctaagtaatttatagatttaatgctatcctgatcaagctaccattgactttcttcacagaactagaaaaaaactactttaaatttcatatggaaccaaaaaacagcctgcatagccaagacaatgctaagcagaaagaaaaaacctggaggcatcacgctacctgacttcaaactacattacaaggctacagtaacaaaaacagcatggtactggtatcaaaacagatatatagaccaacggaacagaagagaggcctcagaaataatgccacacatacacaatcatctgatctttgacaaacctgacaaaaacaagcaatgaggaaaggattccctatttaataaatggtgttgggaaaactggctagccatatgtagaaaactgaaactagatcccttccttacaccttatacaaaaattaactcaagatggattaaagacttaaacctaagacctaaaaccataaaaaccctagaagaaaacctagccaataccattcaggacattggcatgggcaaagacttcatgactgaaacaccgaaagcaatgacatcaaatggcaaaacggacaaatgggatctgattaaactaaagagcttttgcacagcaatagaaactatcatcagcgtgaacagccaacctacagaatgggagaaaatttttgcaatctatccatctgacaaagggctaatatccagaatctacaaagaacttaaacagatttacaagaaaaaaacaaccccatcaaaaagtgggcaaaggatatgaacagacacttctcaaaagaagacatttatgcaaccaacaaacatatgaaacagagctcatcatcactggtcattagagaaatgcaaatcaaaaccacaatgagataccatctcatgccagttagaatggcaatcattaaacagtcaggaacaacagatgctggagaggatgtggagaaataggaacgtttttacactgttggtgggagtgtaaattagttcaaccattgtggaagacagtgtggcgattcctcaaggatctagaactagaaataccatttgacccagcaatctcattactgggtatatacccaaaggactataaatcattatactataaagacacatgcaaacgttatgtttattgtggcactgttcacaatagcaaagacttggaaccaacccaaatgcccatcaatgataggctggataaagaaaatgtggcacatatacaccatggaatactatgcatccataaaaaaggatgagttcctgtcctttgcagggacatggatgatgctggaaaccaacattctcagcaaactaacacaagaacagaaaacccaaacttgcatgttctcactcataagtgggagttgaacaatgagaacacatgtacacagggatgggaacatcacacactagggcctgtcaggggttgggggcccaggggagggatagcattaggaaaaatatctaacgtagatgatgggttgaatgggtgcagcaaaccaccctggcacatgtatacctatgtaacaaacctgcacattctgcacatgtacttcagaacttaaagtataataataataataaaa

SEQ ID NO: 790 - DNA, 6030 bp, Homo sapiens
  source 1..6030: mol_type = other DNA
gggggaggagccaagatggccgaataggaacagctccggtctacagctcccagcgtgagcgacgcagaagacggtgatttctgcatttccatctgaggtaccgggttcatctcactagggagtgccagacagtgggcgcaggccagtgtgtgtgcgcaccgtgcgcgagccgaagcagggcgaggcattgcctcacctgggaagcgcaaggggtcagggagttccctttccgagtcaaagaaaggggtgatggatgcacctggaaaatcgggtcactcccacccgaatattgcgcttttcagaccggcttaagaaacggcgcaccacgagactatatcccacacctggctcggagggtcctacgcccacggaatctcgctgattgctagcacagcagtctgagatcaaactgcaaggcggcaacgaggctgggggaggggcacccgccattgcccaggcttgcttaggtaaacaaagcagccgggaagctcgaactgggtggagcccaccacagctcaaggaggcctgcctgcctctgtaggctccacctctgggggcagggcacagacaaacaaaaagacagcagtaacctctgcagacttaagtgtccctgtctgacagctttgaagagagcagtggttctcccagcacgcagctggagatctgagaacgggcagactgcctcctcaagtgggtccctgactcctgacccccgagcagcctaactgggaggcaccccccagcaggggcacactgacatctcacacggcagggtattccaacagacctgcagctgagggtcctgtctgttagaaggaaaactaacaaccagaaaggacatctacaccgaaaacccatctgtacatcaccatcatcaaagaccaaaagtagataaaaccacaaagatggggaaaaaacagaacagaaaaactggaaactctaaaacgcagagcgcctctcctcctccaaaggaacgcagttcctcaccagcaacagaacaaagctggatggagaatgattttgacgagctgagagaagaaggcttcagacgatcaaattactctgagctacgggaggacattcaaaccaaaggcaaagaagttgaaaactttgaaaaaaatttagaagaatgtataactagaataaccaatacagagaagtgcttaaaggagctgatggagctgaaaaccaaggctcgagaactacgtgaagaatgcagaagcctcaggagccgatgcgatcaactggaagaaagggtatcagcaatggaagatgaaatgaatgaaatgaagcgagaagggaagtttagagaaaaaagaataaaaagaaatgagcaaagcctccaagaaatatgggactatgtgaaaagaccaaatctacgtctgattggtgtacctgaaagtgatgtggagaatggaaccaagttggaaaacactctgcaggatattatccaggagaacttccccaatctagcaaggcaggccaacgttcagattcaggaaatacagagaacaccacaaagatactcctcgagaagagcaactccaagacacataattgtcagattcaccaaagttgaaatgaaggaaaaaatgttaagggcagccagagagaaaggtcgggttaccctcaaaggaaagcccatcagactaacagcggatctctcggcagaaaccctacaagccagaagagagtgggggccaatattcaacattcttaaagaaaagaattttcaacccagaatttcatatccagccaaactaagcttcataagtgaaggagaaataaaatactttatagacaagcaaatgttgagagattttgtcaccaccaggcctgccctaaaagagctcctgaaggaagcgctaaacatggaaaggaacaaccggtaccagccgctgcaaaatcatgccaaaatgtaaagaccatcgagactaggaagaaactgcatcaactaatgagcaaaatcaccagctaacatcataatgacaggatcaaattcacacataacaatattaactttaaatataaatggactaaattctgcaattaaaagacacagactggcaagttggataaagagtcaagacccatcagtgtgctgtattcaggaaatccatctcacgtgcagagacacacataggctcaaaataaaaggatggaggaagatctaccaagccaatggaaaacaaaaaaaggcaggggttgcaatcctagtctctgataaaacagactttaaaccaacaaagatcaaaagagacaaagaaggccattacataatggtaaagggatcaattcaacaagaggagctaactatcctaaatatttatgcacccaatacaggagcacccagattcataaagcaagtcctgagtgacctacaaagagacttagactcccacacattaataatgggagactttaacaccccactgtcaacattagacagatcaacgagacagaaagtcaacaaggatacccaggaattgaactcagctctgcaccaagcagacctaatagacatctacagaactctccaccccaaatcaacagaatatacatttttttcagcaccacaccacacctattccaaaattgaccacatagttggaagtaaagctctcctcagcaaatgtaaaagaacagaaattataacaaactatctctcagaccacagtgcaatcaaactagaactcaggattaagaatctcactcaaagccgctcaactacatggaaactgaacaacctgctcctgaatgactactgggtacataacgaaatgaaggcagaaataaagatgttctttgaaaccaacgagaacaaagacaccacataccagaatctctgggacgcattcaaagcagtgtgtagagggaaatttatagcactaaatgcctacaagagaaagcaggaaagatccaaaattgacaccctaacatcacaattaaaagaactagaaaagcaagagcaaacacattcaaaagctagcagaaggcaagaaataactaaaatcagagcagaactgaaggaaatagagacacaaaaaacccttcaaaaaatcaatgaatccaggagctggttttttgaaaggatcaacaaaattgatagaccgctagcaagactaataaagaaaaaaagagagaagaatcaaatagacacaataaaaaatgataaaggggatatcaccaccgatcccacagaaatacaaactaccatcagagaatactacaaacacctctacgcaaataaactagaaaatctagaagaaatggatacattcctcgacacatacactctcccaagactaaaccgggaagaagttgaatctctgaatagaccaataacaggctctgaaattgtggcaataatcaatagtttaccaaccaaaaagagtccaggaccagatggattcacagccgaattctaccagaggtacatggaggaactggtaccattccttctgaaactattccaatcaatagaaaaagagggaatcctccctatctcattttatgaggccagcatcattctgataccaaagccgggcagagacacaacaaaaaaagagaattttagaccaatatccttgatgaacattgatgcaaaaatcctcaataaaatactggcaaaccgaatccagcagcacatcaaaaagcttatccaccatgatcaagtgggcttcatccctgggatgcaaggctggttcaatatacgcaaatcaataaatgtaatccagcatataaacagagccaaagacaaaaaccacatgattatctcaatagatgcagaaaaagcctttgacaaaattcaacaacccttcatgctaaaaactctcaataaattaggtattgatgggacgtatttcaaaataataagagctatctatgacaaacccacagccaatatcatactgaatgggcaaaaactggaagcattccctttgaaaaccggcacaagacagggatgccctctctcaccactcctattcaacatagtgttggaagttctggccagggcaatcaggcaggagaaggaaataaagggtattcaattaggaaaagaggaagtcaaattgtccctgtttgcagacgacatgattgtttatctagaaaaccccatcgtctcagcccaaaatctccttaagctgataagcaacttcagcaaagtctcaggatacaaaatcaatgtacaaaaatcacaagcattcttatacaccaacaacagacaaacagagagccaaatcatgggtgaactcccattcacaattgcttcaaagagaataaaatacctaggaatccaacttacaagggatgtgaagcacctcttcaaggagaactacaaaccactgctcaaggaaataaaagaggacacaaacaaatggaagaacattccatgctcatgggtaggaagaatcaatatcgtgaaaatggccatactgcccaaggtaatttacagattcaatgccatccccatcaagctaccaatgactttcttcacagaattggaaaaaactactttaaagttcatatggaaccaaaaaagagcccgcattgccaagtcaatcctaagccaaaagaacaaagctggaggcatcacactacctgacttcaaactatactacaaggctacagtaaccaaaacagcatggtactggtaccaaaacagagatatagatcaatggaacagaacagagccctcagaaataatgccgcatatctacaactatctgatctttgacaaacctgagaaaaacaagcaatggggaaaggattccctatttaataaacggtgctgggaaaactggctagccatatgtagaaagctgaaactggatcctttccttacaccttacacaaaaatcaattcaagatggattaaagatttaaacgttaaacctaaaaccataaaaaccctagaagaaaacctaggcattaccattcaggacataggcgtgggcaaggacttcatgtccaaaacaccaaaagcaatggcaacaaaagccaaaattgacaaatgggatctaattaaactaaagagcttctgcacagcaaaagaaactaccatcagagtgaacaggcaacctacaacatgggagaaaattttcgcaacctactcatctgacaaagggctaatatccagaatctacaatgaactcaaacaaatttacaagaaaaaaacaaacaaccccatcaaaaagtgggcgaaggacatgaacagacacttctcaaaagaagacatttatgcagccaaaaaacacatgaagaaatgctcatcatcactggccatcagagaaatgcaaatcaaaaccactatgagatatcatctcacaccagttagaatggcaatcattaaaaagtcaggaaacaacaggtgctggagaggatgtggagaaataggaacacttttacactgttggtgggactgtaaactagttcaaccattgtggaagtcagtgtggcgattcctcagggatctagaactagaaataccatttgacccagccatcccattactgggtatatacccaaatgagtataaatcatgctgctataaagacacatgcacacgtatgtttattgcggcactattcacaatagcaaagacttggaaccaacccaaatgtccaacaatgatagactggattaagaaaatgtggcacatatacaccatggaatactatgcagccataaaaaatgatgagttcatatcctttgtagggacatggatgaaattggaaaccatcattctcagtaaactatcgcaagaacaaaaaaccaaacaccgcatattctcactcataggtgggaattgaacaatgagatcacatggacacaggaaggggaatatcacactctggggactgtggtggggtcgggggaggggggagggatagcattgggagatatacctaatgctagatgacacattagtgggtgcagcgcaccagcatggcacatgtatacatatgtaactaacctgcacaatgtgcacatgtaccctaaaacttagagtataataaaaaaaaaaaa

SEQ ID NO: 791 - DNA, 1012 bp, Homo sapiens
  source 1..1012: mol_type = other DNA
tagtatacaaaatgtacataaagctcaaatgactcaatagcaagaaaaccaaaaatccaatttaaaaatggtcaagatatctgaataaaaatttctcaaaagaagacatacaaatgtccagcagacatatgaaaaaatgttcaacatcgctaatcattagagaaatgcaaattaaagaccacaatgagatatcatcttacacttatcagaatggctattatcaaaaagacaaaagttaacaaatattgacaaggatgtggagaaaagggaatccttgtatactgttggtgcgaatatatattagtatatcgattatgaaaaactgtatggaagttcctcaaaaaactaaaaatagaattagcatatgacccagcaatcccacttctgggtgtttacctaaaagatttgaaatcagtttgttgaagaaatgtctgcattccatgtttattgcagcactattcaccatcgctaagttatggaatcaacctaagtgcccatcaatggatgaatggataaacaaaatgtggtaaatatacacagtgaaattctattcagcccttaaaaagaaggattctgtcatttgtagcagcatgtgtgaaaatggagaacattatgctaagtgaaataaataaggcaaacaaagacaaatatcacgttctcacttatatgtgaaatctacaataacctaactcatagaagcagagagtaggatggtggttaaagcagttcaggcagtaaggaatggggaaatgataaccaaagggtataaaatctcaggagaaatatgctttttttagttctattgcacagcatgatgattatagtcaataatagagtactgcacatcttaaaattgctaagagagtaacattcaaatgttctcaccacaaaaaaaggtatttgaggtattgaatatgttgttaactaacttgatttaattattccacattgtattcatggatcatacatcactttatactccataaatttatacaattataaattatcaatt

SEQ ID NO: 792 - DNA, 6029 bp, Homo sapiens
  source 1..6029: mol_type = other DNA
gggggaggagccaagatggccgaataggaacagctccggtctacagctcccagcgtgagcgacgcagaagacggtgatttctgcatttccatctgaggtaccgggttcatctcactagggagtgccagacagtgggcgcaggccagtgtgtgtgcgcaccgtgcgcgagccgaagcagggcgaggcattgcctcacctgggaagcgcaaggggtcagggagttccctttccgagtcaaagaaaggggtgacggacgcacctggaaaatcgggtcactcccacccgaatattgcgcttttcagaccggcttaagaaacggcgcaccacgagactatatcccacacctggctcggagggtcctacgcccacggaatctcgctgattgctagcacagcagtctgagatcaaactgcaaggcggcagcgaggctgggggaggggcgcccgccattgcccaggcttgcttaggtaaacaaagcagccgggaagctcgaactgggtggagcccaccacagctcaaggaggcctgcctgcctctgtaggctccacctctgggggcagggcacagacaaacaaaaagacagcagtaacctctgcagacttaagtgtccctgtctgacagctttgaagagagcagtggttctcccaggacgcagctggagatctgagaacgggcagactgcctcctcaagtgggtccctgactcctgacccccgagcagcctaactgggaggcacccccagcaggggcacactgacacctcacacggcagggtattccaacagacctgcagctgagggtcctgtctgttagaaggaaaactaacaacaagaaaggacatctacaccgaaaacccatctgtacatcaccatcatcaaagaccaaaagtagataaaaccacaaagatggggaaaaaacagaacagaaaaactggaaactctaaaacgcagagcgcctctcctcctccaaaggaacgcagttcctcaccagcaacagaacaaagctggatggagaatgattttgacgagctgagagaagaaggcttcagacgatcaaattactctgagctacgggaggacattcaaaccaaaggcaaagaagttgaaaactttgaaaaaaatttagaagaatgtataactagaataaccaatacagagaagtgcttaaaggagctgatggagctgaaaaccaaggctcgagaactacgtgaagaatgcagaagcctcaggagccgatgcgatcaactggaagaaagggtatcagcaatggaagatgaaatgaatgaaatgaagcgagaagagaagtttagagaaaaaagaataaaaagaaatgagcaaaacctccaagaaatatgggactatgtgaaaagaccaaatctacgtctgattggtgtacctgaaagtgatgtggagaatggaaccaagttggaaaacactctgcaggatattatccaggagaacttccccaatctagcaaggcaggccaacgttcagattcaggaaatacagagaacgccacaaagatactcctcgagaagagcaactccaagacacataattgtcagattcaccaaacttgaaatgaaggaaaaaatgttaagggcagccagagagaaaggtcgggttaccctcaaaggaaagcccatcagactaacagcggatctctcggcagaaaccctacaagccagaagagagtgggggccaatattcaacattcttaaagaaaagaattttcaacccagaatttcatatccagccaaactaagcttcataagtgaaggagaaataaaatactttatagacaagcaaatgttgagagattttgtcaccaccagacctgccctaaaagagctcctgaaggaagcgctaaacatggaaaggaacaaccggtaccagccgctgcaaaatcatgccaaaatgtaaagaccatcgagactaggaagaaactgcatcaactaatgagcaaaatcaccagctaacatcataatgacaggatcaaattcacacataacaatattaactttaaatataaatggactaaattctgcaattaaaagacacagactggcaagttggataaagagtcaagacccatcagtgtgctgtattcaggaaacccatctcacgtgcagagacacacataggctcaaaataaaaggatggaggaagatctaccaagccaatggaaaacaaaaaaaggcaggggttgcaatcctagtctctgataaaacagactttaaaccaacaaagatcaaaagagacaaagaaggccattacataatggtaaagggatcaattcaacaagaggagctaactatcctaaatatttatgcacccaatacaggagcacccagattcataaagcaagtcctcagtgacctacaaagagacttagactcccacacattaataatgggagactttaacaccccactgtcaacattagacagatcaacgagacagaaagtcaacaaggatacccaggaattgaactcagctctgcaccaagcagacctaatagacatctacagaactctccaccccaaatcaacagaatatacatttttttcagcaccacaccacacctattccaaaattgaccacatagttggaagtaaagctctcctcagcaaatgtaaaagaacagaaattataacaaactatctctcagaccacagtgcaatcaaactagaactcaggattaagaatctcactcaaagctgctcaactacatggaaactgaacaacctgctcctgaatgactactgggtacataacgaaatgaaggcagaaataaagatgttctttgaaaccaacgagaacaaagacaccacataccagaatctctgggacgcattcaaagcagtgtgtagagggaaatttatagcactaaatgcctacaagagaaagcaggaaagatccaaaattgacaccctaacatcacaattaaaagaactagaaaagcaagagcaaacacattcaaaagctagcagaaggcaagaaataactaaaatcagagcagaactgaaggaaatagagacacaaaaaacccttcaaaaaatcaatgaatccaggagctggttttttgaaaggatcaacaaaattgatagaccgctagcaagactaataaagaaaaagagagagaagaatcaaatagacacaataaaaaatgataaaggggatatcaccaccgatcccacagaaatacaaactaccatcagagaatactacaaacacctctacgcaaataaactagaaaatctagaagaaatggatacattcctcgacacatacactctcccaagactaaaccaggaagaagttgaatctctgaatagaccaataacaggctctgaaattgtggcaataatcaatagtttaccaaccaaaaagagtccaggaccagatggattcacagccgaattctaccagaggtacatggaggaactggtaccattccttctgaaactattccaatcaatagaaaaagagggaatcctccctaactcattttatgaggccagcatcattctgataccaaagccgggcagagacacaaccaaaaaagagaattttagaccaatatccttgatgaacattgatgcaaaaatcctcaataaaatactggcaaaccgaatccagcagcacatcaaaaagcttatccaccatgatcaagtgggcttcatccctgggatgcaaggctggttcaatatacgcaaatcaataaatgtaatccagcatataaacagagccaaagacaaaaaccacatgattatctcaatagatgcagaaaaagcctttgacaaaattcaacaacccttcatgctaaaaactctcaataaattaggtattgatgggacgtatttcaaaataataagagctatgtatgacaaacccacagccaatatcatactgaatgggcaaaaactggaagcattccctttgaaaaccggcacaagacagggatgccctctctcaccgctcctattcaacatagtgttggaagttctggccagggcaatcaggcaggagaaggaaataaagggtattcaattaggaaaagaggaagtcaaattgtccctgtttgcagacgacatgattgtttatctagaaaaccccatcgtctcagcccaaaatctccttaagctgataagcaacttcagcaaagtctcaggatacaaaatcaatgtacaaaaatcacaagcattcttatacaccaacaacagacaaacagagagccagatcatgggtgaactcccattcacaattgcttcaaagagaataaaatacctaggaatccaacttacaagggatgtgaaggacctcttcaaggagaactacaaaccactgctcaaggaaataaaagaggagacaaacaaatggaagaacattccatgctcatgggtaggaagaatcaatatcgtgaaaatggccatactgcccaaggtaatttacagattcaatgccatccccatcaagctaccaatgactttcttcacagaactggaaaaaactactttaaagttcatatggaaccaaaaaagagcccgcattgccaagtcaatcctaagccaaaagaacaaagctggaggcatcacgctacctgacttcaaactatactacaaggctacagtaaccaaaacagcatggtactggtaccaaaacagagatgtagatcaatggaacagaacagagccctcagaaataatgccgcatatctacaactatctgatctttgacaaacctgagaaaaacaagcaatggggaaaggattccctatttaataaatggtgctgggaaaactggctagccatatgtagaaagctgaaactggatcccttccttacaccttatacaaaaatcaattcaagatggattaaagatttaaacgttaaacctaaaaccataaaaaccctagaagaaaacctaggcattaccattcaggacataggcgtgggcaaggacttcatgtccaaaacaccaaaagcaatggcaacaaaagacaaaattgacaaatgggatctaattaaactaaagagcttctgcacagcaaaagaaactaccatcagagtgaacaggcaacctacaacatgggagaaaatttttgcaacctactcatctgacaaagggctaatatccagaatctacaatgaactcaaacaaatttacaagaaaaaaacaaacaaccccatcaaaaagtgggcgaaggacatgaacagacacttctcaaaagaagacatttatgcagccaaaaaacacatgaagaaatgctcatcatcactggccatcagagaaatgcaaatcaaaaccactatgagatatcatctcacaccagttagaatggcaatcattaaaaagtcaggaaacaacaggtgctggagaggatgcggagaaataggaacacttttacactgttggtgggactgtaaactagttcaaccattgtggaagtcagtgtggcgattcctcagggatctagaactagaaataccatttgacccagccatcccattactgggtatatacccaaatgagtataaatcatgctgctataaagacacatgcacacgtatgtttattgcggcactattcacaatagcaaagacttggaaccaacccaaatgtccaacaatgatagactggattaagaaaatgtggcacatatacaccatggaatactatgcagccataaaaaatgatgagttcatatcctttgtagggacatggatgaaattggaaaccatcattctcagtaaactatcgcaagaacaaaaaaccaaacaccgcatattctcactcataggtgggaattgaacaatgagatcacatggacacaggaaggggaatatcacactctggggactgtggtggggtcgggggaggggggagggatagcattgggagatatacctaatgctagatgacacattagtgggtgcagcgcaccagcatggcacatgtatacatatgtaactaacctgcacaatgtgcacatgtaccctaaaacttagagtataataaaaaaaaaaaa

SEQ ID NO: 793 - DNA, 921 bp, Homo sapiens
  source 1..921: mol_type = other DNA
aggaatgctcaaactgtgggccatagacctatgggggtctctgagatacttttaaaggatccataatgttaaactatttaaataatattctaatacattgtttgcctttttcattctattgatatttgtagtgatgctacaaagcaatagtgggtaaaggtgccttagacaattgaaagcagtggtacaaaactgttctattcttcatctccacatattcattgtttaaaaattacaaactagtttcacttaagaatgtggatgcagcaaaagttattaattttataaaatctcaacctttgagattttagtatcttaatattttgtgtgacaaaatgggaaatatacgtagagtacttctgcttcatatgaaagtacacttattgtctcaagagtaaaacacttgtgcccttgttcagttgacaaactgaaccagccatttttttaatgcaataccatattttcttggaagaacaactgacatgtcaactatggttattcagatgtgggcatttggcagacattttatgaaaaatgaaattagcctgtcacagccactactacaggttttgcaactttccaatattcaaggacttttttgataatattggtggtgatgttgaagatgtgttttctatataggcgttatataatgaaacttgtcaacatttcaaaaattagtatgactgggaggaccaatattttacacatgtccaatataggatgttacaaaactgtgcatggtaaaacagatattcaaagtgcaagctacaggagtggtttaaaatgtaacagtatggaaagcccattgctatggtttcagaatccatgttgtaactgcacttttggcaactgacactagtcaaaatttggtatgctgtcaaagaagactatccacagttatctgagaaagctatgaaa

SEQ ID NO: 794 - DNA, 258 bp, Homo sapiens
  source 1..258: mol_type = other DNA
tattgtacagtctttactctcggttttcaccagagaactcaagggctgtgaaaagagcaggacctcaccagctgcacggcggtggtgactggctccatcttgctgtccctcccaatcacacaacatctccccttgaaggctctgcccaggcccggactcccacctttcaagatgtctggatcagtgcaggacctcctccttggccacatcgctctccttggactggttcgttaaccctgttttacccacattttcttt

SEQ ID NO: 795 - DNA, 1122 bp, Homo sapiens
  source 1..1122: mol_type = other DNA
acatgctattatttctaccattagagaaaaataaaacaaaaccaaaaactcctctcttgacttcttccacatttctccccttccattgcctgctaaacttttgggaagagttttctatagtcactatctattttctctcctgtcctttgctcctgaactcagtttaaaaagggttctgctcccaccattccaaaacaaaaaaaaataccttatcagtctcaccagtgcctttgacgttggtacatccaatattcagtgttcttggtcctcactttatggacctaccaagagctttcaattgttatcattgtgtcattctggagatgctttgttcacctgacttccgggatgccatacttgtctggctttcctgccatctcactagccacatacattgtactccactgtcttcctcaatctctttttctagttccttctcatccccccaacttctaaacattgtagtcctgagagttcttccttgggctacttctgttttgcatctacactatttgcatgactatctcatccctgtattctctacattgataactcccaaatttgtctttctagaccagaagttgtacctgaaccccagtgtcatatattcaactatccatttagatatgtaacacagttctcaaacttgacatgttcaaacttgatctcctgatcttcctcccatcccaactcctacttccactgtcttctttatcccaataaataacaactgcactcagttgtttaggacaaaaaccttggagccacttttaattcttccatctctcttacagcctacacataatcttccattgcaaatgtcagtattgctcctgggttacattttttcatgatctccatccactgctaccacctatccacacttgcatcatgtcttcttgggttatttcactggcttcccagctggtctccctacttcaccatacaaatcagccagggtgattttgttcaaatgtaagtcagattatgtcactctccaatttcttgtttaactcagaataaaagccaaaatctctactcatgaagtgtccatcaagccccaaatgctctggcctcctattatttctctttttatttttttaaaaaattactttattatta

SEQ ID NO: 796 - DNA, 1590 bp, Homo sapiens
  source 1..1590: mol_type = other DNA
aatcaatgttattaaaatggccatactgcccaaagcaatttatagattcaatgctattcttatcaaattacccatgacattcttcatagaactagaaagaaactattttaaaattcatatggaaccaaaaagaagcagaatagccaaggcaatcctaaacaaaaaaaaacagagctggaggtatcatgctacctgacttcaaactatattacagggctacagtaaccaaaacagcataagactcgtacaaaaccagacacaaagaccaataaaacagaatagagagctcaaaaataaggccacacatcttcaaccatctgatcttcaacaaagctgacaaaaacaaacaatgaggaaaggactccctgtttaataaatggtgctgggataactggctagctatatgcagaagattaaaactggatcacttccttacagcatataaaatggtgtaaatcaactcaaagtggattaaagaatgaaatgtaaaacccaaaattataaaaaccctggaagatgatctaggcaaaaccattctggacatgggaactagcaaagatttcatgatgaagacaccaaaaacaaatgcaacaaatgggatctaattaaactaagggggttttgcacagcaaaagaaactatgaacagagtaaacaatctacagaatgggagaaaatatttgcaaactatgcatctgacaaaagtctaatatctagcttctataaaaacttaaatttacaagaaaaaacaaacaaccccattaaaagctgggcaaaggacatgaacagacacttttcaattgaagacatacatgcagtcaacaagcatatgaaaacaaattcaacatcactgataattaaagaaatgcaaatcaaaaccacaatgagataccgtctcacactagtcagaatggatattactaaaaggtcaaaacataacagatgctggtgaggttgtggagaaaaacgaatgcttatacactgttggtgggagtaaaaatcagttcaaccattgtggaaagcagtgtggcaattcctcaaagagctaaaaacagaactactcttcaacccagcaatccattactgggtaatatacccaaaggaatataaaatgttctatcataaggacacatacacatgcacatgctgttgtaaagagtgctcattggagcgctattgtaaatagcagagacatggactcaacctaaatgcctataaatgatagactgtataaagaacatgtggtacaccatggaatactatgaagccataaaaaagaatgagatcatgtcttttgcaggaacatggatagagctagaagccattatccttagcaaattaatgcaggaacagaaaaccaaatactgcatgctctcccttataagcaggagctaaatgatgaggacacatagacacatagaggggaacaacacacactggggccttcctgagggagaagggagaggagcacaaaaaatgactattgggtagtaggcttaataccctggtgatgaaataatctgcacatccacccctcgtgacacaagtttacctatagaacaaacctgcacatgtacccctgaacctaaaa

SEQ ID NO: 797 - DNA, 6021 bp, Homo sapiens
  source 1..6021: mol_type = other DNA
gggggaggagccaagatggccgaataggaacagctccggtctacagctcccagcgtgagcgacgcagaagatgggtgatttctgcatttccatctgaggtaccgggttcatctcactagggagtgccagacagtgggcgcaggttagtgggtgcgcgcaccgtgcacgagccgaagcagggcgaggcattgcctcgctcgggaagcacaaggggtcagggagttccctttcctagtcaaagaaaggggtgacagacagcacctggaaaatcgggtcactcccacccaaatatgcgcttttccgacaggcttaaaaaatggcgcaccaggagattatatcccgcacctggctcggagggtcctatgcccacggagtctcactgattgctagcacagcagactgagatcaaactgcaaggtggcaccgaggctgggggaggggcgcccgccattgcccaggcttgcttaggtaaacaaagcaatctggaagctcaaactgggtggagcccaccacagctcaaggaggcctgcctgcctctgtaggctccacctctgggggaagggcacagacaaacaaaaagacagcagtaacctctgcagacttaaatgtccctgtctgacagctttgaagagagcagtggttctcccagcacacagctggagatctgagaacgggcagactgcctcctcaagtgggtccctgacccctgactcccgagcagcctaactgggaggcatcccccagcaggggcagactgacacctcacacggccgggtactccaacagacctgcagccgagagtcctgtctgttcgaaggaaaactaacaaacagaaaggacatccacaccaaaaacccatctgtacatcaccatcatcaaagaccaaaagtagataaagccacaaagatggggaaaaaacagagcagaaaaactggaaactctaaaaagcagagcgcctctcctcttccaaaggaacgcagttcctcaccagcaacagaacaaagctggatggagaatgactttgacgagctgagagaagaaggcttcagacaatcaaattactccgagctatgggaggacattcaaaccaaaggcaaagaagttgaaaactttgaaaaaaatttagaagaatgtataactagaataaccaatacagagaagtgcttaaaggagctgatggagctgaaaaccaaggctcgagaactacgtgaagaatgcagaagcctcaggagccgatgcgattaactggaagaaagggtatcagcgatagaagatgaaatgaatgaaatgaagcgagaagggaagtttagagaaaaaagaataaaaagaaacaaagcctccaagaaatatgggaccatgtgaaaagaccaaatctacgtctgattggtgtacctgaaagtgacggggagaactgaaccaagttggaaaacactctgcaggatattatccaggagaacttccccaatctagcaaggcaggccaacgttcagattcaggaaatacagagaatgccacaaagatactcctcgagaagagcaactccaagacacataattgtcagattcaccaaagttgaaatgaaggaaaaaatgttaagggcagccagagagaaaggttgggttaccctcaaagggaagcccatcagactaacagcggatctctcagcagaaactctacaagccagaagagagtgggggccaatattcaacattcttaaagaaaagaattttcaaaacagaatttcatatccagccaaactaagcttcataagtgaaggagaaataaaatactttacagacaagcaaatgctgagagattttgtcaccaccaggcctgcactaaaagagctcctgaaggaagtgctaaacatggaaaggaacaattggtaccagccgctgcaaaatcatgccaaaatgtaaagaccatcgagactaggaagaaactgcatcaactaacgagcaaaataaccagctaacatcatcatgacaggatcaaattcacacatagcaatattaactttaaatgtaaatggactaaattctccaattaaaagacacagactggcaaattggataaagagtcaagacccatcagtgtgctgtattcaggaaacccatctcacgtgcagagacacacataggctcaaaataaaaggatggaggaagatctaccaagccaatggaaaacaaaaaaaggcaggggttgcaatcctagtctctgataaaacagactttaaaccaacaaagatcaaaagagacaaagaaggccattacataatggtaaagggatcaattcaacaagaagagctaactatcctaaatatatatgcacccaatacaggagcacccagattcataaagcaagtcctgagtgacctacaaagagacttagactcccacccattaataataggggactttaacactccactgtcaagattagacagatcaacgagacagaaagtcaacaaggatacccaggaattgaactcagctctgcaccaagcagacctaatagacatctacagaactctccaccccaaatcaacagaatatacatttttttcagcaccacaccacccctattccaaaattgaccacatacttggaagtaaagctctcctcagcaaatgtaaaagaacagatattataacaaactatctctcagaccacagtgcaatcaaactagaactcaggattaagaatctcactcaaaaccgctcaactacatggaaactgaacaacctgctcctgaatgactactgggtacataacgaaatgaaggcagaaataaagatgttctttgaaaccaccgagaacaaagacacaacataccagaatctctgggacgcattcaaagcagtgtgtagagggaaatttatagcactaaatgcccacaagagacagcaggaaagatccaaaattgacaccctaacatcacaattaaaagaacttgaaaagcaagagcaaacacattcaaaagctagcagaaggcaagaaataactaaaatcagagcagaactgaaggaaatagagatacaaaaaacccttcaaaaaagtaatgaatccaggagctggttttttgaaaggatgaacaaaattgataaaccgctagcaagatgaataaagaaaaaaagagagaagaatcaaatagatgcaataaaaaatgataaaggggatatcaccaccgatcacacagaaatacaaactaccatcagagattactacaaacacctctacacaaataaactagaaaatctagaagaaatggataaattcctcaacacatacactctcccaagactaaaccaggaagaagttgaatctctgaatagaccaataacaggagctgaaattgtggcaataatcaatagcttaccaaccaaaaagagtgcaggaccagatggattcacagccaaattctaccagaggtacaaggaggaactggtaccattccttctgaaactattccaatcaatagaaaaagagggaatcctccctaactcattttatgaggccagcatcatcctgataccaaagccaggcagagacacaaccaaaaaagagaattttaggccaatatccttgatgaacattgatgcaaaaatcctcaataaaatactggcaaaccgaatccagcagcacatcaaaaagcttatccaccatgatcaagtgggcttcatccctgggatgcaaggctggttcaatatatgcaaatcaataaatgtaatccaccatataaacagaaccaaagacaaaaaccacatgattatctcaatagatgcagaaaaggcctttgacaaaattcaacaaccttcatgctaaaaactctcaataaattaggtattgatgggatgtatctgaaaataataagagctatctatgacaaacccacagccaatatcatactgaatgggccaaaactggaagcattccctttgaaaactggcacaagacagggatgccctctctcaccactcctattcaacatagtgttggaagttctggccagggcaattaggcaggagaaggaaataaaggctattcaattaggaaaagaggaaatcaaattgtccctgtttgcagacgacatgattgtatatctagaaaaccccattgtctcagcccaaactctccttaagctgataagcaacttcagcaaagtctcaggatacaaagtcaatgtacaaaaatcacaagcattcttatacaccaacaacagacaaacagagagccaaatcatgagtgaactcccattcacaattgcttcaaagagaataaaatacctaggaatccaacttacaagggatgtgaaggacctcttcaaggagaactacaaaccactgctcaaggaaataaaagaggatacaaacaaatggaagaacattccatgctcatgggtaggaagaatcaatatcgtgaaaatggccatactgcccaaggtaatttacagattcaatgccatccccatcaagctaccaatgactttcttcacagaattggaaacactactttaaagttcatatggaaccaaaaaagagccctcatcgccacgtcaatcctaagccaaaagaacaaagctggaggcatgacactacctgacttcaaactatactacaaggctacagtaaccaaaacagcatggtactggtaccaaaacagagatatagaccaatggaacagaacagagccctcagaaataacgctctgtatctacaactatctgatctttgacaagcctgagaaaaacaagcaatggggaaaggattccctattttataaatggtgctgggaaaactggctagccatatgtagacagctgagattggatcccttccttacaccttatacaaaaatcaattcaagatggattaaagacttaaactttagacctaaaaccataaaaaccctagaagaaaacctaggcattaccattcaggacataggcatgggcaaggacttcatgtctaaaacactaaaagcaatggcaacaaaagccaaaattgacaaatgggatctaattaaactaaagagcttctgcacagcaaaagaaaccatcatcagagtgaacaggcaacctacaaaatgggagaaaatttttgcaacctactcatctgacaaagggttaatatccagaatctacaatgaactcaaacaaatttacaagaaaaaaacaaacaaccccatcaaaaagtgggccaaggacatgaacacacacttctcaaaagaagacatttatgcagccaaaaaacacatgaaaaaatgctcaccatcactggccatcagagaaatgcaaatcaaaaccacaatgagataccatctcacaccacttagaatggcaatcattaaaaagtcaggaaacaacaggtgctggagaggatgtggagaaataggaacacttttacactgttggtgggactgtaaactagttcaaccattgtggaagtcagtgtggcgattcctcagggatctagaactagaaataccatttgacccagccatcccattactgggtataatacccaaaggactataaatcatgttgctataaagacacatgcacacatatgtttattgcggcactattcacaatagcaaagacttggaaccaacccaaatgtccaacaatgatagactggattaagaaaatgtggcacatatacaccatggaatactatgcagccataaataatgatgagttcatgtcctttgtagggacatggatgaaattggaaatcatcattctcagtaaactatcgcaagaacaaaaaaccaaacaccgcatattctcactcataggtcggaattgaacaatgagaacacatggacacaggaaagggaacatcacactctggggactgttgtggggtggggggaggggggagggatagcattgggagatatacctaatgctagatgaagagttagtgggtgcagcacaccagcatgtcacatgtatacatatgtaactaacctgcacattgtgcacatgtaccctaaaacttaaagtataataataata

SEQ ID NO: 798 - DNA, 5170 bp, Homo sapiens
  source 1..5170: mol_type = other DNA
aaatgaatggattgcaagaaaacaaggtccaagggaaagttaaaacccaatacaaagaaaccagataaatgactcaggatatgaaaaatgagacaactatattaagaaaaaacaaataaaacttatggaattcaaaaacccactaaagaattttttaaaaacagttagaagctttaacaatagactagaccaggcagaaggaagggatttcagagcttgaagaccagtctttggaaaaatttttaaaaaaggaattttaaaaaagcctcaagaaatatgggattatgtaaactgttgaacctacaacttattggcattcttgagagagaagaaaaagcaagaaacttggaaaacattttatagaataattcaggacaatttccctaatcttgctagagaagtagacaaccaggtataagaaattcagagaacatatatgagataccacacaagatgaccatccccaaggaatacagttatcagactatccaagaaaaggtgaaagaaaaaatattaaaagtttatagagaaaagaaaggagccaaattacctataaagaaaatcccatcagactaacagtaaacttttcagcagaaatcttataagacaagtagattggagcctatttttagcctacctaaagaaaacatatgccagccaagaatgtcatattctgccaaagtaagcttcataaatgaagaagaaataaaggctttcctagacaagcaaacactaagggaattaattaccaccagactggccctataagaaatgcacaaaggagttctaaacattgaaacaagagagtaatacttgctacataaaagcacacataagtacgaagctcacagatcctataaagcaattacacaattgaaactgcaaagcaactagctaacaacatgacaggaataaaaccttacatttcaatattaatcatgaatataaacagactaaatgctccacttaaaagacatagaatggcaaattgccttgaaaaaataagacccaaacttatgctgccttcaataacacccacaggctcaaagtaaagggatggagaaagatctatcatgtaaatggaaaacaaaaaagggtgaggttgctattcttgtatcagattaaatagagtttaagccaaaattaaataaactttaccaaagcagtgaaaaaaagacaaaggagggcattatatagtgataaagagtttgatttgacaagatttagctatgctaaatgtatattcacccaaagtcagagcacttagatttataaaacaactactactagacttactaaaagggatagatggtcatacaatagacagcctgtcaatagagatagtcatgcaattatagtaaggaactttaataccccacttacagcactagacaaatcactgaggcggaaaactaacaaagaaactttgaatgtaaattagactcttgacaaaatgaacctaataaacatctacagaagacttcacccagcaaccacagaataaactttttttcacatctgtgcataaaacattctctacaattgatcacgtgctctgttataaagcaagtctcaataaattaaaaaaagaacctgaaatcatgtcaagcatgtccttggaccacagtagaataaaattaaaaatcaattccaagaggaaacctcaaaaaccacacagtacatgggaacaaaacaacttgctcctgaatgacttttgggtaagcaaaaaaattaaccagaaaccaaaaaatttttgaaacaaatgaaaatagagataaaacatatgcaaacctctgggatccagaaaaaagcagcattaacaggaaagtttatcatgctaaatgcctacataaaaagttagaaatatctcaaattaatagcactaacatcatacctaaaggaattagaaaaacaagaacaaaccaaatccaaggccagtagaagaaaatacataatgaagattagagcagaaccaaatgaaattgagaccgaaaaagccatacaaaagattaatgaaacaaaaagttgcctcttcaaaaggataaataaaattgactgatagccagattagctaagaaaaaaagagaaaagagtcagataagtataatcagaagtgacaaaggtgacaatacaactgataccagagaaatataaaagatcttcagaaactactaatgacatctatgcacaaaacctagaaaatctagaggaaatggataaattactgaaaacactcaattccctactatgaacatctgtgcacataaactagaaaatttagaggaagtggataaattcctgaaaacattcagctccctactgtgaacaactgtgcacataaactagacaatttagaggaagtggataaattcctgaaaacactcaactcccaagcttgaaccaaagaaataaaaatcctgaacagactaataatgagttatgaaaatgaatcaataataaatctaccaaccaaaaccagcagtgaaccaaacagattcatagctgaattctattagatgttcaaagaagaactggtaccaatcttactgaaactattccaaaaaaccaaggaggaggaattcctacctaacttattctacaaaaccagtatgatgttgataccaaaatctggccaggacacaacaaaaaaagaacattacaggccaatatctctgactagcacagatgcaaaatcctcaacaaaatattaccaaaccaaatccaacagtatgtcaaaaagataattcatcatgatcaagtgggtcttattcctggaatgcaaggattgttcaacacatgcaaaacaataaatgtggttagccacataagcagaatcaaaagcaaaaaccatacgatcatttcaatagattcagaaaaagcatttgataaaattcaacatctcttcatgatgaaatcccaaacaaactaggcattgaatgaacatacctcaaaataacaagagccatttatgacaaacccacaaccaacatcatacagaatggacaaaagttgaaagaattcctcctaagagctagaaaaagacaaggatgtccactcttactactcctatttcacaaagtactggtagtcctagccagagcaatcagatgagagaaagaaatacaaggcatccaaataggaaaagaggaagtaaaattatctctgtttgctgacaacatgattctatacctaggaattcctagagattccttcaaaagacttctagacctgataaacaaattcagtaaagttttgggatacgaaatcagtgaacaaaaattagtgggatttctatacaccaataattttcaaatcaagaacaaaatcaagaacccaatttcatttacaatagcctcacacacaaaatacaatacttaggaatatatttaaccaaggaggtgaaagacctttacacagaaaaccacagaacattgatgaaagaaattacagatgacacaaacaaatggaaaatcattccatgctcatggatagaaaggatcaatattgttaaaatgaccataatgcccaaagctgtctatagattcaatgcaattattatcaaattaccagtgtgttttttcacagaattagaaaaaaaaatcccaaagttcttatggaaccaaaaagagcctgaatagccaacgcaattctaatcaagcagagaaacaaacaaacaaacaacccccaccccccaaaaaagcaaaagcaaaagcaaagccaaaaacaaaccaaaaacaaccacaaaaaaaaccaaagctggagccatctctttaccagaccttggactgtagtataaggctgtagtaatcagaacagcatagtactgctacaaaaatagacacacagatcaatggaacagaacagaaaacccagatataaagccacacacttaacaactaactgatcttcaaaaatgttgacaaagataagcaatgaggaaaggactccctattcaataaatggtgctgggaaactggctagtgatatgcagaagaatgaaattggacccctagttattactgtatacaaaagttaactcaagatggatttaagacttaaatgtaagacttaactataaaaatcctagaagtaaacctaggaaaaactcttctggaaattggcctatgcaaatcatttattgctaagacctcaaaagaaaatagaacaaaaacaaaaatagacaaatgggacttaattaaactaaaaacattctgcacagcaaaagaaacaacagattaaacagacagcctacagaatgaaagagtatagcaaactattcatccaacagattaatatcgagaatctataaggaacttcaataaacaagaaaagaaaaaagtaacttcattgaaaagtgacaaagaacatgaacagacatttctcttgtatgtagaagacatacaagcagctaacaaacatgtaaaaagatgctcaacatctggaatcagcagagaaatgcaaatcaaaactgcaatgaaatgtttatcttactctagtcaaaatggcattatcaaaaaatcaaacaataacagatgttggtgaggatgcagagaaaaggggtcatttatacacttgtgggaatgttaaggagttcaacccttatgggaaacagtatggagattttgcaaagaactgaaaacagaactaccatttgacccagaaatcccacaactgggtatcttcccaaggaaaataaatcatgttatcaaaaagacacttgcacttgtatgtttgttgcagtactattcataatggcgaagtcatggaatcaatctaagtgaccgacaacagtggattagatttaaaaaatgtggcacatatacaccgtagaatactacacagccatataaagaatgaaattttgcagcagcgtggacatagttggaggccactgtgctaagtgaattaacatttaaacagaaaatcaaatactacaccatctcacctataagagagagccaagcaataagtacacagggttatacatatgaaaatgatagatacagggaactccaaaattggggagagaagcctgggggaaagggctgaaaaactacctattgggtacaatgttaaatatttgggtgataggttcactagaagccaaaaacgcagcattatacagtacacccatgccacaaacctgcacagctatcccctgaatgtaaaa

SEQ ID NO: 799 - DNA, 1421 bp, Homo sapiens
  source 1..1421: mol_type = other DNA
tccccctctccctcgtctccgtctcccgctttccacggtctccctctgttgccgaggctggactgtactgctgcgatctcggctcactgcaacctccctgcctgattctcctgcctcagcctgctgagtgcctgggattgcaggcgcgcgccaccacgcctgactggtttttgtattttttggtggagacggggtttcgccgtgttggccgggctggtctccagctcctgaccacgagtgatctgcccgccctggcctcccgaggtgccgggattgcagagggagtcttgctcactcagtgctcaatgttgcccaggctggagtgcagtggcgtgatctctgctcgctacaatctccacctcccagccacctgccttggcctcccaaagtgctgagattgcagcctctgcccggccgccaccccgtctaggaagtgaggagcgtctctgcctggccgcccatcgtctgggatgtgaggagcccctctgcctggccgcccagtctgggaagtgaggagcgcctcttcccggctgccatcctgtctaggaagtgaggagcgtctctgcctggccgcccatcgtctgggatgtggggagcgcctctgcccggccgccctgtctaggaggtgaggagcgtctctacccggccaccaccccgtcagggaactgaggagcgcctctgcccggctgccccgtctgagaagtgaggagcccctctgcccggccaccccgtctgagaagtgaggagcccctctgcccggcagccgccccgtctggcaggtgggggggcgcccccgcccggcagccgccccgtctgggaggtggggggcgcgcctctgcccagccgccacgtctgggaagtggggagccccactgcccggctgccaccccgtctgggaggtgtacccaacagctcattgagaacgggccatgatgacgatggcggttttgtcgaatagaaaagggggaaatgtggggaaaagaaagagagatcagattgttactgtgtctgtgtagaaagaagtagacataggagactccattttgttctgtactaagaaaaattcttctgccttgggatgctgttaatctataaccttacccccaaccccgtgctctctgaaacatatgctgtgtcaactcagggttaaatggattaagggcggtgcaagatgtgctttgttaaacagatgcttgaaggcagcatgctcgttaaagagtcattaccactccctaatctcacgtacccagggacacaaacactgcggaaggccgcagggtcctctgcctaggaaaaccagagacctttgttcatatgtttatctgctgaccttctctccgctattgtcctatgaccctgccaaatctccctctcggagaaacacccaagaatgatcaataaatactaacaaaattaaaaaa

SEQ ID NO: 800 - DNA, 911 bp, Homo sapiens
  source 1..911: mol_type = other DNA
ccgccccatccgggaggtgaggggtgcctctgcccggccgcccctactgggaagtgaggagcccctctgcccggccagccgccccgtccgggaaggaggtgggggggtcagccccgcacccggccagccgccccgtccggttggtgaggggcgcctctgcccggccgcccctactgggaagtgaggagcccctctgcccagccagccgcccagtccgggaaggaggtgggggggtcagccccccgcccggccagccaccccgtccgggagggaagtggaggggtcagccccccgcccggccagccgccccatccgggaggtgaggggcgcctctgcccggccacccctactgggaagtgaggagcccctctgcccggccaccaccccgtctgggaggtgtactcaacagctcattgagaacaggccatgatgacaatggcggttttgtggaatagaaaggggggaaaggcggggaaaagattgagaaatcggatggttgccgtgtctgtgtagaaagaggtagacatgggagacttttcattttgttctgtactaacaaaaaattcttctgccttgggatcctgttgatctgtgaccttacccccaaccctgtgctctctgaaacatgtgctgtgtccactcagggttgaatggattaagggtggtgcaagatgtgctttgttaaacagatgcttgaaggcagcatgctcgttaagagtcatcgccactccctaatctcaagtacccagggacacaaacactgtggaaggccacagggtcctctgcctaggaaaaccagagacctttgtttacttgtttatctgctgaccttccctccactattgtcctatgaccctgccaaatccccctctgcgagaaacacccaagaatgatcaaaaaaaaaaaaaaaa

SEQ ID NO: 801 - DNA, 6359 bp, Homo sapiens
  source 1..6359: mol_type = other DNA
tagacagtgggtgcaacccatggagagcaagcagaagggtggggcattgcttcaccacggaagtgcaaggagctgggggacctccctcccctagccaagggaagccgtgagggactgtgctacccagcctggatactatgcttttcccacggtatttgcaagccggagatcaggagagtccttcgtgagcctacaccaccagggccctgggtttcaagcacaaaaccaggaggctgtttgggcaggcactgagctagctacagttttttcataccccagtggcgcctggaaccccagtgagacagaactgttcactcccctggaaaggaggctgaagccagggagtcaagtggtcttgctaagtgggtcccactcccacggagcccagaaagctaagaaccactggcttgaaattctcactgccagcacaccagtctgaagtcaacctgggacaattgagcttggtggggggaggggcatctgccattactgaggctttagtaggcagttttcccctgatagtgataaggagactgggaggtttggactgggcagaattcaccacagtgtggcaaagcggctgtggccagactgcttctctagattcctcctcactgggcagggcatctctgaagcaaaggtaacagccccagtcaggggcttacagataaaactctcacctccctgggacagagcactggattgtccccagagcactgcggaggggctgctgtgggcacagcttcagcagccttaatctttcctgcctgctggctctgaagagagcagctgatcctgacaaagggtattctcccaacacagggtaccagctctgcaaagggatgaagtgcctccttaagtgggtccctgacccccatgcctcctgactgggagaaacctcccaacagggcttgacagaaacctcccaacaggggttgacagacacctcatataggagagctccggctggcatcaggctggtgcccctctgggacaaagcttacagaggaaggagcaggcagcaatctttgctgttctgcaacctccactggtgatacccaggcaaatagggtctagagaggatgtttagcaaactgcagcagacttgcagaagaggggcctgactgttagaagaaaaactaacaaacagaaagcaacaacaacatcatcaacaaaaaagactcccacacaaaaactcccatccaaatgtcatcagcctcaaatatcaaaggtagataaatccacgaagatgaggaaaagccagcacaaaaacactgaaaattccaaaaaccagaatgcctcctctcctccaaatgatcgcaactcctctccagcaaggacacaaaactggacaaataatgagattaacgaattgacagaagtaggcttcagaaggtaggtaataacaaactcctttgagctaaaggaacatgttctaacccaatgcaaggaagctaagaaccttgataaaaggttacaggaactgctaactagaataaccagtttagagaggaacataaatgacctgatggagctgaaaaacacagcacaagaacttcctgaagcatacacaagtatcaatagctgaaacaatcaagtggaagaaaggatatcagagattgaagatcaccttgctgaaataaggtgtgaagacaagattagagaaaaaagaatgaaaaggaatgaacaaagcctccaagaaatatggggctatgtgaaaagactaaacctacgattgattggtgtatctgaaagtgatggggagaatggaaccaagttggaaaacacacttcaggatattatccagaacttccccaacctagcaagacagaccaacattcaaattcaggaaatacagagaacaccactaagatattccttgagaagatcaaccccaagacacataatcatcagattcccaaacattgaaacgaaggaaaaaatgttaagggcagacacagagaaagttcaggtaacctacaaagggaagcccgtcagactaacagcagatctctctgcagaaaccctacaagccagaagagagtgagggccaatattcaacattcttaaagaaaagaattttcaacccagaatttcatacccaaccaaactaagcttcttaagcaaaggagaaataaaatccttcccaaacaggcaaatgctgagggattttgtcaccaccaggctggtcttacaaaagctcctgaaggaagcactaaatatggaaaggaaaaaccagtaccagccactgcaaaaacataccaaaatataaagaccagtgacactatgaagaaactgcatcaactaatgtgtaaaataaccagctagcatcatgatgacaggatcaaattcacatataataatattaacattaaatgtaaataggctgaacgccctaattaaaagacacagactggcaaattggatagagtcaagacccatcagtgtgctgtatttaggagacccatctcacatgcaaagacatacataggctcaaaataaagggacgagcaaatggaaagcaaaaaaaaaaaaaaaaaaaaagcaggggttgcaatcctagtctctgataaaacaaactttaaacccaaaaagttcaaaaaagacaagggcattacagaatggtaaagggatcaatgcaactaacaatagttagagaagagctaactatcctaaatatatatgcacccaatacaggagcacccagattcataaaacaagttcttagagacctataaagagacttagactcccacacaataatagtgggagactttaacaccacactgtcaatattagacagatcaacaagacagaacattaacaaagatattcaggacttgtactcagctctggatcaagtggacttaatagatatctatagaactctccaccccagatcaacagaatatacattcttctcagtacctcatggcagttattctaaaattgaccacataataggaagtaaaacactccttagcaaatgcaaaagaatggaaatcataacagtctctcagaccacagtgcaattaaattagaactcaggattaagaaactcactcaaaactgcacaattacatggaaattgaacaacctgctcctgaatgactcctggataaatatcgaaattaaggcagataaagaagttcttcgaaaccaatgagaacaaaaagacaatgtaccagaatctctgggacacagctaaagcagtgttaagatggaaatttatagcactgaatgcccatatcagaaagctggaaagatctgaaatcgtcaccctaacatcacaattaaaagaactagagaagcaagagcaaacaaattcaaaagctagcagaagacaagaaataactaagatcaaagcagaactgaaggagatagagacacaaaaaacccttcaaaaaatcaatgaatccagaggtagtttttttaaaaaattaacaaaatagaccactagctagactaacaaagaagagacaagaatcaaatagacacaataaaaaatgataaaggggatatcaccactgatcccacagaaatacaaactaccatcagagaatactataaacacctctatgcaaataaactagaagatctagaagaaatggataaattcctggacacatacaccctcccaagactaaaccaggaagaagtcgaatccctgaatagaccaataacaggctctgaaattgaggcagtagttaatagcctaccaaccaaaaaaagcccaggaccagagagactgacagccgaattctaccagaggtacaaagaggagctggtaccattccttctgaaactattccaaacaacagaaaaagagggactcctccctaactcattttatgaggccagcgtcctcctgataccaaaacctggcaaagacacaacaaaaaaagaaaatttcaggccaatatccctgatgaacatcgatgtgaaaatcctcaataaaatattggcaaaccgaatccagcagcacatcaaaaagcttatccaccacaatcaagttggcttcatcattggggtgcaaggctggttcaacatatgcaaatcaacaaacgtaatctatcacgtaaacagaaccaatgacaaaaaccacgattatctcaatagatacagaaaaggccttcgatgaaattcaacatctcttcatgttaaaaactctcaataaactaggtattgatagaacatatctcaaaatattaagagctatttatgacaaacccatagccaagatcatactgaatgggcaaaagctggaggcattccctttgaaaactggcacaagacaaggatgccctctctcaccactcctattcaacatagtattggaagttctggcccagggcactcaggcaagagaaagaaataaagggtattcaaatagaaagagaggaagtcaacttgtctctgtttgcagacgacatgattatatatttagaaaacccattgtctgagccccaaaatctccttaagctgacaggcaacttcagcaaagtctcaggatcaaaaatcgcaagcattcctgtacaccaatcatagagaacagagagccaaatcacgagtgaactcccattcacaattgctacaaagagaataaaatacctaggaatacagttttcaagggacgtgaaggatcttttcaaggagaactacaaaccactgctcaaggaaatgagaggactcaaacaaatggaaaaaaattccatgctcatggataggaagaatcaatatcatgaaaatggccatactgcccaaagtaatttatagattcaatgctactcccattaagctaccattgagtttctttgcagaattataaaaaactactttaaatttaatatggaaccaagaaagagcctgcatagccaagacaatcataagcaaaaataacaaagttggaggcagcacgctacctgacctcaaactatactgcaaggctacagtaaccaaaacagcatgatactggtaccaaaacagatacatagaccaatggaacagaacagagacctcagaaataacaccacacatctacaaccatctgatctttgacaaacctgacaaaaacaagcaatggggaaagaattccctatttaataaatggtgctgggaaaactagctagccatatgcagaaaacagaaactggaccccctccttacaccttatacaaaaattaactcaagatagattaaagacttaaatgtaaaaccccaagccataaaaaccctagaagaaaacctaggcaataccattcaggacataggcatgggcaaagacttcatgactaaaacaccaaaagcaattgcaacaaaagcaaaaattgacaaatgggatctaattaaactaaagagtttctgcacagcaaaagaaactatcaccagagtgaaaaggcaacctacagaatgagagaaaaattttgcaatctacccatgtgtcaaaggtctaatatccagaatctacaaggaacttaaacaaattttcaagaaaaaaaacaaacaaccccaacaaaaagtgggcaaagaatatgaacagacacttccagaagaagagattgatgtggccaacaaacatatgaaaaatagctcatcatcagtggtcattagagaaatgcaactcaaaaccacagtgagatactatctaataccagttagaatggcaattattaaaaagtcaggaaacaacagatgctggcaatgctgtggagaaacaggaatgcttttacacttgttggtgagagtgtaaattaatccaaccattgtggaagacagtgtggtgattcctcaagcatctagaaccagaaacaccatttgacccagcaatcccattactggatatacaccaaaagggttataaatcattctggtataaagacacatgcacatgtgtgtttgccgcagcactttacaatagcaaagacttggaaccaacccaaatgcccatcaatgacaagctggaaaaagaaaatgtggcacataaacaccatggaatactatgcagctataaaaaaagagttcatgtcctttccagggacatggatgacgctggaagccatcattctcagcaaattaacacaggaacagaaaaccaaacaccacatgttctcactaataagtgggagatgaacaatgagaatagatggacacaagaagaacattaaacaccggggccagtcggggtggggccaagggaagggagaacattaggacaaatacctaatgcacgtggggcttaaaacctagatgacagttggtaagtgtagcacaccaccatggcacaagtatatctatgtaacaaacctgtacattctgcacatgtatcgcagaatttaaagtaaaatttaaaaaaaataaaa

SEQ ID NO: 802 - DNA, 6152 bp, Homo sapiens
  source 1..6152: mol_type = other DNA
atggccgaataggaacagctccagtctatagctcccggcatgagagatgcagaaaatgggtgatttctgcatttccaactgaggtaccgggttcatctcactgggacctgttggacagtgggtgcagcccatggagtgtgagccaaagcagggcggggcattgtctcacccaggaagcacaagggtcggggaattccctttcctagccaagggaagccatgacagatggtacctggaaaatcaggacactcccaccctaatactgcacttttccaatggtcttagcaaacagcacaccaggagattatatcccatgcctggcttggagggtcccacgcccacaaagccttgctcactgctagcacagcagtccgagtttgaactgcaagatggcagcgaggctggggaaggggcatccgccattgctgaggcttgagtaggtaaacaaagcagccaggaagctcgaactgggtgaagcccactgcagctcaaggaggcctgcctggctctgtagactccacctctgcaggcagggcagagctgaacaaaaggcagcagaaacttctgaagatttaaacgtccctgtctgacagctttgaagagagtagtggttctcccagcaaggagtttgagatctgaaaacggacagactgcctcctcaagtgggtccctgaccctcgagtagcctaactgggagacacttcccagtaggggctgactgacacctcatacagttgggtgcccctctgagacaaagcttccagaggaaggatcaagcagcaacatttgctgttctgcaatatttgctattctgcagcctctgctgctgatacccaggcaaacagggtctggagtggacctccagcaaactccaacagacctgaagctgaaggtcctgactgttagaaggaaaacaaacagaaattaatagcgtcaacatcaacaaaaaggacatccacaccaaagccccatctgtaggtcaccatcatcaaagaccaaaggtagataaaaccacaaagatggggagaaaccagagcagaaaagctgaaaattgtaaaaatcagagtggctcttctcctccaaaggaatgcagctcctctccagcagcagaacaaagctggatggagaatgactttgactagttgacagaagtagtcttgagaagatcggtaataacaaacttctctgagctaaaggaggatgttcaaacccatcgcaaagaagctgaaaaccttgaaaaaagattagacaaatggctaactacaataaacagcatagagaagaccttaaatgacctgatgaagccaaaaaccatggcacgagaactacgtgacgcatgcacaagcttcagtagccgattcgatcaagtggaagaaaaggtatcagtgagtgaagatcaaatgaatgaaatgaagcgagaagagaagtttagagaaaaaggagtaaaaagaaacaaacaaaacctccaagaaatatgggactatgtgaaaagaccaaatctacatctgattggtgtacctgaaagtgacgggagaaaggaaccaagttggaaaacactctgcaggatattatccaggagaacttccccaacatagcaaggcaggccaatattcaaattcaggaaatacagagaacgccacaaagatactcctcaagaagagcaactccaagacacataattgtcagattcaccaagatagaaatgagggaaaaaatgttaagggcagccagagagaaaggtcgggttacccacaaagggaagcccatcagactaacagcggatctctcagcagaaactctacaaaccagaagagagtgggggccaatattcaacattcctaaaaaaagaattttcaacccagaatttcatatccagccaaactaagcttcataagtgaaggagaaataaaatcctttacagacaagcaaatgctgagagatttttgtcaccaccaggcctgccttataagagctcctgaaggaagcattaaacatggaaaggaacaaccagtaccagccactgcaaaaacatgccaaattgtaatggccatcgatgctaggaagaaactgcattaactaatgagcaaaataaccagctaacatcataatgacaggatcagattcacacataacaatattaaccttaaatgtaaatgggctaaatgctcaaattaaaagacagagactggcaacttggataaagagtcaagacccatcagtgtgctgtattcaggagacccatctcacgtgcagagacacacataggctcaaaataaagggatgaaggaagatctaccaagcaaatggaaaacaaaaaaaaagcaggggttgcaatcctcgtctctgataaaacagactttaaactaacaaagatcaaaagagacaaagaaggccattacataattgtaaaggatcaattcaacaagaagagctagctatcctaaatatatatgcacccaatacaggagcacccagattcataaagcaagtccttagagacctacaaagagacttagactcccacacaataataacgggagactttaacaccccactgtcaacattaggcagatcaatgagacagaaagttaacaaggatatccaggacttgaactcagctctgaaccaagctgacctaacagatatctacagaactctccacaccaaatcaacagaatatatattcttcttagcaccacatcacacttattccaaaattgaccacatagttggaagtaaagcactcctcagcaaatgtaaaagaacagaaattataacaaactgtctctcagaccacagtgcaatcaaattagaactcaggattaagaaactcactgaaaaccacacaactacacggaaactgaacaacctgctcctgaatgactactgggtaaataacaaaatgaaggcagaaataaagatgttctttgaaaccaatgagaacaaagacacaacataccagaatctctgggacacatttaaagcagtgtgtagagggaaatttatagcactaaatgccaacaagagaaagcaggaaagatctaaaattgacaccctaacatcacaattaaaagaactagagaagcaagagcaaacacattcaaaagctagcagaaggcaagaaataactaagatcagagcagaactgaaggagatggagacacaaaaaaacccttcaaaaaaatcaatgaatccaggagctggttttttgaaaacatcaacaaaattgatagactgctagcaagattaataaagaagaaaagagagaagaatcaaatagacgcaataaaaaatgataaaggggatatcaccactgatcccacagaaatacaaactaccatcagagaatacaataaacacctctatgcaaataaactagaaaatctagaaaaaatggataaattcctggacacataaactctcccaagactaagccaggaagaagctgaatccctgactcgaccaataacaggctctgaaattggggtaataattaatagcctaccaaccaaaaaaagtccaggaccagacggattcacagctgaattctaccagaggtacaaagaggagctggtaccattccttctgaaactattccaatcaatggaaaaagagggaatcttccctaattcattttatgaggccaagatcatcctgatacgaaagcctggcagagacacaagaaaaaaagagaattttagaccaatatccctgattaacattgatgcaaaaattctcaataaaatactggcaaaccgaatccagcagtacaccaataagcttatccaccatgatcaagctggcttcatccctgggatgcaaggctggttcaacatatgcaaatcaataaacataatccatcatataaatagaaccaaagaaaaaaaaaccacacgattacctcaatagatgcagaaaaggcctttgacaaaattcaacagcatttcatgctaaaaactctcaataaactaggtattgatgggatgtatctcaaaataataagagctattcatgacaaacccacagccaatatcatactgaatgggcaaaaactggaagcattcccttttaaaactggcacaagacagggataccctctgccaccactggtattcaacatagcgttggaagttctggccagggcaattaggcaggagaaggaaataaagggtatttggtttggaaaggaggaagtcaaattgtccctgtttgcagatgatgtgattctatggttagaaaaccccatcatctcagcccaaaatctccttaagctgataggcaacttcagcaaagtctcaggatacaaaatcaatgtgcaaaaatcaaaagcattcttatacagcaataacagacaaacagagagccaaatcgtgagtgaactcccattcacaattgcttcaaagagaataaaatacctaggaatccaacctactagggacgtgaacgacctcttcaaggaaaactacaaaccactgctcaacgaaacaaaagaggacactaacaaatggaagaacattccatgctcatggacaggaagaatcaatatcatgaaaatggccatactgcccaaggtaatttatagattcaataccatccccatcaagctgccaatgactttcttcacagaattggaaaaaactactttaaaggtcatatggaactaaaaaaaagcctgcattgccaagccaatcctaagcaaaaagaacaaacctggaagcatcacactacctgacttcaaactatactacaaggctacagtaaccaaaatagcatggtactggtaccaaaacagagatatagaccaacggaacagaacagagccctcagaaataataccacacatctacaaccatctgatctttgacaaacctgacaaaaacaagaaatgaggaaaggattccctatttaataaatggtgctgggaagactggctagccatatgtagaaatctgaaactggatcccttccttacaccttatacaaaaattaattcaagatggattaaatacttaaatgtcagacctaaaaccataaaaaccctaaaagaaaacctaggcaataccattcaggacatagccatgggcaaggacttcatgactaaaacaccaaaagcaatggcaacaaaagccaaaatagacaaatgggatctaattaaactaaagagcttctgcaaagtgaaaaaaactaccatcagagtgaacaggcaacctacagaatgggagaaaatttttgcaatctagtcatctgacaaagggctaatatccagaatctacaaagaacttaaacaaatttataagaaaaaaatcaaacaaccccatcaaaaagtgggtgaaggatatgaacagacacttctcaaaagaagacatttacgcagccaacagacacatgaaaaaatgctcatcatcactggtcatcagagaaatgcaaatcaaaccacagtgagataccatctcataccagttagaatggcgatcattaaaaaatcaggaaacaacaggggctggagaggatgtggagaaataggaacacttttacactgttggtgggactgtaaactagttcaaccattgtggaagtcaatgtggcgattcctcagggatctagaattagaaataccatttgacccagagatcccattattgggtatacacccaaaggattatacatcatgctactataaaaacacatgcacacatatgtttattgtggcactatctacaagagcaaagacttggaatcaacccagatgtccatcaatgatagactggattaagaaaatatggcacatatacaccatggaatactatgcagccataaaaaagaatgagttcatgtcctttgtgggtacatggatgaagctggaaaccatcattctgagcaaattatcgcaaggacagaaaaccgaacaccacatgttctcactcatagatgggaattgaacaatgagaacacttggacactgggcggggaacatcacacactggggcctatcctggggtggggggaggagggagagatggcattaacagaaatacctattgtaaatgaccagttaatgggtgcagcacatcaacatggcacaggtatacatgtgtaacaaacctgcacgttgtgcacatgtacccttgaacttgaagtataatttaaaaaaa

SEQ ID NO: 803 - DNA, 6030 bp, Homo sapiens
  source 1..6030: mol_type = other DNA
gagggaggagccaagatggccgaataggaacagctccggtctacaactcccagcgtgagcgacgcagaagacggtgatttctgcatttccatctgaggtaccgggttcatctcactagggagtgccagacagtgggcgcaggccagtgtgtgtgcgcaccgtgcgcgagccgaagcagggcgaggcattgcctcacctgggaagcgcaaggggtcagggagttccctttccgagtcaaagaaaggggtgacggacgcacctggaaaatcgggtcactcccacccgaatattgcgcttttcagaccggcttaagaaacggcgcaccacgagactatatcccacacctggctcggagggtcctacgcccacggaatctcactgattgctagcacagcagtctgagatcaaactgcaaggcggcaacgaggctgggggaggggcgcccgccattgcccaggcttgcttaggtaaacaaagcagccgggaagctcgaactgggtggagcccaccacagctcaaggaggcctgcctgcctctgtaggctccacctctgggggcagggcacagacaaacaaaaagacagcagtaacctctgcagacttaagtgtccctgtctgacagctttgaagagagcagtggttctcccagcacgcagctggagatctgagaacgggcagactgcctcctcaagtgggtccctgactcctgacccccgagcagcctaactgggaggcaccccccagcaggggcacactgacacctcacacggcagggtattccaacagacctgcagctgagggtcctgtctgttagaaggaaaactaacaaccagaaaggacatctacaccgaaaacccatctgtacatcaccatcatcaaagaccaaaagtagataaaaccacaaagatggggaaaaaacagaacagaaaaactggaaactctaaaacgcagagcgcctctcctcctccaaaggaacgcagttcctcaccagcaacagaacaaagctggatggagaatgattttgacgagctgagagaagaaggcttcagacgatcaaattactctgagctacgggaggacattcaaaccaaaggcaaagaagttgaaaactttgaaaaaaatttagaagaatgtataactagaataaccaatacagagaagtgcttaaaggagctgatggagctgaaaaccaaggctcgagaactacgtgaagaatgcagaagcctcaggagccgatgcgatcaactggaagaaagggtatcagcaatggaagatgaaatgaatgaaatgaagcgagaagggaagtttagagaaaaaagaataaaaagaaatgagcaaagcctccaagaaatatgggactatgtgaaaagaccaaatctacgtctgattggtgtacctgaaagtgatgtggagaatggaaccaagttggaaaacactctgcaggatattatccaggagaacttccccaatctagcaaggcaggccaacgttcagattcaggaaatacagagaacgccacaaagatactcctcgagaagagcaactccaagacacataattgtcagattcaccaaagttgaaatgaaggaaaaaatgttaagggcagccagagagaaaggtcgggttaccctcaaaggaaagcccatcagaataacagcggatctctcggcagaaaccctacaagccagaagagagtgggggccaatattcaacattcttaaagaaaagaattttcaacccagaatttcatatccagccaaactaaccttcataagtgaaggagaaataaaatactttatagacaagcaaatgttgagagattttgtcaccaccaggcctgccctaaaagagctcctgaaggaagcgctaaacatggaaaggaacaaccggtaccagccgctgcaaaatcatgccaaaatgtaaagaccatcgagactaggaagaaactgcatcaactaatgagcaaaatcaccagctaacatcataatgacaggatcaaattcacacataacaatattaactttaaatataaatggactaaattctgcaattaaaagacacagactggcaagttggataaagagtcaagacccatcagtgtgctgtattcaggaaacccatctcacgtgcagagacacacataggctcaaaataaaaggatggaggaagatctaccaagcaaatggaaaacaaaaaaaggcaggggttgcaatcctagtctctgataaaacagactttaaaccaacaaagatcaaaagagacaaagaaggccattacataatggtaaagggatcaattcaacaagaggagctaactatcctaaatatttatgcacccaatacaggagcacccagattcataaagcaagtcctcaatgacctacaaagagacttagactcccacacattaataatgggagactttaacaccccactgtcaacattagacagatcaacgagacagaaagtcaacaaggatacccaggaattgaactcagctctgcaccaagcagacctaatagacatctacagaactctccaccccaaatcaacagaatatacatttttttcagcaccacaccacacctattccaaaattgaccacatagttggaagtaaagctctcctcagcaaatgtaaaagaacagaaattataacaaactatctctcagaccacagtgcaatcaaactagaactcaggattaagaatctcactcaaagccgctcaactacatggaaactgaacaacctgctcctgaatgactactgggtacataacgaaatgaaggcagaaataaagatgttctttgaaaccaacgagaacaaagacaccacataccagaatctctgggacgcattcaaagcagtgtgtagagggaaatttatagcactaaatgcctacaagagaaagcaggaaagatccaaaattgacaccctaacatcacaattaaaagaactagaaaagcaagagcaaacacattcaaaagctagcagaaggcaagaaataactaaaatcagagcagaactgaaggaaatagagacacaaaaaacccttcaaaaaatcaatgaatccaggagctggttttttgaaaggatcaacaaaattgatagaccgctagcaagactaataaagaaaaaaagagagaagaatcaaatagacacaataaaaaatgataaaggggatatcaccaccgatcccacagaaatacaaactaccatcagagaatactacaaacgcctctacgcaaataaactagaaaatctagaagaaatggatacattcctcgacacatacactctcccaagactaaaccaggaagaagttgaatctctgaatcgaccaataacaggctctgaaattgtggcaataatcaatagtttaccaaccaaaaagagtccaggaccagatggattcacagccgaattctaccagaggtacaaggaggaactggtaccattccttctgaaactattccaatcaatagaaaaagagggaatcctccctaactcattttatgaggccagcatcattctgataccaaagccgggcagagacacaaccaaaaaagagaattttagaccaatatccttgatgaacattgatgcaaaaatcctcaataaaatactggcaaaccgaatccagcagcacatcaaaaagcttatccaccatgatcaagtgggcttcatccctgggatgcaaggctggttcaatatacgcaaatcaataaatgtaatccagcatataaacagagccaaagacaaaaaccacatgattatctcaatagatgcagaaaaagcctttgacaaaattcaacaactcttcatgctaaaaactctcaataaattaggtattgatgggacgtatttcaaaataataagagctatctatgacaaacccacagccaatatcatactgaatgggcaaaaactggaagcattccctttgaaaaccggcacaagacagggatgccctctctcaccgctcctattcaacatagtgttggaagttctggccagggcaatcaggcaggagaaggaaataaagggtattcaattaggaaaagaggaagtcaaattgtccctgtttgcagatgacatgattgtttatctagaaaaccccatcgtctcagcccaaaatctccttaagctgataagcaacttcagcaaagtctcaggatacaaaatcaatgtacaaaaatcacaagcattcttatacaccaacaacagacaaacagagagccaaatcatgggtgaactcccattcacaattgcttcaaagagaataaaatacctaggaatccaacttacaagggatgtgaaggacctcttcaaggagaactacaaaccactgctcaaggaaataaaagaggagacaaacaaatggaagaacattccatgctcatgggtaggaagaatcaatatcgtgaaaatggccatactgcccaaggtaatttacagattcaatgccatccccatcaagctaccaatgactttcttcacagaattggaaaaaactactttaaagttcatatggaaccaaaaaagagcccgcattgccaagtcaatcctaagccaaaagaacaaagctggaggcatcacactacctgacttcaaactatactacaaggctacagtaaccaaaacagcatggtactggtaccaaaacagagatatagatcaatggaacagaacagagccctcagaaataatgccgcatatctacaactatctgatctttgacaaacctgagaaaaacaagcaatggggaaaggattccctatttaataaatggtgctgggaaaactggctagccatatgtagaaagctgaaactggatcccttccttacaccttatacaaaaatcaattcaagatggattaaagatttaaacgttaaacctaaaaccataaaaaccctagaagaaaacctaggcattaccattcaggacataggcgtgggcaaggacttcatgtccaaaacaccaaaagcaatggcaacaaaagacaaaattgacaaatgggatctaattaaactaaagagcttctgcacagcaaaagaaactaccatcagagtgaacaggcaacctacaacatgggagaaaatttttgcaacctactcatctgacaaagggctaatatccagaatctacaatgaactcaaacaaatttacaagaaaaaaacaaacaaccccatcaaaaagtgggcgaaggacatgaacagacacttctcaaaagaagacatttatgcagccaaaaaacacatgaagaaatgctcatcatcactggccatcagagaaatgcaaatcaaaaccactatgagatatcatctcacaccagttagaatggcaatcattaaaaagtcaggaaacaacaggtgctggagaggatgcggagaaataggaacacttttacactgttggtgggactgtaaactagttcaaccattgtggaagtcagtgtggcgattcctcagggatctagaactagaaataccatttgacccagccatcccattactgggtatatacccaaatgagtataaatcatgctgctataaagacacatgcacacgtatgtttattgcggcactattcacaatagcaaagacttggaaccaacccaaatgtccaacaatgatagactggattaagaaaatgtggcacatatacaccatggaatactatgcagccataaaaaatgatgagttcatatcctttgtagggacatggatgaaattggaaaccatcattctcagtaaactatcgcaagaacaaaaaaccaaacaccgcatattctcactcataggtgggaattgaacaatgagatcacatggacacaggaaggggaatatcacactctggggactgtggtggggtcggggaaggggggagggatagcattgggagatatacctaatgctagatgacacattagtgggtgcagcgcaccagcatggcacatgtatacatatgtaactaacctgcacaatgtgcacatgtaccctaaaacttagagtataataaaaaaaaaaaa

SEQ ID NO: 804 - DNA, 2571 bp, Homo sapiens
  source 1..2571: mol_type = other DNA
gtcaaaaaaaaaatttaaccttcttcaggttatattttagtgaatgatattaatatatgttccaaagttgtatgggatttctaaaattctaatttttctgagtatatgctaccgatcataattatggttatgttgttgttataaccaaatttctttgtcaattgtgtctttttgagtatttaaagtcatttccgcagttaattgcttcatgctgatgtagtttctgaaaacttcacaagcacacaaaaatcctagaacatggtgtcttttaggaggttcgtgaacggatggggaggaccctgaaaagcactgtggaatacaggtttctagtaacttcaaaatcacatcatttggactgggtaagaattgctgaaactttaatgaaaagactgactggcttataaaactgctaacccaaatagaataaaaattaattgaataccgaggaaatgcttcaccaggtttgcatacttaatcagcctatactgaaattgtttagatatacaatttgaatgaactccatggtctaagtcaaattacctgtgataacccatcagttatccatgctatgtgcccaatttggagaaacaactggcacccaagaggacataagtccgatgttaagcatggactcatggagaaccaagatggctgccttgtccttcgtgagtccttaaagcttttgttattaaaagttatgcattccatgactcatcctggaaaagataaaatgatccaaattaaatatgttggtgtggtgacttacagattgttaaaatagtttataaacaatgtttagtttgtcaaacccatactcctgggaagtcaatcaaagcttcatgtacatttggctacctgatgaggcatttaaacatttataaaggggtttcattcagttgtcattttcaatgtatgtgttctggttgtactaaagctttcccatgcaggagggctaatgttataacagtagattactatgtatcagtgtattttcaccaggtaaagagctttttatggttcactgaggacaatcaaccccttcacaatctagaacccaaagatgggatcttctgagaacatcagagaaacgctgcccttggcatcatcactgcaacaaaacatcaggatcttgaaccttggggtcataatctcacaactgagcagggtcactcttggaactctacatccattgaaacccttaaggtaaagctaatcagggaagtttctccccagaagaagatggcatccttgatgtgagcagctctttctgaagatcatggatcaagacttcttactatcatgagactcttatctttgaatgtttttccgttgcttccgcctctgtgaacaacagaagtgagaagggggtctgttttgtgcacttatggggtatacttttatttgtgaagggctttgcagccagctttatacatggataatcttataacttgatagataaagatgaaggcccagtgtatcataggtgagaaacttcaatggtacatatggtgcctcataatcattcagaagcagaacattggttcactcctcttaacccacagcatgggttaaagagaccattgccaagaggccttccctcttctagaagggcatcatttgttaggtcctttttccatggtttggaattaaaaaggcaatgactagaaacatatccctcatggtagactctgtagcagattctactgtaaaggctacacaacagatgttaaattctcttgtgaaagttatgctaaaaaatagaattggctaaacaggaaagtacctgtgcagatgctggcacttaaggcctatggagaaaacatcaggtgttatagagagtctgttgtagggaattaacgaaaagaccactgagttaagtcaaagaatggtctatttgagtttaggtggtctggtttatggggaccctggctaaggagcatactccaaattcttggtgttaaccctctcagtagtcataagaatagtctccctggtgcactgtattctctcaaaggttttaaatgtttgcatgaagccatctttagaacgtcagatggtctctcttcaactggaatgacaagagctgaaagaaatgtgtgaccacgaggacaccgaaaccgatgagtgacatgctgagactggaaatccaaaatgatagtaacggagagtggcgctaacatcctaagttttggtcacactcttgcctaagtgacaacctgacaaagggggaattttttaaacaaaatgatgggaggccattgttttggactgagcactaggtcccaacagaccaaaccgaaccaaaatggcatcattcgtgctaaatgtgacataatcgaattaagactttaaggaaacacatgggtcctagaatagaccaggttttgtttttctcttgcaaacaggactttccagcataaggtggtatcctcaactcagtccttgttcctacctttgcaaaactcactgttctgcttcctagtgggtttcaagaccaatggtgacagtgacatcaataactcaagtttcgatcaatctctcaaaactgataaaatgaccaaaaagggggaa

SEQ ID NO: 805 - DNA, 305 bp, Homo sapiens
  source 1..305: mol_type = other DNA
ggctcatgcctgtaatcccagcactttgggaggctgaggcaggtggatcacttgaggtcaggagttcgagaccaacctgcccaacatggtgaaaccccagctctactaaaaatacaaaaattaaccatgtgtggtggcacacacgtgtagtcccagctacttgggaggctgaggcacgagaatcgcttattgcttgaacctgggagacggaggttgtagtgagccgagattttgccactgtactccagcctgggtgacagagtgagactctgtgtcaaaaaaaaaaagaagaaagaaaaaagaaa

SEQ ID NO: 806 - DNA, 1897 bp, Homo sapiens
  source 1..1897: mol_type = other DNA
caataaaatcatctgaaggcagattgtgatgagttaaaggcgtatatgataaacctgaagacaaaccagaaatagcccaacagagatatagtgaataagtaaacaaaggaaataaactagaatcataaaaaatacttaatctgtgggaacatagaagaagggaagctaacacatggggcaaatagaaaacaaaaagcaagttgatagatttaaagctaactatatcaataatcactttaaatgtaatgttctaaacactacaactaaaaggcagagattatcaaattgaatataaaagcaagactgaagtatatctgcttgcaggatacccactgtaaagacaaaactaggtcaatggcagtaggagaaaaaagatacaccatgctaattttaaacagagcaaagttggagtggctatatgattatcagacaagggcaaagaatattaccagtcataaagaagatcatttcatcatgttgaagtggtttgttcacccaaagagcctaatgatacttagcatatatctgcctaatgacatatattaagtacatgaagcaaaaacggaaagtgtagtcagaatcacaattacattcagatatttcaacacccttctttcaataattgatagaacatatagaagaaaaaatcacgatatagaagatttgaataatactatcaactgacttgacctaattaacatttatagaacatccaagaatagaatacatattcttttccagtacaatgtgggcatttaccaagagagatcacattctttgccataaaataagtctcaatacattttaggattttaagtcatacaagatacactctgtaaggacaatgaaattaaataagtgtcagaaaacttacctagaaacaatctagaagatccctgagtatttggtaattgataacatactttacaataactcactggtcaaagaataatcaaaagggaaatttgaaagtgctttgaactgaatgaaatgaaaataaaacattttaatatttgcgggatgtgtctaaaaagtttttaaaggtcaatgtatagcacgaaatacctgtattacaacagaaaaaaggcctcaaatcagtttctgcagagtcaacgaatagatcccaaagaagggaaatctttctttaaaaatcttgagagaggaaatcaatgaaatagaaaacaggaaatcaccaagaagaacactgaaattgataaacaatgccagaatgatcagcaaaaaagaagagaccaattgccagtattaggaatgagagaggtgacatcactacatattgaacagtgattaaaaggataataattgcatattatgaacacctttatccaacaaattcaacaacttagagaaatggacaaatttccttaacaggcaaaaactattaaagccttctcaaatattctgggaatgttagaaacattctcacaaataaagctttaggccaggaggatttactgtcagttctatcatatagttaaggaagaaataatagcagttctgcacagattcttctagaaaattgaagatgtgggaacatttcctaattcactgaggtcagcattaccctcataccaaaaccaggcagacaatacatgaaaactgaaagtttcatgacaggccagtgtcacgaacatagatgcttaagttctaaatacaattttagcgaatcaaatgtaacactgtataaaaatgataatacatcatgacttttgcaatgccaatccatgtgattttattaacgtgctagaaaaaaaaaagtcatatggtcgtaacaatacatgcagaaaaagcatatgacaaaattcagtatccatttctggtaaaatctctcagcaaagtaggcctgaaatgggatgttctcatcctaataaaatgcatc

SEQ ID NO: 807 - DNA, 6030 bp, Homo sapiens
  source 1..6030: mol_type = other DNA
gggggaggagccaagatggccgaataggaacagctccggtctacagctcccagggtgagcgacgcagaagacgggtgatttctgcatttccatctgaggtaccgggttcatctcactagggagcgccagacagtgggcgcaggccagtgtgtgtgcgcaccgtgcgcgagccgaagcagggcgaggcattgcctcacctgggaagcgcaaggggtcagggagttccctttccgagtcaaagaaaggggtgacggacgcacctggaaaatcgggtcactcccacccgaatattgcgcttttcagaccggcttaagaaacggcgcaccacgagactatatcccacacctggctcagagggtcctacgcccacggagtctcgctgattgctagcacagcagtctgagatcaaactgcaaggcggcagcgaggctgggggaggggcgcccgccattgcccaggcttgcttaggtaaacaaagcagccgggaagctcgaactgggtggagcccaccacagctcaaggaggcctgcctgcctctgtaggctccacctctgggggcagggcacagacagacaaaaaggcagcagtaacctctgcagacctaaatgtccctgtctgacagctttgaagagagcagtggttctcccagcacccagctggagatctgagaacaggcagactgcctcctcaagtgggtccctgactcctgacccccgagcagcctaactgggaggcaccccccagcaggggcacactgacacctcacacggcagggtattccaacagacctgcagctgagggtcctgtctgttagaaggaaaactaacaaccagaaaggacatctacaccgaaaacccatctgtacatcaccatcatcaaagaccaaaagtagataaaaccacaaagatggggaaaaaacagaacagaaaaactggaaactctaaaacgcagagcgcctctcctcctccaaaggaacgcagttcctcaccagcaacagaacaaagctggatggagaatgattttgacgagctgagagaagaaggcttcagacgatcaaattactctgagctacgggaggacattcaaaccaaaggcaaagaagttgaaaactttgaaaaaaatttagaagaatgtataactagaataaccaatacagagaagtgcttaaaggagctgatggagctgaaaaccaaggctcgagaactacgtgaagaatgcagaagcctcaggagccgatgcgatcaactggaagaaagggtatcagcaatggaagatgaaatgaatgaaatgaagcgagaagggaagtttagagaaaaaagaataaaaagaaatgagcaaagcctccaagaaatatgggactatgtgaaaagaccaaatctacgtctgattggtgtacctgaaagtgatgtggagaatggaaccaagttggaaaacactctgcaggatattatccaggagaacttccccaatctagcaaggcaggccaacgttcagattcaggaaatacagagaatgccacaaagatactcctcgagaagagcaactccaagacacataattgtcagattcaccaaagttgaaatgaaggaaaaaatgttaagggcagccagagagaaaggtcgggttaccctcaaagggaagcccatcagactaacagcggatctctcggcagaaaccctacaagccagaagagagtgggggccaatattcaacattcttaaagaaaagaattttcaacccagaatttcatatccagccaaactaagcttcataagtgaaggagaaataaaatactttatagacaagcaaatgctgagagattttgtcaccaccaggcctgccctaaaagagctcctgaaggaagcgctaaacatggaaaggaacaaccggtaccagccgctgcaaaatcatgccaaaatgtaaagaccatcgagactaggaagaaactgcatcaactaatgaggaaaatcaccagctaacatcataatgacaggatcaaattcacacataacaatactaactttaaatataaatggactaaattctgcaattaaaagacacagactggcaagttggataaagagtcaagacccatcagtgtgctgtattcaggaaacccatctcacgtgcagagacacacataggctcaaaataaaaggatggaggaagatctaccaagccaatggaaaacaaaaaaaggcaggggttgcaatcctagtctctgataaaacagactttaaaccaacaaagatcaaaagagacaaagaaggccattacataatggtaaagggatcaattcaacaagaggagctaactatcctaaatatttatgcacccaatacaggagcacccagattcataaagcaagtcctcagtgacctacaaagagacttagactcccacacattaataatgggagacttgaacaccccactgtcaacattagacagatcaacgagacagaaagtcaacaaggatacccaggaattgaactcagctctgcaccaagcagacctaatagacatctacagaactctccaccccaaatcaacagaatatacatttttttcagcaccacaccacacctattccaaaattgaccacatacttggaagtaaagctctcctcagcaaatgtaaaagaacacaaattataacaaactatctctcagaccacagtgcaatcaaactagaactcaggattaagaatctcactcaaagccgctcaactacatggaaactgaacaacctgctcctgaatgactactgggtacataacgaaatgaaggcagacataaagatgttctttgaaaccaacgagaacaaagacaccacataccagaatctctgggacgcattcaaagcagtgtgtagagggaaatttatagcactaaatgcctacaagagaaagcaggaaagatccaaaattgacaccctaacatcacaattaaaagaactagaaaagcaagagcaaacacattcaaaagctagcagaaggcaagaaataactaaaatcagagcagaactgaaggaaatagagacacaaaaaacccttcaaaaaatcaatgaatccaggagctggttttttgaaaggatcaacaaaattgatagaccgctagcaagactaataaagaaaaaaagagagaagaatcaaatagacacaataaaaaatgataaaggggatatcaccaccaatcccacagaaatacaaactaccatcagagaatactacaaacacctctacgcaaataaactagaaaatctagaagaaatggatacattcctcgacacatacactctcccaagactaaaccaggaagaagttgaatctctgaatagacgaataacaggctctgaaattgtggcaataatcaatagtttaccaaccaaaaagagtccaggaccagatggattcacagccgaattctaccagaggtacatggaggaactggtaccattccttctgaaactattccaatcaatagaaaaagagggaatcctccctaactcattttatgaggccagcatcattctgataccaaagccgggcagagacacaaccaaaaaagagaattttagaccaatatccttgatgaacattgatgcaaaaatcctcaataaaatactggcaaaccgaatccagcagcacatcaaaaagcttatccaccatgatcaagtgggcttcatccctgggatgcaaggctggttcaatatacgcaaatcaataaatgtaatccagcatataaacagaaccaaagacaaaaaccacatgattatctcaatagatgcagaaaaagcctttgacaaaattcaacaacccttcatgctaaaaactctcaataaattaggtattgatgggacgtatttcaaaataataagagctatctatgacaaacccacagccaatatcatactgaatgggcaaaaactggaagcattccctttgaaaactggcacaagacagggatgccctctctcaccactcctattcaacatagtgttggaagttctggccagggcaatcaggcaggagaaggaaataaagggtattcaattaggaaaagaggaagtcaaattgtccctgtttgcagacgacatgattgtttatctagaaaaccccatcgtctcagcccaaaatctccttaagctgataagcaacttcagcaaagtctcaggatacaaaatcaatgcataaaaatcacaagcattcttatacaccaacaacagacaaacagagagccaaatcatgggtgaactcccattcacaattgcttcaaagagaataaaatacctaggaatccaacttacaagggatgtgaaggacctcttcaaggagaactacaaaccactgctcaaggaaataaaagaggagacaaacaaatggaagaacattccatgctcatgggtaggaagaatcaatatcgtgaaaatggccatactgcccaaggtaatttacagattcaattccatccccatcaagctaccaatgactttcttcacagaattggaaaaaactactttaaagttcatatggaaccaaaaaagagcccgcatcgccaagtcaatcctaagccaaaagaacaaagctggaggcatcacactacctgacttcaaactatactacaaggctacagtaaccaaaacagcatggtactgctaccaaaacagagatatagatcaatggaacagaacagagccctcagaaataacgccgcatatctacaactatctgatctttgacaaacctgagaaaaacaagcaatggggaaaggattccctatttaataaatggtgctgggaaaactggctagccatatgtagaaagctgaaactggatcccttccttacaccttatacaaaaatcaattcaagatggattaaagatttaaacgttaaacctaaaaccataaaaaccctagaagaaaacctaggcattaccattcaggacataggtgtgggcaaggacttcatgtccaaaacaccaaaagcaatggcaacaaaagacaaaattgacaaatgggatctaattaaactaaagagcttctgcacagcaaaagaaactaccatcagagtgaacaggcaacctacaacatgggagaaaattttcgcaacctactcatctgacaaagggctaatatccagaatctacaatgaactcagacaaatttacaagaaaaaaacaaacaaccccatcaaaaagtgggcgaaggacatgaacagacacttctcaaaagaagacatttatgcagccaaaaaacacatgaagaaatgctcatcatcactggccatcagagaaatgcaaatcaaaaccactatgagatatcatctcacaccagttagaatggcaatcattaaaaagtcaggaaacaacaggtgctggagaggatgcggagaaataggaacacttttacactgttggtgggactgtaaactagttcaaccattgtggaagtcagtgtggcgattcctcagggatctagaactagaaataccatttgacccagccatcccattactgggtatatacccaaatgagtataaatcatactgctataaagacacatgcacacgtatgtttattgcggcactattcacaatagcaaagacttggaaccaacccaaatgtccaacaatgatagactggattaagaaaatgtggcacatatacaccatggaatactatgcagccataaaaaatgatgagttcatatcctttgtagggacatggatgaaattggaaaccatcattctcagtaaactatcgcaagaacaaaaaaccaaacaccgcatattctcactcataggtgggaattgaacaatgagatcacatggacacaggaaggggaatatcacactctggggactgtggtggggtggggggaggggggagggatagcattgggagatatacctaatgctagatgacacattagtgggtgcagcgcaccagcatggcacatgtatacatatgtaactaacctgcacaatgtgcacatgtaccctaaaacttagagtataataaaaaaaaaaa

SEQ ID NO: 808 - DNA, 1792 bp, Homo sapiens
  source 1..1792: mol_type = other DNA
ctccttccacggtctccctctgatgccaagccaaagctggacggtactgctgccatctcggctcactgcaacctccctgcctgattctcctgcctcagcctgccgagtgcctgtgattgcaggcgcgcgccgccacgcctgactggttttcgtttttttttttggtggagacggggttttgctgtgttggccgggctggtctccagctcctaaccgcgagtgatccgccagcctcggcctcccgaggtgctgggattgcagacggagtctcgttcactcagtgctcaatggtgcccaggctggagtgcagcggcgtgatctcggctcgctacaacctccacctcccagctgcccgccttggccccccaaagtgccaagattgcagcctctgcccagccgccaccccatgtgggaagtgaggagcgtctctgcctggccccccatcgtctgggatatgaggagcctctctgcctggctgcccagtctggaaagtgaggagcgtctctgcccggccgccatcccatctaggaagtgaggagcgcctcttcccggccgccatcccatctaggaagcgaggagcgcctcttccccgccgcccatcgtctgagatgtggggagcgcctctgccccgccgccctgtctgggatgtgaggagcgcctctgctgggccgcaaccctgtctgggaggtgaggagcgtctctgcccggccgccccgtctgagaagtgaggaaaccctctgcctggcaaccgccccgtctgagaagtgaggagcccctccgcccggcagctgccccgtctgggaagtgaggagcgtctccgcccggcagccgccccgtccgggagggaggtgggggggggtcagccccccgccgggccagccgccccgtccgggaggtgaggggctcctctgcccggccgcccctactgggaagtgaggagccctctgcccggccagccgccccgtccgggagggaggtggggggtcagccccccgcccggccagccgcccagtccgggagggaggtggggggtcagccccccgcccagccagccgccccgtccgggagggaggtggggggatcagccccccgcctggccagccgccccatccgggaggtgaggggcgcctctgcccggccgcccctactgggaagtgaggagcccctctgcccggccagccgccccgtccgggaggtgaggggtgcttctgcccggccgcccctactgggaagtgaggagcccctctgcccggccacgaccccgtctgggaggtgtgcccagcggctcattggggatgggccatgatgacaatggcggttttgtggaatagaaaggcgggaagggtggggaaaaaattgagaaatcggatggttgccgggtctgtgtggatagaagtagacatgggagacttttcattttgttctgtactaagaaaaattcttctgccttgggatcctgttgatctgtcaccttatccccaaccccgtgctctctgaaacatgtgctgtgtccactcagggttaaatggattaagggcggtgcaagatgtgctttgttaaacagatgcttgaaggcagcatgctcgttaagagtcatcaccactccctaatctcaagtacccagggacacaaacactgcggaaggccgcagggacctctgcctaggaaaaccagagacctttgttcacttgtttatctgctgaccttccctccactattgtcctgtgaccctgccaaatccccctctgcgagaaacacccaagaatgatcaataaaaaaaaaaaaaataaaa

SEQ ID NO: 809 - DNA, 1768 bp, Homo sapiens
  source 1..1768: mol_type = other DNA
cttccttcctcccttcctccctccttccctcctttcgacggtctccctccattgctgagcctggactctactgccgtgatcttggctcgctgcaacctccctgcctcgggctcccgtgattgtcctgcctcggcccgcccagtgcctgggattgcagggacgcgccgccatgcctgactggtttttgtatttttggtggagatggggtttcgccgtgttggccaggctggtctccagctcctgacctcgagtgatctgcccgcctcggcctcccgaggtgctgggattgcagagggagtctcgctcactcaatgctcaatgttgcccaggctggagtgcagtggcatgatctcggctcgctacaacctccacctcccagctgcctgccttggcctcccaaagtgctaaaattacagcttctgcccagccgccaccctgtctaggaagtgaggagcgtctctgcctggccacccatcgtctgggatgtaaggagcgcctctgcccggccaccccgtctgggatgtgaggagcgcctctgcccggctgccaccccgtctaggaagtgaggagcatctctgcctggccgcccatcgtctgggatgtgaggagcgcctctgcccggccaccccgtctgggatgtgaggagcgcctctgcccggctgccaccccgtctaggaagtgaggagcatctctgcctggccgcccatcgtctgggatgtgaggagcgcctctgcccggccgccccgtctgggaggtgaggagtgcctctgcccggccacccatcgtctgggaagtgaggagcgcctctgcctggccaccccgtctgggaagtgaggagcgcctctgcctggccaccccgtctgggaagtgaggagcgcctctgcccggctgcccatcgtctgggatgtgaggagcgcctctgcctggccaccccgtctgggaagtgaggagcgcctctgcctggccaccccgtctgggatgtgaggagcgcctctgcccggctgcccatcgtctgggatgtgaggagcgcctctgcctggccaccccgtctgggaagtgaggagcgcctctgcctggccaccccgtctgggatgtgaggagcgcctctgcccggctgcccatcgtctgggatgtgaggagcgcctctgcccggccgccccgtctgggaagtgaggagcgcctctgcctggctgctgtgcaatcttccaagtgtgaagtgacagcctttctgcaggtgtacccaacagctccgaagagacagtgaccatcgagaatgggccatgatgacgatggcggttttgtcaaaaagaaaagggggaaatgtggggaaaagaacgagagatcagattgttactgtgtctgtgtagaaagaagtagacacaggagactccattttgttctgtactaagaaaaattcttctgccttgggatgctgttaatctataaccttactcccaaccccctgctctctgaaacatgtgctgtgtcaactcagggttaaatggattaagggcggtgcaagatgtgctttgttaaacagatgcttgaaggcagcatgctcattaagagtcatcaccactccctaatctcaagtacccagggacacaaacactgcggaaggccacagggacctctgcctaggaaaaccagagacctttgttcacgtgtttatctgctgaccttctctccactattatcctatgaccctgccacatccccctctccaagaaacacccaagaatgatcaataaatactaaaaaaaaaaaa

SEQ ID NO: 810 - DNA, 289 bp, Homo sapiens
  source 1..289: mol_type = other DNA
ggctgggtgcagtggctcacacctataatcccaacactttgggaggaagaagtaggatagtttgagaccagcctgggcaacataagacagacctcatcttttattttaaaataaaagtaaaaataaattagccaggcatggttatgtgaacctgtggtcccagctactcaggaggcggaggtggaaggatagcttgaactcggaggatgctgctgcagtgatccatgatcgcaccactgcacttcagtctgggcaataggtgagactctgtctcaaaaaagaaaaaaaa

SEQ ID NO: 811 - DNA, 6031 bp, Homo sapiens
  source 1..6031: mol_type = other DNA
agggaggagccaagatggccgaataggaacagctccggtctacagctcccagcgtgagcgacgcagaagacgggtgatttctgcatttccatctgaggtaccgggttcatctcactagggagcgccagacagtgggcgcaggccagtgtgtgcgcgcaccgtgcgcgagccgaagcagggcgaggcattgcctcacctgggaagcgcaagggatcagggagttccctttccgagtcaaagaaaggggtgacggacgcacctggaaaatcgggtcactcccacccgaatattgcgcttttcagaccggcttaagaaacggcgcaccacgagactatatcccacacctggctcagagggtcctacgcccacggaatctcgctgattgctagcacagcagtctgagatcaaactgcaaggcggcaacgaggctgggggaggggcgcccgccatagcccaggcttgcttaggtaaacaaagcagccgggaagctcgaactgggtggagcccaccacagctcaaggaggcctgcctgcctctgtaggctccacctctgggggcagggcacagacaaacaaaaagacagcagtaacctctgcagacttaagtgtccctgtctgacagctttgaagagagcagtggttctcccagcacgcagctggagatctgagaacgggcagactgcctcctcaagtgggtccctgacccctgacccccgagcagcctaactgggaggcaccccccagcagaggcacactgacacctcacacggcagggtattccaacagacctgcagctgagggtcctgtctgttagaaggaaaactaacaaccagaaaggacatctacactgaaaacccatctgtacatcaccatcatcaaagaccaaaagtagataaaaccacaaagatggggaaaaaacagaacagaaaaactggaaactctaaaacgcagagcgcctctcctcctccaaaggaacgcagttcctcaccagcaacagaacaaagctggatggagaatgattttgacgagctgagagaagaaggcttcagacgatcaaattactctgagctacgggaggacattcaaaccaaaggcaaagaagttgaaaactttgaaaaaaatttagaagaatgtataactagaataaccaatacagagaagtgcttaaaggagctgatggagctgaaaaccaaggctcgagaactacgtgaagaatgcagaagcctcaggagccgatgcgatcaactggaagaaagggtatcagcaatggaagatgaaatgaatgaaatgaagcgagaagggaagtttagagaaaaaagaataaaaagaaatgagcaaagcctccaagaaatatgggactatgtgaaaagaccaaatctacgtctgattggtgtacctgaaagtgatgtggagaatggaaccaagttggaaaacactctgcaggatattatccaggagaacttccccaatctagcaaggcaggccaacgttcagattcaggaaatacagagaacgccacaaagatactcctcgagaagagcaactccaagacacataattgtcagattcaccaaagttgaaatgaaggaaaaaatgttaagggcagccagagagaaagttcgggttaccctcaaaggaaagcccatcagactaacagcggatctctcggcagaaaccctacaagccagaagagagtgggggccaatattcaacattcttaaagaaaagaattttcaacccagaatttcatatccagccaaactaagcttcataagtgaaggagaaataaaatactttatagacaagcaaatgctgagagattttgtcaccaccaggcctgccctaaaagagctcctgaaggaagcggtaaacatggaaaggaacaaccggtaccagccgctgcaaaatcatgccaaaatgtaaagaccatcgagactaggaagaaactgcatcaactaatgagcaaaatcgccagctaacatcataatgacaggatcaaattcacacataacaatattaactttaaatataaatggactaaattctgcaattaaaagacacagactggcaagttggataaagagtcaagacccatcagtgtgctgtattcaggaaacccatctcacgtgcagagacacacataggctcaaaataaaaggatggaggaagatctaccaagccaatggaaaacaaaaaaaggcaggggttgcaatcctagtctctgataaaacagactttaaaccaacaaagatcaaaagagacaaagaaggccattacataatggtaaagggatcaattcaacaagaggagctaactatcctaaatatttatgcacccaatacaggagcacccagattcataaagcaagtcctcagtgacctacaaagagacttagactcccacacattaataatgggagactttaacaccccactgtcaacattagacagatcaatgagacagaaagtcaacaaggatacccaggaattgaactcagctctgcaccaagcagacctaatagacatctacagaactctccaccccaaatcaacagaatatacatttttttcagcaccacaccacacctattccaaaattgaccacatagttggaagtaaagctctcctcagcaaatgtaaaagaacagaaattataacaaactatctctcagaccacagtgcaatcaaactagaactcaggattaagaatctcactcaaagccgctcaactacatggaaactgaacaacctgctcctgaatgactactgggtacataacgaaatgaaggcagaaataaagatgttctttgaaaccaacgagaacaaagacaccacataccagaatctctgggacgcattcaaagcagtgtgtagagggaaatttatagcactaaatgcctacaagagaaagcaggaaagatccaaaattgacaccctaacatcacaattaaaagaactagaaaagcaagagcaaacacattcaaaagctagcagaaggcaagaaataactaaaatcagagcagaactgaaggaaatagagacacaaaaaacccttcaaaaaatcaatgaatccaggagctggtttttcgaaaggatcaacaaaattgatagaccgctagcaagactaataaagaaaaaaagagagaagaatcaaatagacacaataaaaaatgataaaggggatatcaccaccgatcccacagaaatacaaactaccatcagagaatactacaaacacctctacgcaaataaactagaaaatctagaagaaatggatacattcctcgacacatacactctcccaagactaaaccaggaagaagttgaatctctgaatagaccaataacaggctctgaaattgtggcaataatcaatagtttaccaaccaaaaagagtccaggaccagatggattcacagccgaattctaccagaggtacaaggaggaactggtaccattccttctgaaactattccaatcaatagaaaaagagggaatcctccctaactcattttatgaggccagcatcattctgataccaaagccgggcagagacacaaccaaaaaagagaattttagaccaatatccttgatgaacattgatgcaaaaatcctcaataaaatactggcaaaccgaatccagcagcacatcaaaaagcttatccaccatgatcaagtgggcttcatccctgggatgcaaggctggttcaatatacgcaaatcaataaatgtaatccagcatataaacagagccaaagacaaaaaccacatgattatctcaatagatgcagaaaaagcctttgacaaaattcaacaacccttcatgctaaaaactctcaataaattaggtattgatgggacgtatttcaaaataataagagctatctatgacaaacccacagccaatatcatactgaatgggcaaaaactggaagcattccctttgaaaactggcacaagacagggatgccctctctcaccgctcctattcaacatagtgttggaagttctggccagggcaatcaggcaggagaaggaaataaagggtattcaattaggaaaagaggaagtcaaattgtccctgtttgcagacgacatgattgtttatctagaaaaccccatcgtctcagcccaaaatctccttaagctgataagcaacttcagcaaagtctcaggatacaaaatcaatgtacaaaaatcacaagcattcttatacaccaacaacagacaaacagagagccaaatcatgggtgaactcccattcacaattgcttcaaagagaataaaatacctaggaatccaacttacaagggatgtgaaggacctcttcaaggagaactacaaaccactgctcaaggaaataaaagaggacacaaacaaatggaagaacattccatgctcatgggtaggaagaatcaatatcgtgaaaatggccatactgcccaaggtaatttacagattcaatgccatccccatcaagctaccaatgactttcttcacagaattggaaaaaactactttaaagttcatatggaaccaaaaaagagcccgcatcgccaagtcaatcctaagccaaaagaacaaagctggaggcatcacactacctgacttcaaactatactacaaggctacagtaaccaaaacagcatggtactggtaccaaaacagagatatagatcaatggaacagaacagagccctcagaaataatgccgcatatctacaactatctgatctttgacaaacctgagaaaaacaagcaatggggaaaggattccctatttaataaatggtgctgggaaaactggctagccatatgtagaaagctgaaactggatcccttccttacaccttatacaaaaatcaattcaagatggattaaagatttaaacgttaaacctaaaaccataaaaaccctagaagaaaacctaggcattaccattcaggacataggcgtgggcaaggacttcatgtccaaaacaccaaaagcaatggcaacaaaagacaaaattgacaaatgggatctaattaaactaaagagcttctgcacagcaaaagaaactaccatcagagtgaacaggcaacctacaacatgggagaaaattttcgcaacctactcatctgacaaagggctaatatccagaatctacaatgaactcaaacaaatttacaagaaaaaaacaaacaaccccatcaaaaagtgggcgaaggacatgaacagacacttctcaaaagaagacatttatgcagccaaaaaacacatgaagaaatgctcatcatcactggccatcagagaaatgcaaatcaaaaccactatgagatatcatctcacaccagttagaatggcaatcattaaaaagtcaggaaacagcaggtgctggagaggatgcggagaaataggaacacttttacactgttggtgggactgtaaactagttcaaccattgtggaagtcagtgtggcgattcctcagggatctagaactagaaataccatttgacccagccatcccattactgggtatatacccaaatgagtataaatcatgctgctataaagacacatgcacacgtatgtttattgtggcactattcacaatagcaaagacttggaaccaacccaaatgtccaacaatgatagactggattaagaaaatgtggcacatatacaccatggaatactatgcagccataaaaaatgatgagttcatatcctttgtagggacatggatgaaattggaaaccatcattctcagtaaactatcgcaagaacaaaaaaccaaacaccgcatattctcactcataggtgggaattgaacaatgagatcacatggacacaggaaggggaatatcacactctggggactgtggtggggtcgggggaggggggagggatagcattgggagatatacctaatgctagatgacacattagtgggtgcagcgcaccagcatggcacatgtatacatatgtaactaacctgcacaatgtgcacatgtaccctaaaacttagagtataataaaaaaaaaaaga

SEQ ID NO: 812 - DNA, 6120 bp, Homo sapiens
  source 1..6120: mol_type = other DNA
ttccaagatggccaaataggaacagctccaacctacagctcccagtgtgagcgatacagaagatgggtgatttctgcatttccaatggaggtaccggtttcatctcactggggcttgttggacagtgggtgcagcccacggagcagggcagggcatcacctcacctgggaagtgcaaggggtcagggaattccctttcctagccaagggaagccatgacagatggtacctggaaaatcgggacactcccaccctaatactgcacttttccaatggtcttagcaaacgacacaccaggagattatatcccacacctggcttggagggtcccatgcccatggagcctctctctctgctagcacagcagtctgagatcgaactgcaaggcagcagcaaggctgggggaggggtgcccaccattgctgaggcttgagtaggtaaacaaagcagccagaagctcaaactgggtggagcccactgcagctcaaggaggcctgcctgcctctgtagactccacctctgggggcagggcatagctgaacaaaaggcagcagaaacttctgcagacttaaacatccctgtctgacagctttgaagagagtaggggttctcccagcatggagtttcagatctgagaacggacagactgcctcctcaagtgggtccctgacccctgagtagcctaactgggaaacacctcccagtaggggccaactgacacctcatgcagccgggtgcccctctgagatgaagcttccagaggcaggatcaggcagcaacatttgctcttctgcaatatttgctgttctgcaggctctgctggcaatacccaggcaaaaagggtctggagtggacctccagcaaactccaacagacctgcagctgagggtcctgactgttagaaggaaaactaacaaacagaaaggacatccacaccaaaaccccatctgtacatcaccatcaccaaagaccaaagatagataaaaccacaaagatggggagaaaccagaacagaaaagctgaaaattctaaaaatctgagcacctcttctcctccaaaggaatgcagctcctcaccagcaatggaacaaagctggacagagaatgactttgacgaattgggagaagaaggtttcagatgatcggtaataacaaacttctctgagctaaaggaggatgttcaaacccatcgcaaagaagctaaaaaccttgaaaaaagattagatgaatggataactagaataagcagcgtagagaagaccttaaatgacctgatggagctgaaaaccatggcatgagaactacgtgacgcatgcacaagcttcagtagccaattcaatcaagcagaagaaagggtatcagtgattgaagatcaaatgaatgaaatgaagtgagaagagtttagaaaaaaaaaaaagagtaaaaagaaatgaacaaggcctccaagaaatatgggactatgtgaaaagaccaaatctatgtctgattggtgtacctgaaagtgacagggcgaatggaaccaagttggaaaacactgttcaggatattatccaggagaacttccccaacctagcaaggcaggccaacattcaaattcaggaaatacagagaatgccacaaagatactcctcaagaagagcaactccaaaacacataattgtcagattcaccaaagttgaaatgaaggaaaaaatgttaagggcagccagagagaaaggtcggcatacccacaaagggaagtccatcaaactaatagcggatctcttggcagaaactctacaagccagaagagagagggggccaatattcaacattcttaaagaaaagaattttcaacccagaatttcatatccagccaaattaagcttcatacatgaaggagaaataaagtcctttacagacaaacaaatgctgagagattttgtcaccaccaggcctgccttacaagagctcctgaaggaagcactaaacatggaaaggaacaactggtaccagccactgcaaaaacatgcaaaattgtaaagaccatcgatgctaggaagaaactgcatcaactaataagcaaaataaccagctaacatcataatgacaggatcaaattcacacataacaatattaaccttgaacgtaaatggactaaatgctccaattaaaagacacaaactggcaaattggataaagagccaagacccatcagtgtgctgtattcaggatctcacgtgcagagacacacataggctcaaaataaaggtttggagaaagatctaccaagtaaatggaaaacaaaaaaagcaggggttgcaatcctagtgtgataaaacagactttaaacaaacaaagatcaaaagagaaaagaaggccattacataatggaaaagggatcaattcaacaagaagagctaactatcctaaatatatatgcacccaatacaggagcacccagattcataaagcaagcccatagagacctacaaagagacttagactcccacacaataataatgggagactttaataccccactgtcaacattagacagatcgatgaggccgaaagttaacaaggatatccaggaattgaactcacctctgcaccaagtggacctaatagacatctacagaactctgtaccccaaatcaacagaatatacattcttgtcatcaccgcgtcacacttattccaaaattaaccacatggttggaagtaaagcactcctcaacaaatgtaaaagaagagaaattatataacaaactgtctgtcagaccacagtgcaatcaaactggaactcaggactaagaaatcactcaaaaccgctcaactacatggaaactgaacaacctgctcctgcgtaattactggatacacaacgaaatgaaggcagaaataaagatgttctttgaaaccaacgagaacaaagacacaacataccagaatctctgggatatatttaaagcagtgtgtagagggaagtttatagcgctaaatgtccacaagagaaaggaggaaagatctaaaattgacaccctaatattacaattaaaagaactagagaagcaagagcaaacacattcaaaagctagcagaaggcaagaagtaactaagattagagcagaactgaaggagatagagacataaaaaacccttcaaaaaaatcaatgaattcaggagctggttttttgaaaagatcaacaaaattgatagactgctagcaagactaataaagaagaaaagagagaagaatcaaataggcacaataaaaaatgataaaggggatatcaccacctatcccacagaaatacaaactaccatcagagaatactataaacacctctatgcaaataaactggaaaatctagaagaaatgaataaattcctcaacacatacaccctgccaagactaaaccaggaagaagttgaatccctgaatagaccaataacaggctctgaaattgaggcaatagtttatagcctaccaaccaaaaaaagtccaggaccagatggattcacagccgaattctaccagaggtacaaagaggagctggtaccattccttctgaaactattccaatcaatagaaaaagtgggaatcctctctaactcattttatgaggtcagcatcatcctgataccaaagtctggcagagagacaaacaaaaaaagagaattttagaccaacatccctgatgaacatcagtgcaaaaatcctcaataaaatactggcaaaccgaatccagcagcacatcaaaaagcttatccaccacaatcaagttggcttcatccctgggattcaaggctggtgcaacatatgcaaatcaataaacgtaatccagcatataagcagaaccagagacaaaaaccacatgattatctcaatagatgcagaaaaggcctttgacaaaattcaacaaccttcatgctaaaaactctcaataaactaggtattgatgggacgtatctcaaaataataaaagctatttatgacaaacccacacccaatatcatactgaatgggcaaaaactggaagcattccctttgaaaactggcacaagacagggatgccctctatcaccattcctattcaacatagtgttggaagttctggccagggcaatcaggcaggagaaagaaataaagggtattcaattaggaaaagaggaagtcaaattgtccctgtttgcagatgacaagattgtatatttagaaaaccccatcgtctcagcccaaaatctccttaagttgataagcaacttcagcaaagtctcaggatacaaaatcaatgtgcaaaaatcacaagcattcctatataccagtaacagacagagagccaaatcttgagtgaactcccattcacaatggcttcaaagcaaataaaatacctaggaatacaacttgcaagggatgtgaaggacctcttcaaggagaactacaaaccactgctcaatgaaataaaagacgacacaaacaaatggaagaacattccatgctcatggataggaagaatcaatatcgtgaaaatggccatactgcccaaggtaatttatagattcaatgccatccccatcaagctaccaatgactttcttcacagaattggaaaaaactactttaaagttcatatggaaccaaaaaagaacccacattgccaagacaatcctaagccaaaagaacaaagctggaggcatcatgctacctgacttcaaactatgctacaaggctacagtaaccaaaacagcatggtactggtaccaaaacagagacatggaccaatggaacagaacagagccctcagaaataatgccacacatctacaacaatctgatctttgacaaacctgacaaaaacaagaaatggggaaaggattccctatttaataaatggtgctgggaaaactggctagccatatgtagaatgctgaaacttgatcccttccttacaccttacacaaaaattaattcaggatggattaaagacttaaattttagacctaaaaccataaaaactctagaagaaaacctagacaataccattcaggacacaggcatgggcaagaacttcatgactaaaacaccaaaagcaatggcaacaaaagccaaaattgacaaatgggatctaattaaactaaagagcttcagcacagcaaaagaaactgccatcagagtgagcaggtaacctacagagtgggagaaaatctttacaatctacccatctgacaaagggctaatatccagaatctacaaagaacttaaacaaaatttacaagaaaaaaatcaaacaaccccatcaaaaagtgggcaaaggatatgaatggacacctctcaaaagaagacatttacgcagccaacagacacatgaaaaaatgctcatcatcgctggccatcagacaaatgcaaatccaaaccacaatgagataccatctcacaccagttagaatggcgatcattaaaaagtcaggaaacaacaggtgctggagaggatgtggagaaataggaacacttttattacactgttggtgggactgtaaactagttcaaccattgtggaagacagtgtggcaattcctcaaggatctagagctagaaataccatttgacccagccatcccattactgggtatataaccaagggattataaatcatgctgctgtaaagacacatgcacacttatgtttattgtggcactattcacaatagcaaatacttggaaccaacccaaatgtccatcaatgatagactggattaagaaaatgtggcacatatacaccatggaatactatgcagccataaaaagggataagtttatgtcctttgtagggacatggatgaagctggaaaccatcattctcagcaaactatcgcaaggacagaaaaccaaacacgcatgttctcactcataggtgggaattgaacaatgagaacacttggacacaggaagtggaacatcacacactggggcctgtagtggggtggcgggagcggagagagatagcattaggagatatacctaatgtaaatgacgagttaatgggtgcagcacacccacatggcacatgtatacatacgtaacaaacctgcacgttgtgcacatgcaccctagaacttaaagtataataataataaaaaga

SEQ ID NO: 813 - DNA, 2906 bp, Homo sapiens
  source 1..2906: mol_type = other DNA
aataaagaaaaaaagagagaagaatcaaatagacacaataaaaaatgataaaggggatatcaccaccgatcccacagaaatacaaactaccatcagagaatactacaaacacctctacgcaaataaactagaaaatctagaagaaatggatacattcctcgacacatacactctcccaagactaaaccaggaagaagttgaatctctgaatcgaccaataacaggctctgaaattgtggcaataatcaatagtttaccaaccaaaaagagtccaggaccagatggattcacagccgaattctaccagaggtacaaggaggaactggtaccattccttctgaaactattccaatcaatagaaaaagagggaatcctccctaactcattttatgaggccagcatcattctgataccaaagccgggcagagacacaaccaaaaaagagaattttagaccaatatccttgatgaacattgatgcaaaaatcctcaataaaatactggcaaaccgaatccagcagcacatcaaaaagcttatccaccatgatcaagtgggcttcatccctgggatgcaaggctggttcaatatacgcaaatcaataaatgtaatccagcatataaacagagccaaagacaaaaaccacatgattatctcaatagatgcagaaaaagcctttgacaaaattcaacaacccttcatgctaaaaactctcaataaattaggtattgatgggacatatttcaaaataataagagctatctatgacaaacccacagccaatatcatactgaatgggcaaaaactggaagcattccctttgaaaaccggcacaagacagggatgccctctctcaccgctcctattcaacatagtgttggaagttctggccagggcaatcaggcaggagaaggaaataaagggtattcaattaggaaaagaggaagtcaaattgtccctgtttgcagacgacatgattgtttatctagaaaaccccatcgtctcagcccaaaatctccttaagctgataagcaacttcagcaaagtctcaggatacaaaatcaatgtacaaaaatcacaagcattcttatacaccaacaacagacaaacagagagccaaatcatgggtgaactcccattcacaattgcttcaaagagaataaaatacctaggaatccaacttacaagggatgtgaaggacctcttcaaggagaactacaaaccactgctcaaggaaataaaagaggagacaaacaaatggaagaacattccatgctcatgggtaggaagaatcaatatcgtgaaaatggccatactgcccaaggtaatttacagattcaatgccatccccatcaagctaccaatgactttcttcacagaattggaaaaaactactttaaagttcatatggaaccaaaaaagagaccgcattgccaagtcaatcctaagccaaaagaacaaagctggaggcatcacactacctgacttcaaactatactacaaggctacagtaaccaaaacagcatggtactggtaccaaaacagagatatagatcaatggaacagaacagagccctcagaaataatgccgcatatctacaactatctgatctttgacaaacctgagaaaaacaagcaatggggaaaggattccctatttaataaatggtgctgggaaaactggctagccatatgtagaaagctgaaactggatcccttccttacaccttatacaaaaatcaattcaagatggattaaagatttaaacgttaaacctaaaaccataaaaaccctagaagaaaacctaggcattaccattcaggacataggcgtgggcaaggacttcatgtccaaaacaccaaaagcaatggcaacaaaagacaaaattgacaaatgggatctaattaaactaaagagcttctgcacagcaaaagaaactaccatcagagtgaacaggcaacctacaacatgggagaaaatttttgcaacctactcatctgacaaagggctaatatccagaatctacaatgaactcaaacaaatttacaagaaaaaaacaaacaaccccatcaaaaagtgggcgaaggacatgaacagacacttctcaaaagaagacatttatgcagccaaaaaacacatgaagaaatgctcatcatcactggccatcagagaaatgcaaatcaaaaccactatgagatatcatctcacaccagttagaatggcaatcattaaaaagtcaggaaacaacaggtgctggagaggatgcggagaaataggaacacttttacactgttggtgggactgtaaactagttcaaccattgtggaagtcagtgtggcgattcctcagggatctagaactagaaataccatttgacccagccatcccattactgggtatatacccaaatgagtataaatcatgctgctataaagacacatgcacacgtatgtttattgcggcactattcacaatagcaaagacttggaaccaacccaaatgtccaacaatgatagactggattaagaaaatgtggcacatatacaccatggaatactatgcagccataaaaaatgatgagttcatatcctttgtagggacatggatgaaattggaaaccatcattctcagtaaactatcacaagaacaaaaaaccaaacaccgcatattctcactcataggtgggaattgaacaatgagatcacatggacacaggaaggggaatatcacactctggggactgtggtggggtcgggggaggggggagggatagcattgggagatatacctaatgctagatgacacattagtgggtgcagcgcaccagcatggcacatgtatacatatgtaactaacctgcacaatgtgcacatgtaccctaaaacttagagtataataaaaaaaaaaaa

SEQ ID NO: 814 - DNA, 1647 bp, Homo sapiens
  source 1..1647: mol_type = other DNA
tctccctctcccctctcccctctccacggtctccctctccctctctctctccacagtctccctctgatgccgagcggaggctggactgtacagccaccatctcggctcactgcaacatccctgcctgattctcctgcctcagcctgccgagtgcctgggattgcaggctcgcgccgccacgcctgactggtttttgtattttttggtggagaaggggtttcgccatgttggctgggctggtctccagctcctgaccgcaagtgatctgcccgcctcggcctcccgaggtgccaggattgcagacggagtctcgctcactcagtgctcaatgttgcccaggctggagtgcagtggcgtgatctcagctcgctacaacctccacctcccagccgcctgccttggcctcccaaagtgctgagattgcagcctctgcccggccgccaccccgtctgggaagtgaggagcgtctctgcctggccgcccatcgtctgggatgtgaggagcccctctgcccggccgcccagtctgagatgtgaagagcgcctctgcccggccgcgaccccgtctgggaactgaggagtgtctctgcctggccacccatcgtctgggatgtgaggagcccctctgcccggccgcccagtctgggaaatgaggagcgcctcttcctggccaccatcccgtctgggaagtgaggagcgtctctgcccggccgcccatcgtctgagatgtggggagcgcctctgcccggccgcaaccccgtctgggaactgaggagtgtctctgcccgaccgccaccccgtctgggaggtgaggaacgtttctgcccagccgcccgtctgagaagtgaggagcccctccgcctggcagccgccccatctgggaagtgaggagcccctccgcccggcagccgccccgtccgggaggtggggggcagcccccacccggccagccaccccgcacgggagggaggtggggccagcccctgcctggccagccgccccattcgggaggtggggggcagcccctgcccggcagccatcccgtccgggaggtggggggcgcctctgcccggctgccccatctgggaagtgaggagcccctctgcccggcagccaccccgtctgggaggtgtgcccaacagctcattgagaacgggccatgatgacgatggcggttttgtcgaatagaaaggggggaaatgtggggaaaagaaagagaaatcagattgttgcggcgtctgtgtagaaagaagtagatataggagactccattttgttctgtactaagaaaaattcttctgccttgggatgctgttaatctataaccttacccccaaccccgtgctctctgaaacatgtgctgtgtccactcagggttaaatggattaagggcggtgcaagatgtgctttgttaaacagatgcttgaaggcagcatgctcgttaagagtcatcaccactccctaatctcaagtacccagggacacaaacactgcggaaggctgcagggtcctctgcctaggaaaaccagagacccttgttcacatgtttatctgctgaccttccctccactattgtcctatgaccctgccaaatccccctctccaaaaaacacccaagaatgatcaataaatactaaaaaaaaaaaaa

SEQ ID NO: 815 - DNA, 1279 bp, Homo sapiens
  source 1..1279: mol_type = other DNA
gcaatggggaaaggattccctatttaataaatggtgctgggaaaactggctagccatatgtagaaagctgaaactggatcccttccttaaaccttatataaaaattaattcaagatggattaaagacttaaacgttatacctaaaaccataaaaaccctagaagaaaacctaggcattaccattcaggacataggcatgggcaaggacttcatgtctaataaaacaccaaaagcaatggcaacaaaagccaaaattgacaaatgggatctaattaaactaaagagcttctgcacagcaaaagaaacaaccatcagagtgaacaggcaacctacaacatgggagaaaattttcacaacctactcatctgacaaagggctaatacccagaatctacaatgaactcaaacaaatttacaagaaaaaaacaaacaaccccatcaaaaagtgggcagaggatatgaacagacaattctcaaaagaagacatttatgcagccagaagacacatgaaaaaatgctcatcatcactggccatcagagaaatgcaaatcaaaaccacaatgagataccatctcacaccagttagaatggcaatcattgaaaagtcaggaaacaacaggtgctggagaggatgtggagaaataggaacacttttacactgttggtgtgactgtaaactagttcaaccattgtggaagtcagtgtggcgattcctcagggatctagaactagaaataccatttgacccagccatcccattactgggtatatacccaaaggactataaatcatgctgctataaagacacatgcacatgtatgtttactgcggcactattcacaatagcaaagacttggaaccaacccaaatgtccaacaatgatagactggattaagaaaatgtggcacatatacaccatggaatgctatgcagccataaaaaatgatgagttcatgtcctttgtagggacatggatgaaactggaaatcatcattctcagtaaactatcacaaggacaaaaaaccaaacaccgcatgttctcactcataagtgggaattgaacaatgagaacacatggacacaggaaggggaacatcacactctggggactgttgtggggtagggggaggggggagggatagcattaggagatatacctaatgctaaatgacgagttaatgggtacagcacaccagcatggcacatgtatacatatgtaactaacctgcacattgtgcacatgtcccctaaaacttaaagtataataataataattaaaa

SEQ ID NO: 816 - DNA, 7534 bp, Homo sapiens
  source 1..7534: mol_type = other DNA
tctggtgcccaacgtggaggcttttctctagggtgaaggtacgctcgagcgtggtcattgaggacaagtcgacgagagatcccgagtacatctacagtcagccttacggtaagcttgtgcgctcggaagaagctagggtgataatggggcaaactaaaagtaaaattaaaagtaaatatgcctcttatctcagctttattaaaattcttttaaaaagacggggagttaaagtatctacaaaaaatctaatcaagctatttcaaataatagaacaattttgcccatggtttccagaacaaggaactttagatctaaaagattggaaaagaattggtaaggaactaaaacaagcaggtaggaagggtaatatcattccacttacagtatggaatgattgggccattattaaagcagctttagaaccatttcaaacagaagaagatagcgtttcagtttctgatgcccctggaagctgtataatagattgtaatgaaaacacaaggaaaaaatcccagaaagaaacggaaggtttacattgcgaatatgtagcagagccggtaatggctcagtcaacgcaaaatgttgactataatcaattacaggaggtgatatatcctgaaacgttaaaattagaaggaaaaggtccagaattagtggggccatcagagtctaaaccacgaggcacaagtcctcttccagcaggtcaggtgcctgtaacattacaacctcaaaagcaggttaaagaaaataagacccaaccgccagtagcctatcaatactggcctccggctgaacttcagtatcggccatccccagaaagtcagtatggatatccaggaatgcccccagcaccacagggcagggcgccataccctcagccgcccactaggagacttaatcctacggcaccacctagtagacagggtagtaaattacatgaaattattgataaatcaagaaaggaaggagatactgaggcatggcaattcccagtaacgttagaaccgatgccacctggagaaggagcccaagagggagagcctcccacagttgaggccagatacaagtctttttcgataaaaaagctaaaagatatgaaagagggagtaaaacagtatggacccaactccccttatatgaggacattattagattccattgctcatggacatagactcattccttatgattgggagattctggcaaaatcgtctctctcaccctctcaatttttataatttaagacttggtggattgatggggtacaagaacaggtccgaagaaatagggctgccaatcctccagttaacatagatgcagatcaactattaggaataggtcaaaattggagtactattagtcaacaagcattaatgcaaaatgaggccattgagcaagttagagctatctgccttagagcctgggaaaaaatccaagacccaggaagtacctgcccctcatttaatacagtaagacaaggttcaaaagagccctatcctgattttgtggcaaggctccaagatgttgctcaaaagtcaattgctgatgaaaaagcccgtaaggtcatagtggagttgatggcatatgaaaacgccaatcctgagtgtcaatcagccattaagccattaaaaggaaaggttcctgcaggatcagatgtaatctcagaatatgtaaaagcctgtgatggaatcggaggagctatgcataaagctatgcttatggctcaagcaataacaggagttgttttaggaggacaagttagaacatttggaagaaaatgttataattgtggtcaaattggtcacttaaaaaagaattgcccagtcttaaataaacagaatataactattcaagcaactacaacaggtagagagccacctgacttatgtccaagatgtaaaaaaggaaaacattgggctagtcaatgtcgttctaaatttgataaaaatgggcaaccattgtcgggaaacgagcaaaggggccagcctcaggccccacaacaaactggggcattcccaattcagccatttgttcctcagggttttcagggacaacaacccccactgtcccaagtgtttcagggaataagccagttaccacaatacaacaattgtcccccgccacaagcggcagtgcagcagtagatttatgtactatacaagcagtctctctgcttccaggggagccccacaaaaaacccccacaggggtatatggacccctgcctaaggggactgtaggactaatcttgggacgatcaagtctaaatctaaaaggagttcaaattcatactagtgtggttgattcagactataaaggcgaaattcaattggttattagctcttcaattccttggagtgccagtccaagagacaggattgctcaattattactcctgccatatattaagggtggaaatagtgaaataaaaagaataggagggcttggaagcaccgatccaacaggaaaggctgcatattgggcaagtcaggtctcagagaacagacctgtgtgtaaggccattattcaaggaaaacagtttgaagggttggtagacactggagcagatgtctctatcattgctttaaatcagtggccaaaaaattggcctaaacaaaaggctgttacaggacttgtcggcataggcacagcctcagaagtgtatcaaagtacggagattttacattgcttagggccagataatcaagaaagtactgttcagccaatgattacttcaattcctcttaatctgtggggtcgagatttattacaacaatggggtgcggaaatcaccatgcccgctccatcatatagccccacgagtcaaaaaatcatgaccacgatgggatatataccaggaaagggactagggaaaaatgaagatggcattaaaattccagttgaggctaaaataaatcaagaaagagaaggaatagggaatccttgttaggggcggccactgtagagcctcctaaacccataccattaacttggaaaacagaaaaaccagtgtgggtaaatcagtggccgctaccaaaacaaaaactggaggctttacatttattagcaaatgaacagttagaaaagggtcatattgagccttcgttctcaccttggaattctcctgtgtttgtaattcagaagaaatcaggcaaatggcgtatgttaactgacttaagggctgtaaacgccgtaattcaacccatggggcctctccaacccgggttgccctctccggccatgatcccaaaagattggcctttaattataattgatctaaaggattgcttttttaccatccctctggcagagcaggattgcgaaaaatttgcctttactataccagccataaataataaagaaccagccaccaggtttcagtggaaagtgttacctcagggaatgcttaatagtccaactatttgtcagacttttgtaggtcgagctcttcaaccagttagagaaaagttttcagactgttatattattcattatattgatgatattttatgtgctgcagaaacgaaagataaattaattgactgttatacatttctgcaagcagaggttgccaatgctggactggcaatagcatctgataagatccaaacctctactccttttcattatttagggatgcagatagaaaatagaaaaattaagccacaaaaaatagaaataagaaaagacacattaaaaacactaaatgattttcaaaaattactaggagatattaattggattcggccaactctaggcattcctacttatgccatgtcaaatttgttctctatcttaagaggagactcagacttaaatagtaaaagaatgttaaccccagaggcaacaaaagaaattaaattagtggaagaaaaaattcagtcagcgcaaataaatagaatagatcccttagccccactccaacttttgatttttgccactgcacattctccaacaggcatcattattcaaaatactgatcttgtggagtggtcattccttcctcacagtacagttaagacttttacattgtacttggatcaaatagctacattaatcggtcagacaagattacgaataataaaattatgtgggaatgacccagacaaaatagttgtccctttaaccaaggaacaagttagacaagcctttatcaattctggtgcatggaagattggtcttgctaattttgtgggaattattgataatcattacccaaaaacaaagatcttccagttcttaaaattgactacttggattctacctaaaattaccagacgtgaacctttagaaaatgctctaacagtatttactgatggttccagcaatggaaaagcagcttacacaggaccgaaagaacgagtaatcaaaactccatatcaatcggctcaaagagcagagttggttgcagtcattacagtgttacaagattttgaccaacctatcaatattatatcagattctgcatatgtagtacaggctacaagggatgttgagacagctctaattaaatatagcatggatgatcagttaaaccagctattcaatttattacaacaaactgtaagaaaaagaaatttcccattttatattacacatattcgagcacacactaatttaccagggcctttgactaaagcaaatgaacaagctgacttactggtatcatctgcactcataaaagcacaagaacttcatgctttgactcatgtaaatgcagcaggattaaaaaacaaatttgatgtcacatggaaacaggcaaaagatattgtacaacattgcacccagtgtcaagtcttacacctgcccactcaagaggcaggagttaatcccagaggtctgtgtcctaatgcattatggcaaatggatgtcacgcatgtaccttcatttggaagattatcatatgttcacgtaacagttgatacttattcacatttcatatgggcaacttgccaaacaggagaaagtacttcccatgttaaaaaacatttattgtcttgttttgctgtaatgggagttccagaaaaaatcaaaactgacaatggaccaggatattgtagtaaagctttccaaaaattcttaagtcagtggaaaatttcacatacaacaggaattccttataattcccaaggacaggccatagttgaaagaactaatagaacactcaaaactcaattagttaaacaaaaagaagggggagacagtaaggagtgtaccactcctcagatgcaacttaatctagcactctatactttaaattttttaaacatttatagaaatcagactactacttctgcagaacaacatcttactggtaaaaagaacagcccacatgaaggaaaactaatttggtggaaagataataaaaataagacatgggaaatagggaaggtgataacgtgggggagaggttttgcttgtgtttcaccaggagaaaatcagcttcctgtttggatacccactagacatttgaagttctacaatgaacccatcagagatgcaaagaaaagcacctccgcggagacggagacatcgcaatcgagcaccgttgactcacaagatgaacaaaatggtgacgtcagaagaacagatgaagttgccatccaccaagaaggcagagccgccaacttgggcacaactaaagaagctgacgcagttagctacaaaatatctagagaacacaaaggtgacacaaaccccagagagtatgctgcttgcagccttgatgattgtatcaatggtggtaagtctccctatgcctgcaggagcagctgcagctaactatacctactgggcctatgtgcctttcccgcccttaattcgggcagtcacatggatggataatcctacagaagtatatgttaatgatagtgtatgggtacctggccccatagatgatcgctgccctgccaaacctgaggaagaagggatgatgataaatatttccattgggtatcattatcctcctatttgcctagggagagcaccaggatgtttaatgcctgcagtccaaaattggttggtagaagtacctactgtcagtcccatctgtagattcacttatcacatggtaagcgggatgtcactcaggccacgggtaaattatttacaagacttttcttatcaaagatcattaaaatttagacctaaagggaaaccttgccccaaggaaattcccaaagaatcaaaaaatacagaagttttagtttgggaagaatgtgtggccaatagtgcggtgatattacaaaacaatgaattcggaactattatagattgggcacctcgaggtcaattctaccacaattgctcaggacaaactcagtcgtgtccaagtgcacaagtgagtccagctgttgatagcgacttaacagaaagtttagacaaacataagcataaaaaattgcagtctttctacccttgggaatggggagaaaaaggaatctctaccccaagaccaaaaatagtaagtcctgtttctggtcctgaacatccagaattatggaggcttactgtggcctcacaccacattagaatttggtctggaaatcaaactttagaaacaagagatcgtaagccattttatactattgacctgaattccagtctaacagttcctttacaaagttgcgtaaagcccccttatatgctagttgtaggaaatatagttattaaaccagactcccagactataacctgtgaaaattgtagattgcttacttgcattgattcaacttttaattggcaacaccgtattctgctggtgagagcaagagagggcgtgtggatccctgtgtccatggaccgaccgtgggaggcctcgccatccgtccatattttgactgaagtattaaaaggtgttttaaatagatccaaaagattcatttttactttaattgcagtgattatgggattaattgcagtcacagctacggctgctgtagcaggagttgcattgcactcttctgttcagtcagtaaactttgttaatgattggcaaaaaaattctacaagattgtggaattcacaatctagtattgatcaaaaattggcaaatcaaattaatgatcttagacaaactgtcatttggatgggagacagactcatgagcttagaacatcgtttccagttacaatgtgactggaatacgtcagatttttgtattacaccccaaatttataatgagtctgagcatcactgggacatggttagacgccatctacagggaagagaagataatctcactttagacatttccaaattaaaagaacaaattttcgaagcatcaaaagcccatttaaatttggtgccaggaactgaggcaattgcaggagttgctgatggcctcgcaaatcttaaccctgtcacttgggttaagaccattggaagtactacgattataaatctcatattaatccttgtgtgcctgttttgtctgttgttagtctgcaggtgtacccaacagctccgaagagacagcgaccatcgagaacgggccatgatgacgatggcggttttgtcgaaaagaaaagggggaa

SEQ ID NO: 817 - DNA, 6031 bp, Homo sapiens
  source 1..6031: mol_type = other DNA
ggggaggagccaagatggccgaataggaacagctccggtctacagctcccagcgtgagcgacgcagaagacggtgatttctgcatttccatctgaggtaccgggttcatctcactagggagtgccagacagtgggcgcaggccagtgtgtgtgcgcaccgtgcgcgagccgaagcagggcgaggcattgcctcacctgggaagcgcaaggggtcagggagttccctttccgagtcaaagaaaggggtgacggacgcacctggaaaatcgggtcactcccacccgaatattgcgcttttcagaccggcttaagaaacggcgcaccacgagactatatcccacacctggctcggagggtcctacgcccacggaatctcgctgattgctagcacagcagtctgagatcaaactgcaaggcggcaacgaggctgggggaggggcgcccgccattgcccaggcttgcttaggtaaacaaagcagccgggaagctcgaactgggtggagcccaccacagctcaaggaggcctgcctgcctctgtaggctccacctctgggggcagggcacagacaaacaaaaagacagcagtaacctctgcagacttaagtgtccctgtctgacagctttgaagagagcagtggttctcccagcacgcagctggagatctgagaacgggcagactgcctcctcaagtgggtccctgactcctgacccccgagcagcctaactgggaggcaccccccagcaggggcacactgacacctcacacggcagggtattccaacagacctgcagctgagggtcctgtctgttagaaggaaaactaacaaccagaaaggacatctacaccgaaaacccatctgtacatcaccatcatcaaagaccaaaagtagataaaaccacaaagatggggaaaaaacagaacagaaaaactggaaactctaaaacgcagagcgcctctcctcctccaaaggaacgcagttcctcaccagcaacagaacaaagctggatggagaatgattttgacgagctgagagaagaaggcttcagacgatcaaattactctgagctacgggaggacattcaaaccaaaggcaaagaagttgaaaactttgaaaaaaatttagaagaatgtataactagaataaccaatacagagaagtgcttaaaggagctgatggagctgaaaaccaaggctcgagaactacgtgaagaatgcagaagcctcaggagccgatgcgatcaactggaagaaagggtatcagcaatggaagatgaaatgaatgaaatgaagcgagaagggaagtttagagaaaaaagaataaaaagaaatgagcaaagcctccaagaaatatgggactatgtgaaaagaccaaatctacgtctgattggtgtacctgaaagtgatgtggagaatggaaccaagttggaaaacactctgcaggatattatccaggagaacttccccaatctagcaaggcaggccaacgttcagattcaggaaatacagagaacgccacaaagatactcctcgagaagagcaactccaagacacataattgtcagattcaccaaagttgaaatgaaggaaaaaatgttaagggcagccagagagaaaggtcgggttaccctcaaaggaaagcccatcagactaacagcggatctctcggcagaaaccctacaagccagaagagagtgggggccaatattcaacattcttaaagaaaagaattttcaacccagaatttcatatccagccaaactaagcttcataagtgaaggagaaataaaatactttatagacaagcaaatgttgagagattttgtcaccaccaggcctgccctaaaagagctcctgaaggaagcgctaaacatggaaaggaacaaccggtaccagccgctgcaaaatcatgccaaaatgtaaagaccatcgagactaggaagaaactgcatcaactaatgagcaaaatcaccagctaacatcataatgacaggatcaaattcacacataacaatattaactttaaatataaatggactaaattctgcaattaaaagacacagactggcaagttggataaagagtcaagacccatcagtgtgctgtattcaggaaacccatctcacgtgcagagacacacataggctcaaaataaaaggatggaggaagatctaccaagccaatggaaaacaaaaaaaggcaggggttgcaatcctagtctcggataaaacagactttaaaccaacaaagatcaaaagagacaaagaaggccattacataatggtaaagggatcaattcaacaagaggagctaactatcctaaatatttatgcacccaatacaggagcacccagattcataaagcaagtcctcagtgacctacaaagagacttagactcccacacattaataatgggagactttaacaccccactgtcaacattagacagatcaacgagacagaaagtcaacaaggatacccaggaattgaactcagctctgcaccaagcagacctaatagacatctacagaactctccaccccaaatcaacagaatatacatttttttcagcaccacaccacacctattccaaaattgaccacatagttggaagtaaagctctcctcagcaaatgtaaaagaacagaaattataacaaactatctctcagaccacagtgcaatcaaactagaactcaggattaagaatctcactcaaagccgctcaactacatggaaactgaacaacctgctcctgaatgactactgggtacataacgaaatgaaggcagaaataaagatgttctttgaaaccaacgagaacaaagacaccacataccagaatctctgggacgcactcaaagcagtgtgtagagggaaatttatagcactaaatgcctacaagagaaagcaggaaagatccaaaattgacaccctaacatcacaattaaaagaactagaaaagcaagagcaaacacattcaaaagctagcagaaggcaagaaataactaaaatcagagcagaactgaaggaaatagagacacaaaaaacccttcaaaaaatcaatgaatccaggagctggttttttgaaaggatcaacaaaattgatagaccgctagcaagactaataaagaaaaaaagagagaagaatcaaatagacacaataaaaaatgataaaggggatatcaccaccgatcccacagaaatacaaactaccatcagagaatactacaaacacctctatgcaaataaactagaaaatctagaagaaatggatacattcctcgacacatacactctcccaagactaaaccaggaagaagttgaatctctgaatcgaccaataacaggctctgaaattgtggcaataatcaatagtttaccaaccaaaaagagtccaggaccagatggattcacagccgaattctaccagaggtacaaggaggaactggtaccattccttctgaaactattccaatcaatagaaaaagagggaatcctccctaactcattttatgaggccagcatcatactgataccaaagccgggcagagacacaaccaaaaaagagaattttagaccaatatccttgatgaacattgatgcaaaaatcctcaataaaatactggcaaaccgaatccagcagcacatcaaaaagcttatccaccatgatcaagtgggcttcatccctgggatgcaaggctggttcaatatacgcaaatcaataaatgtaatccagcatataaacagagccaaagacaaaaaccacatgattatctcaatagatgcagaaaaagcctttgacaaaattcaacaacccttcatgctaaaaactctcaataaattaggtattgatgggacgtatttcaaaataataagagctatctatgacaaacccacagccaatatcatactgaatgggcaaaaactggaagcattccctttgaaaaccggcacaagacagggatgccctctctcaccgctcctattcaacatagtgttggaagttctggccagggcaatcaggcaggagaaggaaataaagggtattcaattaggaaaagaggaagtcaaattgtccctgtttgcagacgacatgattgtttatctagaaaaccccatcgtctcagcccaaaatctccttaagctgataagcaacttcagcaaagtctcaggatacaaaatcaatgtacaaaaatcacaagcattcttatacaccaacaacagacaaacagagagccaaatcatgggtgaactcccattcacaattgcttcaaagagaataaaatacctaggaatccaacttacaagggatgtgaaggacctcttcaaggagaactacaaaccactgctcaaggaaataaaagaggagacaaacaaatggaagaacattccatgctcatgggtaggaagaatcaatatcgtgaaaatggccatactgcccaaggtaatttacagattcaatgccatccccatcaagctaccaatgactttcttcacagaattggaaaaaactactttaaagttcatatggaaccaaaaaagagcctgcattgctaagtcaactctaagccaaaagaacaaagctggaggcatcacgctacctgacttcaaactatactacaaggctacagtaaccaaaacagcatggtactggtaccaaaacagagatatagatcaatggaacagaacagagccctcagaaataatgccgcatatctacaactatctgatctttgacaaacctgagaaaaacaagcaatggggaaaggattccctatttaataaatggtgctgggaaaactggctagccatatgtagaaagctgaaactggatcccttccttacaccttatacaaaaatcaattcaagatggattaaagatttaaacgttaaacctaaaaccataaaaaccctagaagaaaacctaggcattaccattcaggacataggcgtgggcaaggacttcatgtccaaaacaccaaaagcaatggcaacaaaagacaaaattgacaaatgggatctaattaaactaaagagcttctgcacagcaaaagaaactaccatcagagtgaacaggcaacctacaacatgggagaaaatttttgcaacctactcatctgacaaagggctaatatccagaatctacaatgaactcaaacaaatttacaagaaaaaaacaaacaaccccatcaaaaagtgggcgaaggacatgaacagacacttctcaaaagaagacatttatgcagccaaaaaacacatgaagaaatgctcatcatcactggccatcagagaaatgcaaatcaaaaccactatgagatatcatctcacaccagttagaatggcaatcattaaaaagtcaggaaacaacaggtgctggagaggatgcggagaaataggaacacttttacactgttggtgggactgtaaactagttcaaccattgtggaagtcagtgtggcgattcctcagggatctagaactagaaataccatttgacccagccatcccattactgggtatatacccaaatgagtataaatcatgctgctataaagacacatgcacacgtatgtttattgcggcactattcacaatagcaaatacttggaaccaacccaaatgcccaacaatgatagactggattaagaaaatgtggcacatatacaccatggaatactatgcagccataaaaaatgatgagttcatatcctttgtagggacatggatgaaattggaaaccatcattctcagtaaactatcgcaagaacaaaaaaccaaacaccgcatattctcactcataggtgggaattgaacaatgagatcacatggacacaggaaggggaatatcacactctggggactgtggtggggtcgggggaggggggagggatagcattgggagatatacctaatgctagatgacacattagtgggtgcagtgcaccagcatggcacatgtatacatatgtaactaacctgcacaatgtgcacatgtaccctaaaacttaaagagtataataaaaaaaaaaaa

SEQ ID NO: 818 - DNA, 1807 bp, Homo sapiens
  source 1..1807: mol_type = other DNA
atatatatatatatctggagcaaggcaaagatgctcactcctgccacttctattcaatacagtactagaaatccgagcaagagcatttaggcaagaaaaagaaataaaaggcatacaaaatagaaaagaagaagtgaactgtttttgtttgcaaatgacataattttacagatatacaaaaccttagaattccactaaaaaactgttagaagtaacaaatgatttcagtgaagttgcaaggtacaaaatctatatataaaaaccagtagcatttttatatactaacaaaaaaaactattatataaaaaagccaacaaatcaatcacatttataatagcaacaaaaggaataaaatatttaggaataaatttaactcaggaggtgaaaagtctgtatactaaacattatagaatattgatgaaagaaattgaagaagacacaaatagaaagatattctgtgctcattaattggaaaaattaatattattgaaatgttcatattacccaaggcaatccacagattcagtagaattcctataacatttccaatatttttcactgacatagaaaaaatcctaaaatttatatagaaccataaaagaccctgaatagctaaagcaatcttgagcaaaaagaacaaagctggaggcactgctttacctgatttcaagatctactacaaagctatagtaatcaaaacagcatggtacttgtataaaaacagtcatatagaccaatggaacagaataggtagccaataaataaatccacacatttacagtcaattgatttgcagcaaagacaccaagaacatacaatgggtaaaggacagccttttcaataagtcgttctgggaaaactggatattcacacacagagcaatgaaattagaccttgtctcacacgatatacaaaaataaactcaaaatggattaaagacatatgtaagacctgaaactgtaaaactactagaagaaaacagagagaaagctctatgacattggtctgggcaattttttttgatatgaccccaaaagcacaggaaacaaaagcaaaaataaagaagtggtatgacatcaaactaacaagcttctgctacacagcaaaggaaacaatcaacagagtgtagagacaacctaaataatgagacagaatatttgcaaatcatgtgactgatgaggggtttatatccaaaatacataagaaactcaaacaactttatagcatgaaaacaaataacccaattaaaaatgtgcaaagtacctgaatagacatttctacaaagaaggcatacaaatggccaccaagtatacagaaaaatgctcaacattactaattagcagaaaaatggaaatcagaaccacaatgagatatcacctcccacctgctagaatggctgttatcaaaaattttaaaaataaaaaaacaagtattggtgaggatgtggaaaacaaacacttgtacatggttagtggaaacgtaagctagttgagtcattatggaaaacagcacggagattctgcaaaaaattaaaaatagaattactataagatccagcaatttggtttctgggtatatatccagaggaaatgaaatcgatgtgtcattaatgtatcctattcccatgtctactgcagcattctttacaatagccaagagatggaatcaacctaagtgtccatggacagataatgttatgtacatacactattatatatacataataccatatatattattatatacagactattagactattttatacatatatagtctagtctatataatagtcatagactattaa

SEQ ID NO: 819 - DNA, 313 bp, Homo sapiens
  source 1..313: mol_type = other DNA
ctaatagggtagccatgggccacaattgttggctgttcggtgtttcacatatggttagtccaaactaagatgtgttgtgagtctcaaatacacactggattgtgaagacttaggacaaggaaaacaatgttaataaaatctcattgataacttttaaattaattacatgttgaaatgaaaatatttgggacatattgagttaaataaaacaggagattaatttcttctgtttctttctactttttttattagtgtggctactcaaaaatgtgacattatgtatgcatctcgtattacatttctattggacagc

SEQ ID NO: 820 - DNA, 295 bp, Homo sapiens
  source 1..295: mol_type = other DNA
gctgggcacagtggctcacgcctgtaatcccagcattttgggaggccgaggcgggtggatcacgaggtcaggagttcaagaccagcctggccaagatggtgaaacctcatctctactaaaaatacaaaaattagccaggcgcggtggcaggcacctgtaatcccagctactcggaaggctgaggcaggaaaattgcttgaacgcgggaggcggagtttgcagtgaacagagatgaagccactgcactttagcctaggtgacagagcgagactctgtctcaaaaaaaaaaaaagaa

SEQ ID NO: 821 - DNA, 488 bp, Homo sapiens
  source 1..488: mol_type = other DNA
atacccatgttcacagcagcattattcaaacagtcaaaagatggaagcaaccccagtgtctgtagataggtgaatggacaaacaaaatgtagtgtcaacatacaatggaatattattcagccatgaagaggaaggacattcttaacacgtgctacagcatggataaaccttcgggacattttgctaggtgaaataagccagacacaaaaggacagatactacatgattccacctgtatgagagccccagagcagtcaaattcatagagacatcaagtggactgttgcctgccagggccagaggctgggaaggaagggagagcagagagttactgtctaatgggtagagtttcagctttgcaagataaaagagttctgtgtgtggacggtggtgatggccacacacccatgtggatgtataatgccactgacattgtaacttacaatggttaagatggaaaatcttgtattacgggcatttcatcacaa

SEQ ID NO: 822 - DNA, 310 bp, Homo sapiens
  source 1..310: mol_type = other DNA
ggccaggcacagtggctcatgcctgcaatagcagcacttcctgcaataccagggaggccaaggcaggaggatcacctgagatcaggagtttgagaccagcctggccaacatgttgaaaccccatctccagtaaaaatacaaaaattagctctgtgtggtggcaggtacctgtagtcccagctactcaggaggctgaggcaagagaattgcttgaacccgggaggtggaggttgcagtgagctaagattgtgccactgcactccagcctggcaatagagcgagactccgtctcaaaaaaaaaaaaaaaaaa

SEQ ID NO: 823 - DNA, 33187 bp, Homo sapiens
  source 1..33187: mol_type = other DNA
cttctgtgtagatttgatgtgaagatatttccttttctactgtaggtcacatagcgctccaaatatacacttgcagattctacaaaaagagtttttccaaactgctcaatcaaaagaaagattcaactctgtgagatgaacgcacacatcacaaagttgtttctcagaattcttcagtctcatttttatgtgaagatatttcttttttcaccataggcctcaaagtgctcaaaatgtccacttgcagattctacaaaaagagtaatgcaaaactcgtccttcaaaagaaatgttcaactctgggagatgaatgcacacatcacaaagaagtttctcagaatgcttctatctagtttttatgtgaagatatgtccttttaaaccataggtctcaaagctctccaaatgtctacttgcagattctacaaaaagagagattcaaaactgctcaatcgaaagaaaggtttaactctgagatgaatgcacacatcacaaagcattttctcagattgcttctgtctagattttaggtgaagatatttccttttctaccataggccacaaagcactcgaaatgtccacttgcagactctacaaatagagtgtttccaaactgctcaatcaaaagaaaagttcaactctgtgagatgaatgcacacatcacaaagtaacttctcagaattcttctgtctagttttcatgagaagatatttccttttctaacataggactcaaagcgctccacatgtccacttgcagatactacaaaaagagtgtttccaaactgctgaatctaaacaaatgttcaactctgtgagataaacacacccatcacaaagaagtttctcagaattcttctgtctattttttatatgaagatatttcattttccaccacaggcctcaaggtgctcgaaatgtccacttgcagattctacaaaaagagtatttcaaaactggaccataactctgggagatgaaggcacacatcacaaagaagtttctgagaatgcttctatctaggctttatgtgaagatatttacttttccacgttagtcctcaaagcgctccgaatgtccaattgcagattctacaaaaagaaagtttcaaaactactcaatcaaaagaaaggtttaactctgtgagatgaatgtacctatcacaaagaagtttctcagaatgtttctgtctagattttatgtgaagatatttccttttctactataagcagcaaaacactccaaatgtccacttgcatattctacaaaaagactgtttcaaaactgctcaatcaaaagaaaggttgaactctgtgagatgaacgcgcacatcacaaagaagtttctcagaattcttctgccaggtttttatgtgaagacatttccttttccaccataggcctcaaagggctccaaatatccacttgcagtttctacaaaaggagagtttcaaaactcctcaataaaaagaaaggtttaagtctttgagatgaatgcacacatcacaaagaagtttctcagattgcttctgtctagattttatttgaagatatttccttttctacaataggccacaaagagctccaaatgtcagcttgcagattctacaaaaagagcgtttccaaaatgctcaatcaaaaggaagtttccactctgtgagatgaatgcacacatcacaaagaagtttctcagaatgcttctttctagtttttatgtaaagaaatttccatttccacctagtcctcaaagagctcaaaatgtccactagtggattttataaaaagagtgtttgaaagctgctcaatgaaaagtaaggttgaactctgtgagatgaatgcacacatcacaaagaagtttgtcagaatgcttctgtctactttttatgtgaagttattttcttttccaccataggtctcaaagcgctccaaatgtcctcatgcagattctacaaaaagagtgtttcaaagctgttcaatcaaaagaaatgttcaactctgtgagatgacagcacacatcaccaagaagtttgtcagaatgcttctgactagtttttatttgaagatacttccttttccaccctaagcctcaaagtgctccaaatgtcctcatgcagattctacaaaaagagtgtttcaaaactgttctatcaaaagaaaggttcaactctgtgtgatgaatactaacatcaccaagatgtttgtcagattgcttctgtctagtgtttatgtgaagatatttccttttccaccataggcctcaaagcgctccaaatgtccacttgcagattctacaaaagagtgtttccaatctgctccatcaaagaaaagtttcaactctgtgagacgaatgcacacatcacaaagaagtttctcagaatgcttcattctagtttttatttgaagatatttccttttccaccaaacccttcaaacagctcaaaatgtccacttgtaaattctacaaaaagtgtgtatgaaaactgctctatcaaaagaaagtttcaactccgggagatgagtgcacacgtcaaaaagaagtttctcataatgcctctgtctagttattatatgaaaatattacgttatccacaatagacttcaaagcactccaaatgtccacttacagattctacaaaaatagtgtttaaaaactcctcaatgaaaagtaaggttcaactctgtgagatgaattcacacatcacaaagaagtttgacagaatgcttctgtctagtttttatgtgaagatatttccttttccaccataggcctcaaagctctccaaatatccacttgcagattctacaaaaagagagtttcaaaactgctctatcaaaagaaattttcacctctgtgacttgaatgcacacatcacaaagaagtttctgagaatgcttctgtctagttattatgtgaagatatttcattttgcaacataggcctcaaagggaacaaaatatccccttgcagattctacaaaaagagtgtttcaaagctgcccaataaaaagtaaggttcaactctgtgagatgaatgcacacatcacaaagaagtttctcagaatgcttctgtcttgtttttacatgaagatatttccctttccaccatagacctcaaagggctccaaatgtcctcttccagattctacaaagactgtttcaaagctggtcaatcaaaagaaaggttcaactctgtgggatgaatgcacacatcacaaaatagtttctcagaataactctgtcttgtttttatgtgaagatttttccttttccaccattggcctcaaagcgctacaaatgtccacttacagattccacaaaaagagtgtttcaacgctgctcaatcaaaataaaggttcaactctgtgtgagatgaatgcactcatcccaaaaagtttctcataatgcttctgtctatttaatataggaagttatttcattatccgccataggactcaaagcgctccaaatatccacttgcagattctagaaaaagagtctttcaaaagtgctcaattgaaagtaaggttcacctctgtgagatgaatgcgcacatcacaaaggaatttctcagaatgcttctgtctagttcttatatgaagatatttcattatccaccataggcctcaaagcacgccaaatgtccacttgcagatagtacaaaaacggtgtttcaaaactgctcaatcaaaagtaaggttcagctctgtgagatgaatgcacacatccaaaggcatttgtcacaaagcttctgtctagcttttatttgaagatacttccttttccaccataggcctcaaagcgctccaaatgtccacctgtagattctacaaaaagagtgtttcaaaactcttcaatcaaaggtagcttcaactctttgaaatgaatgcacatatcacaaagaagtttgtccgaatgcttgtctcatttttatgtgaagatatttccttttccaccattggcctcaaagtgctccaaatgtccacttgcagaccctacaaaaagagtgttccaaagctgctcaatgacaggtacatttcaactctgtggatgaatgaacacatcacaaagaactttgtcagaatgcttctttctagtttttatgtgaagatatttccttttcctccctaggcctcaaagcgcaccaaatgtccacttacacattctacaaaaagagagtttcaaaactgctcgatcaaaagaaaggttgaactctgtgagatgaatgcacacatcacaaagaagttttcagaatgcttctgtctattttttatgtgaatatatttccttttccaacataggactcaaagggctccaaatgtccacttgcagattttaaaaaaagaggttttcaaaactactcaatgagaagtaaggttcaactctgtgacatgaatgcacacatcatagagaactttgtcggaatgcttctgtctagtttttatatgaagatattttcttttccaccataggcccaaaagcgctccaaatgtcctgttgcagattctacaaaaagactgtttcgaaactgctcaatgaaaagaaaagttcaactctgtgagatgaatgcacacatcacaaagatgttgatcagaattcttccgtctagtttttatgtgaagatatttgcttttccaccatagacctcaaagcgctccaaatatccactcacacattctacaaaaagggtgcttcagagctgctcaatcaacagaaatgttcaacgctgtgagatgaatgcacatatcacaaaggagtttttcagaatgcttctgcctagtttttatgtgaagatatttccttttccaccacaggcctcaaagcgctccaaatgtccacttgcagattctacaaaaagagtgtttcaaaactgctttatgaaaagaaaggttcaattctgtgagttgaatgcacacaccacaaagaagtttctgagaatgcttctgcctagtttttatgtgaagatattctggtttccaacgaaggcctcaaagcggtccaaatatccaattgcagattctacaaaaagagtgtttcaaagctgctcaacgaaaggaaaggttcaactctgtgagatgaatgcacacgtcacaaagaagtgtgtcagaatgcttctgtctagtttttatatgaagatatttccttttccacaaaaggactccaagtactccaaatgtctgctttcagatagtacaaaaagtgtgtttcaaaactgcttaatcaaaagtaacgttcaactctgtcacatgaatgcacatatcactaataattttctcagaatgattctgtgtagtatatatctgaaaatatttctttttccaccttaggcctcaaagtgctccaaatatacacttgcagataatacaaatagagtgtttcaaaactgctcaatgaaaagaaagtttcaactctgtgagatgaatgtacacatcacgaagtagtttgtcagaatgtttctctacagtttttatttgaagatattaccttttccacgatcggcctcaaagcgctccaaacgttcacttgcagattctacaaaaagagagtttccaaacaattcaagcaaaagaaatgttcaactctgtgagatgaacggacacatcacaaagtaatttgcacaattcttctgtctactttttatgagaagctacttccttttccaccataggccacaaagcactccaaatgtccactggcagatagtacaaaaaggctgttgcaaaactgctcaatcaaaagaaaggttcaacgctatgagatgaatgcactcatgacaaagaggtttttcaggatgcttctgtctaggttttatgtgttgatatatccttttccatcgtaggtctcaaagcacttcacttgtccacttgcagatcctgcaaaaagattgcttccaaactgttcaatctgaacaaaatttcaagtctgtgagatgaatgcaaacatcacgaagtattttctctgaatgattccgtctagtttttatgtgaaaatatttccttttctaccataggcctcaaagccctccaaatgtccacttgtagattctacaaaaagagggtttcaaaactgctctatcaaaagaaaggttcaactctgtgagttgaatgcacacatcacaaagaagtttctgagaattcttctgtctagttttcttcacatgtaatatcttcacataaaaactagacagaagaattctgagaaatttctttctgatgtgtgcattcatctcacagagttgaaacgttctttttattgagcagtttggaaaccctctttttgtggaatctgcatgtggacatttggagggctttgcagcctatggtagaaaagtaaataccttcacataaaatctagacagaatcaatctgagaaacttctttatgatgtgttcattcatctcacggagttaaatctttcttttgattgagcagttttgaaactctctttttgtagaatttgcatttggatatttggagtgctttgaggcctgtggtggaaaaggaaatatcttcacataaaaactagacagaagcaatctgagaaacctctttgtgatgtgtgcattcatctcacagagttaaatctttcttttgattgagcagttttgaagctctctttttgtaggatctggaaatcgacatttggagttctttgaggattatggtggaaaaggaaatatcttcacataaaatctagacagaagcaatctgagaaattactttgtgatctgtaaatcatatcacagagggaaacttcattttgtttgagcagctttgaaacaccctatttgtactatctgcatgtggacatttggagtactttgaggcctatggtggaaaaggaaatatcttcatgtaacaagtagacagaagcattctgagaaatttcttggtaatcagtgcattcatctcacagagttgaaccttactttcgatttagcaggtttgatacagtctttttgtagaacctgcaattggacttttggagtgatttgaggcctatggtaaaaaagaaatatctccacataaaaagcaaacagaagcattctgagaagttacttcgtgatgtgtgccgtcatctcacagagttgaacttttctttggattgagcagctttaaatactcttcctggagcatctgccagaggacatttggagagctttgtggcatatggtggaaaaggaaatatcttcacataaaaactagacagaagcattctgacaaacgtctttgtaatgtgtgcattcatctcacagagttgaaacttacttttcattgagcagggggaaacactctttttgtagaatcattaagtggacatttagagtgctttgaggcctatgatggaaaaggaaatatcttcacattaaaactacacagaagcattctgacaaccttctttgtgatatgtgcatttgtctcaccaagttgaaccttaacttgactgagcagttttgaaacaccctttttgtactatctgcaagtggacatttggagtgctttgaggcatatggtggaaaaggaaatatcttcacataaaaactagacagaatcattctgacaagctgctttgtgatgtgtgcattcatctcagagggtttaagttttcttttgattgagcagctttgaaaaactctttttgtggcatctgcaaggggacatttggagcgctttgaagcctatggtgagaaaagaaatatcttcacataaaaactagacaaatgcattctgagaaacttctctgtgatgtttgcatttatgtcacagagttgaaccttccttttgtttgagcagctttgaaacacactttttgtacaatctgcaagtggacatttggagcgctttgaggactatggtggaaaacgaaatatcttcacataaaaactagacagaagcattctgacaaacatctttgtgatgcgtgcattcatctcacagagtggaaacttacttttcattgaggagttttccagcactctttttgtagaatctgcaattggacattaggagcacattgaggccaacggaggacaaggaaatatcttcacataaaatctagacagaagcaatctgatcaccttctttgtgaagggtgcactcatctcacagggttaaacctttcttttgatagagctgtttcaaaacactctttttgtaaaacctgcaagtggacatttggagcgctttgaggcctacggtggaaaaggttatatcttcacataaaaactagacagaagaattctgagaaacatctttgtgatgtgtgcgttcatctcacagagtggaacatttctttcaatagagcagtttggaaacactctttttgtagaatctgcaagtggacatttagagccctttgcagcctatggtacaaaaggaaatatcttcaaataaaatctagacagaagcaatctgagaaacctctttgtgatgtgcgcattcatctcacagagtcaaaactttcttttgattgagcagttttgaaacactctttttgtaggatctgcaagtggatatttggagcactttgaggcctatggtggaaagtgaaatatcttcacatgaaaactagacagaagaattctgagatagtttttgggatgcgtgcgttcatctcacaaggttgaaactttcctttgattgagcagtttggaaacactctttttgtagaatctgcaagtggacattttgggcattttgcagcctatgttagaaaaagaaatatcttcacatgaaatccggaaagaagcaatctgagaaacttctttctgatgtgtgcattgatcccacagagttaaaacttcttttgattgagcagttttgaaattctctttttgtagaatctgcaagtggacatttggagcacattgaggcctatggtggaaaaggaaatatgttcatataaaaagtagacagaagcattctgacaatctcctttgtgatgtgtgcattcatctcaaagcattgaaaatttctgtttattgagcagctctgaaacaacctttttgtagaatctgtgagtgtatatttggagagttttgaggcctatggtagaaaaggaaatatcttcacataaaaactagacagaagaattctcagaaacttctttgtgatgtgtgcgttcatctcacagagttgaacctttcttttgattgagcagtttgaaaatagtctttttgtagaatctgcaagtggacatttgcagtgatttatggcctacggaataaaagaaaatatcttcacaaaaaatctagacagaagcaatctgagaaactcctttgtgatgtgtgcattcatctcacagagttaaacctttcttttgattgagcagctttgaaactctctttttgtcgaatctgcaagtggacatttgaagcactttgcagcctaaggtagaaaaggaaatatcttcacataaaatctagacagaagcaacctgagaaacttctttgtgatgtatgcattcatctcactcagttaaacatttcttttgatagagcagttttgaaagtctctttttgtagagtctgcaagtggacatttggagcgctttgcgtcctatggtagaaaaggaaacatcttcacataaaaactagacagaattctgagaaacttctttgtgatgtgtgcgttaatctcacagagttcaaactttcttttgactgagcagtttggaaacactgtttttgtggaacctgcaagtggacatttggaacgctttgccacctattgtagaaaaggaaatattttcatataaaatctagacagaagcaatctgagaaacttcttcgtgatgtgtgcattcatctcacagagttaaacctttctttggattgcgcagatttgaaactctctttttgtagaatcttcaagtggccatttggagtgctttgaggcctatggtagaaaaggaaatatcttcgcataaaaactagagagaagaattctgagaaacttctttgtgatatgtgcattcacctcacagagttgaaactttcttttgattgagcagtttggaaacattctttttttaggaacggcaagtggacatttggagcgctttgcagcctatggtagaaaaggaaataccttcacataaaatctagacagaagtaacctgagaaacttctttgtgatgtttgcattcatctctctgagttaaacctttcttttgatagaacagttttgaaactctctttttctggaatctgcaagtggacatttggagcgctttgcgtcctatggtagaaaaggaaatatctttgcataaaaactaggcagaagaattctgagaaacttctttgtgatgtgtgcgttcatctcacagaattgaaactttcttttgattgagcagtttggaaactctctttttgtggaatctgcaagtggacatttcgagtgctttgccatctatggtagaaaaggaaatattttcatataaaatctagacagaagcaatctgagaaacttctttggcatgtgtgcatttgtctcacagagttaaacctttctttggattgagcagttttgaaagtctctttttgtagtatctgcagttggacatttggagcgctttgaggcctatggtggaaaaggaaatatctccacctaaaaactatacagaagtattctgagaaacttctttgtgatgtgtgcgttcatctcacagagttgaacctttcttttgattgaacagtttggaaatactctttttgtagaatctgcaagtggttattttgagcgctttatggcctatgttagaaaaggaaatatcttcacataaaaactagacagaaaaattctgataaacttctttgtggcatgtttattcatctcacagagtttaacctttcttttgattgagcagtttggaaacagtctctttgtaggatctgcaagtggacatttggagtgcttttcagtctatggtagaaaaggaaatatcttcacataaaatctacgcataagcaatctgagaaacttcttcatgatgtgtgcattcatcacagagagttaaacatttcttttgatggagcaattttgaaactctctttttgtagcatctgaaagtggacatttggaatgctttgaggcctatgctggaaagggaaacatcttcacttaaaaactagacagaagaattctgagaaacttctatctgatgtgtgccttcacctcgcagagttgaaccttccttttgtttgagaagtttggaaactcggtttatgtggaatctgcaagtggacatttggagcgctttgcggcctacggtagaaagggaaatatcttcacataaaatctagacaaaagcaatctgagaaacttctttgtgatgtgtgcattcatctgacggagttaaacctttcttttgattgagcagttgggaaacactctttttgtagaatctgcaagtggacatttggagcgctttgcagcctatggttgaaaaggaaatatcttcacatacaatctagacagaagcaatctgagaaacatctctgtgatatgtgcattcatctcacagagttaaacctttctttgattcagtggtcttgaaactctcttttaatggaatctacaaatggacatttggagctctttgagacctatggtggaaaaggaaatatcttcacataaaaactagatagaagtactctgagaaacttctttgtgatgtgtgcatttatctcccagagttgaacatttcttttgatggaccagttttgaaatactcttttggtagattctgccaatggacattttgagtgtcttgaagcctaaggtggaaaaagaaatatcttcacataagaactagaaagaaaattctgaggaacttctttgtgatatgtgcgttcatctcacggatttgaaactttcttttgattgaacagtttgaaaacactctttttgtagaatctgcaagtggacatttggagcactttgcggcctacgttagaaaaggaaatacctttacataaaatctagacagaagcaatctgagaaacttctttgtgatgtgtgcattcatctcacagagttgaacgtttcttttgattgagcagtttggaaactctctttttctagaatctgcaagtggacaattggagcgccttgagacctaaggtggaaaaagatatatcttctcataaaaatttaacataagaattatgagaaacctctttgtgatgagtgcattcgtctcacatagttgaactttcttttgattgggtagtttggaaacactctttttgtagaatctgcacgtcgacatttggagcactttgcggcctatggtagaaaaggaaatatcttcaaataaaatctagacagaagcaatctgagaaactactttgagacgtgtccattcatttcacagagttaaacctttctttgcattgagtggttttgaaactctctttttgtagaatctgcaagtggacatttggatcgctttgaggcctatggtggaaaagggaatatctttacctaaaaactagacagaagaattctgagaaacttctttgtgatgtgtgtgttcatctcacagagttgaaccattcttttgattgagcattttggaaacactctttttttagaatctgcaagtgtacatttcgtgtgctttgaggcctatggtggaaaaggaaatatcttcacataaaatctagacagaagcaaactgagaaactactttgtgatgtgtgcattcatctcacagagttaaatctttcttttgatagagcagttttgaaatactctttttgtagaacctgcaagtggacatttcgagccccttgaggcctatggtggaaaatgaaatatcttcacataaaaaatagacagaggaattctgaggaacttcctccagatccatgcgttcatctcactgagttgaacctttttttatgattgagcagtttggaagcactctttttgtagagtctgcaagagaacatttggagcgctttggggtctatcgtagaaaagaaaatatcttcacataaaatctagacagaagcaatctgagaaacttctttgtgatgtgtgcattcatctcacagagttgaacctttcttttgattgaacagttttgaatcactctttttgtaaaatctgcaagcggatatttggagccctttgaggactcttgtggaaaaggaaatatcttcacagaaaaactatgcagaagcattctgagaaactactttgtgatgtgtgcattcaactcacagagttgaacctattttttgatagagcagttttgaaactcactttttgtaggatatgcaagtgtttatttggagccctttgtggccgatggtggaaaaggaaatatcttcccataaaaactacacagaagcatcctgagaagcttctttgtgatgtgtgcattcattggacagagttgaacctttcatttgtctcagcagttttgaaacactctttttttagaatctgcagttggatatttggagccctttgaggcctattgtggaaaaagaaatatcttcacataaaaatccacagaaacatactcaaaaaatacattgttttgtgtgcattcgtctcacagagttgaacctttcttttgattgagcagttttgaaacactctttttgtagaatctgcaagggaatatttggagcactttgaggcctatggtataaaaggaaatatctgcacataaaaactacacagaagcattctgagaaacttctttgttatttgtacattcaactcgcagatttgaacctatcttttgatagaccaattttgaaactctctttttgtagaatctgcaagtggatatttggagccctttgtggctgatgatagaaaaggaaatatcttcacataaaatctagacagaagcaatctgagaaacttctttgtaatgtgtgcattcatgtcacagagttaaacctttcttttgattgagcagttttgaaagcctctttttgtagaatctgcaagtgggtatttggagcactttgaggcctatgatggaaatggaaatatcttcacataaaaatttcacagaagcattctgagaaacttctttgtgatatgtgcactcaactcacagatttaaaccgatcttttgataaaacagctttgaaactcctttttgtagaaactgcaagtggatatttggagcccgttgcggcctatggtagaaaaggaaataatttcacattaaaaagtaaacagaagcattctgagaaacttctttgtgatttgtgcattcatctcacagaattgatcctctcttttgattgagcagtttggaaacactcttttattagaatctgcaagtgtatacttggagagctttgaggcctaatgagaaaaggaaatatcttcacataaaaactacacagtagcattgtgagaaacttctttgtgatgtatgcattcatctcacagagttgaacctttattttgattgagcagttttgaaacactctttgtaatatctgcaagcagatatttggagcgctttgaggcctatggtggaaaaggaaatatcttcacataaaaactacacagaaacattctaagaaacttctttgtgatgtatgcgttcatctcacagggttgaagctctcttttgattgagcagttttgaaacacactttttttagatatctgcaagtggatatttggagcactgtgaggcctgttgtggaaaacgaagtatgtttacataaaaactacgtagaagcattctgataaatttcttatgatgtgtgaattcatttcacagagttgaaccttccttttgattcagcaattttgaaacactctttttgtagaatctgcaacagtatattttgagcactttgaggcctctggtggaaaaggaaatatcttcacattaaacctacacagaagcattctgagaaacttctttgtcatgtatgcattcatcacacagagttgaaactttcttttgattgcacagatttgaaccaatctgcttgtagaatctacaagttcataattggagcgctttcaggcctattgttgaaaaggaaatatcttcacataaaaactacaaggaagcattctgagaaacctttttgtgatgtgtgcatacatctaacagagttcaacctttctttagatcgagcagttttgaaacactctttttgtagattctgcaagtgtatgtttggagcacttttatcctattgtggaaaatgaaatatcttcacataaaaactatacagaaaaattctgagaaacttctttgtgatgtggggattcatcagacagagctgaacctttcttttgaatgagtagtatggagacactctttttgtagaatctgcatgaggatatttggagcgctttgaggcctatggtggaaaaggaaatatcttcacataaaaactacacagaagcattctgagaaacttctttgtgagttgtgcattcaactcacagagttgaactcatcttctcattgaacagttttgaatctctctttttgtagaatctgcaagtggatctttggagtcctttgccccctatggtgaaaaaggaaatatcttcacataaaaactacacagaagcattctcagaaacttctttgtgatgcgtgcattcatctcgcagagttgaacctttcttttgattgagcagattttaaactctatctttgttgaatgtgcaagtgcatatttggggtcctttgaggtctattgtggaaaaggaaatatcttcacatagaaactaaaacgaagattaatgagaaatctttttgtgatgtgtgcattcatctcacagaattcaacctttcttttgatcgagcagttttgaaacactgtttttgtagaatctgcaagtggatatttggagcgctttgaggagtattgtggaaaaggaaatatcttcacataaaaactacacagaagcattctgagaaacttctttatgatgtgtgcattcaactcacagagttgaacatatcttttgaaggagcagttttgaaactctctttttgtagtatctgcaagtgaatatttggagccctttgtggcctacggttggcaaggaaacatcttcatataaaatctacacagaagcattctgagaaacttctttgtgatgattccattcctctcatagagctgaacctttcttttgactgagcagttttgaaacacactttttgcggaatctgcaggtggatattaggtgcactttgaggcctatggtggaaaaggaaatatcttcacataaaaactacacagaagcattctgtgaaacttctttacgaaacgagcattcaactcacagagttgaaactatcttttgatagagcagttttgaaactctctttatgtagaatctgcatgcggatatttggagaccttagcagcctatggtggaaaaggaaatatcttcacataaaaagtacacagaagcattctgggaaacttctttcagatgtgtgcatcatctcacatagttgagcctttcatttgattgaacacttttgaaaaattcctttgtagaatatgcaagtgaatatttggaacgctttgtggcctatagtgtaaaaggaaatatcttcaaataaaaactacacagaagcattctgagaagctactttgtgatgtgtgcattcaactgacaatattgaacctatcttttgatagaggagttttgaaactctatttttgtagaatccacaagtgtatatttgtagctcattgcggcctattgtagaaaaggaaatatcttcacttaaaaactacacagaaccattctgagaaacttctttgtgatgtgtgcattcatctcacacagttcaaactttctttcgattgagcagttaggaaacactctttttatagaatctgcaattgggtatttgaagtgctttgaggcctattgcggaaagggaaatatctttacatagaaactacacagaagcactctgagaaacttctttgtgatctgtgcattcatctcacagagttgaaccttacttttgattgagcagtttggaaacactctttctgtagaatctaccagtggatatttggagcgctttgaggactatgctggaaaaggaaatatcttcacataaataccacgcagatgcattctgagaaacttctttgtgatgtgtgatttcatcccccagagttgaacctttcttttgaattaccagtttggaaagactctttttgtagaatccgcaagtggatatttggagctctttgaggcctataatggaaaaggaaatatcttcacataaaaactagacagaaacattctcagaaacgtctttgtgatgtgcacattcaactcacagagttgaaactatctgttgatagaggagttttcaaactctctttttgtataatctgcaagtggatatttggagcccttgggggtctaaggtggaaaagtaaatatcttcacataaaaactacacagaactattcagagatactcctttgtgatgtgtgtattcatctcacagtgttgaaaatttcctttgattgagcagttgcaaaacactctttttgtagaatctgcaagtggatgtttaaagcgctttgaggaccattgtggaaaaggaagtatcttcgcataaaactacacggaagcattctgagaaatttcttctgatgtgttcattcatctcacagagttgaaactttcttttgattgagcagttttgaaacactctttttctagaatctgcaagtggatatttggagcgctttgaggcctacggtggaaaaggaaatatcttcacataaaaactagacagaagcattctccaaaacttctttgtgatgtgtgcactcaactcacggagttcaacctttcttttgatagagcagttttgaaacactctttttctagaatctgcaagtggatatttggagtgctttgagggctatgatggaaaaggaattattttcacataaaaactagacagaagaattctgagaaacttctctgccatgtgtgcgttcatctcacagagttgaatctttcttttgattgagcagtttggaaatactctgtagaatctgcaagtggaaatttggagcactttgctgcctatggtaggaaaggaaatatcttcacataaaacctagacagaagcaatctgagaaacttctttgtgatgtttgcattcatctcacagagttgaacccttcttttgattgagcactttcaaaactctctttttgaagaatctgcaagtggacatttggagctctttgaggcctatggtggaaaaggaaatatcttcacataaaaactagacagaagaattctgagaaacttccttgtgatgcatgccttaatctcacagagttgaaccttctttttgattgagtagtttggaaacactctttttgtagattctgcaagtggatattcggagcgctttacagcctatggtagaaaaggaaatatcttcacataaaatctagacagaagcaatctgagaaattttttgtgatgggtgcattcatgtcacagagttaaaactttcttttgattgagcagatttgaaactctctttttgtagaatcaccaagtggacatttggagtgctttgaggcctatggtggaaaaaggaatatcttcacataaaatctagacagaagcaatatgaaaaacttctttgtgatgtgtgcattcatctcacagacttaaacctttctttttattgagcagttttgaaactctctctttctgatgtgaagatatttccttttctaccataggctgcaaagcactccaaatgtccacttgcagattccacaaaaagagtgtgtcagagctgcacaatcaaaagaaagtgtaaactctctgagatgaatgcacacatcacaaagcagtttgtcagaatgcctctgtctattttttatatgaagatattcccttttcaaccataggcctcaaagcactccaaatgtccacttgcagatagtacaaaaagggcgtttcaaaactgctcagtcaaaagtaaacctcaactttgtgagacgaatgcacatattgcaaaggaggttgtcagaatgtttctgtctaatttttatgtgaagatatttccttttccaccataggactcaaagtgctccaaatgtccacttgcagattctacaaaaagagtttttcaaaactgccaaataaatagaaagtctcaactctgtgagatgaatgcacacatcaaaaagaagtttgtcagaatgcttctaatttttatgtgaagatatttccttttccaccataggcctcaatgcgctccaaatatccacttgcagattctacaaaaagagtgcttcaaagctgctcaatcaaaagaaagcttcaactctctgagatgaatgcacacatcacaaagaagtttgtctgaatgcttctgtctggtttttatgtgaagatatttccttttccaccataggcctcaaagcactccaaatgtccacctgcagattctacaaaaagtgtgtttcaaagctgttcaatcaaataaagcttctactctctgagatgaatgcacacatcacaaagaaatttctcagaatgcttctgtctagtttttatgtgaagatatttccttttcctccataggcctcaaagaactccaaatgtccacttgcagatagcacaaaaaggatgcttcaaaactgctcagtcaaaagtaaggtccaactttgtgagatgaatgcacatatcacaaagaagattgtcagaatgcttctgtctggtttttatgtgaagatatttcgttttccaacataggccaaaaagcactccaaatttctacttgcagattctagaaaaagagtatttccaaactgctcaatcaaaagaaagggtaaactctgcaagacgaatgcacacttcacaaagaagtttctcagaatgcttcttccagtttttatgtcaagatatttccttttccaccacaggattcaaatccctccaaatgtgcaattccagattctacaaaaagagtgtttcacactgctcaatgaaaagtaaatttcaactctgtgagatgaatgcacacatcagaaagacatttgtcagaatgcttctgtctagtttttaggtgaagaaatttccttttctaccatatgtcacaaagctctccaaatgtccgcttgcagatgctacaagaagagtgtttcaaagctgctcaatcaaaagaaagcttcaactctctgagatgaatgcacacatcacaaagaaatttctcagaatgcttctgtctattttttatgtgaagatatttctttttccatcataggactcaaagcgctctaaatgtccctttgcagattctacaaaaagactgtttcaaaactgttcaatcaaaagtaaggttcaactttgtgagatgaatgcacgtatcacaaagaaggttgtcagaatgcttctgtctagtttttatgtgaaggtatttccttttccaccataggactcaaagtgctccaaaagcccacatgcagattctacaaaaagagtgtttcaaaactgctgaataaatagaaagtctcaactctgtgagatgaatgtacacatcacaaagaagtttgtcagaatgcttctgtctagtttttatgtgaagatgtttccttttccaccataggcctcaaagcgctccaaatgtccacttgcagattctacaaaaagagtgttttaaagctgctcaatcaaaagaaagcttcgactctatgagatgaatgcacacatcacaaagaaatttctcagaatgcttctgtatagttgttacatgaggatatttccttttccaacataggcctcaaagcactccaaatgtccacatgcagatagttcaaataggttgtttcaaagctgctcaaacaaaatgaaattccactctgtgagaagaatgcacagatcacaaagaaatttctcagattgcttttgtgtagatattatttgaagatatttccttttccaccataatcctcaaagcactccaaatgtcaatttccagattgtacaaaaagagagctccaaaactgctcaatcaaaagaaaggtttaactgtgtgaggtgaatgcaaacctcacaaagaagtttctcagattgcttctgtctagattttatgtgaatatatttccttttctaccatagttcgcaaagcgctccaaatgtccacttgcggattctacaaaaagactgtttccaaagtgctcagtcaaaacaaacattcaactctgtgagatgaaagcacacagacaaggaagtttttcagaattcttctgtctagttttaatgtgaagatatttcatttccaccataggcctcaaggcacttaaaatgtccacttgcagattttacaaaaagagagtttcaaaactggcccatcaaaagaaaggttcaactatgggagatgaatgcacacatcacaaataaatttctcagaatccttctatctagtttttatattaagggtttccttttccacgataggcctcaaggtgatccaaatgtccacttgcagattctacaaaaagagagtttcaaaactgctcaataaaaagaaagctttaactctgtgagatgaatgcacacatcacaaagaagtttctcagattgcttctgtctagattttatgtgaagatatttccttttctaccacaggacgcaaagcgctccaaatgaccccttgcatattctacaaaacgagggttgccaaactgcttaatcaaaagaaaggttcaactctatgagacgaatgcaaacatcacaaactagttttccagaattcttctgtgtagtttttatgtgacgatatatctttttccaccataggcctcaaggcactccaaatgtccacttgcagattctacaaaaagagatttccatactgctcaatcataagaaaggttcaattctgtgagatgaacacagaaatcacaaagaagtttcacagaattcttctgtcttgtttttttgtgaagatatttccttttccaccacaggcctcaaagcgctccaaatgtccaattgcagattttacaaagagagaatttcaaaactgcttaatcaaaagaaagttttaactctgtgagatgaatgcatgcatcacaaagaagtttctcagattgcttctgtctagattttatgtgaagatatttccttttctatcataagccccaaagcactccaaatgttcacttgcagatcctacaaaaagagtgtttccaaactgctcaaagaaaaggttcaactctgtgagatgaatgcaagcaccacaaagaattttcgcagaattcttctgtctggtttttatgtggagatatttcattttccaccataggcctcaagcgctcaaaatgtccacttgcagattctacaaaaaacagtatttcaaaactggtccatcaaaagaaaggttcaactctgggagataaattcgcatatcacaaacaagtttctcagaatgcttctatctagtttttatgtgaaggtatttccttttccaccataggcctcaaagctctccaaatgtccacttgcagattctacaaaaagagaatttccatactgctcaatcaaaagaaatgttcaactctgtgagaagaacgcacacatcacaaagaagtttccaagactcttctgtctagtttttatgtgaagaaatttccttttccaccaaaggcctcaatgcactccaaatgtccacttgcagattctacaagagagtttcaaaactgctcaatcgaaaaaaggtttaactctgtaagatgaatgcacacatcacaaagaagtttctcagattacttctgtctagattttatgtgaagatatttccttttctgccataggccgcaaagcgctccaaatgtccacttgcagatactacaaaaagaatgtttccaaactactcaatcaaaagaaaggttcaattctgggagatgaacgcacacatcacaaagaagtttctcagaattcttctgtctagtttttatgtgaagatatttctttttcaccataggcctcaaagtgctccaaatatccacttgcatattctacaaaaacagagtttgaaaacggctcaatcaaaagaagcgtttaattctgtgaaatgaatgcatgcaacacaaagtttctcagattgcttctgtctagattttatgtgaagatatttccttttctaccataggccccaaagcgctccaaatgtccactttcagattctacaaaaagagagtttcaaatatgctaaatcaaaagaaaagttttactctgtgagatgaatgcacacatcaaaaagatgtttctcagattgcttctgtatagattttatgtgaagatatttccttttctaccataggccacaaagcactcctaatgtccacttgcagattctacaaaaagagtgtttccatactgctcaatcataagaaaggttgaactctgtgagttgaacgcacacatcacaaagaagtttccgagagttcttgtcttgttttcttatgaagatatttccttttccaccataggactcaaagcgctccaaatgtccacttgcaaattctacaaaaagagtgtttccaaacttctcaaagaaaaaaagttaactctgtgagatgaatgcaagcatcacaaagaagtttctcagaattcttctgtctagtttttatatgaagagatttcattttccaccataggcctcaagcgcttgaaatgtccacttgcagattccacaaaaaagagtatttcaatactagtccatcaaaagaaaagttcaactctgggagatgaatgagcacatcataaagaagtttctcagaatgattctatctaggtttttggtgaagatatttctttttcgaccatagacctcaaagcactccaaatgtccacttgcagatactacaaaaagagaatttcaaaactgctcaatcaaaaaaaaggcttaagtctgtgagatgaatgcacacatcacaaagaagtttctcagattgcttcagtctagattttatgtgaagatttttccttttctaccataggctgcaaagccctccaaatttccacttacagattctacaaaaagagtatttccaaatggcacaatcaaaagaaagggtcaactctgtgagagaaatgcacacatcacaaagaagtttctcagatttcttgtctctagattttatgtgaatatatttcctattctaccataggcctcaaagcgctccaaatgtcctcttgcagattccaaaataagagagtttcaaaactgctcaatcaaaggaaaagtttacctctgttagatgaatgcacacatcacaaataagtttctcagattgcttctgtctatattttatgtgaagagttttctttttctaccatagaccacaaagcgctcaaaatgtccacttgcagattctacaaaaagagtgttttcaaactgctcaatcaaaagcaatgttcaactatgtgagatgaaagcacacatcatgaaaaagtttctcagaatacttcggtctagtttttatgtgaagatatttactttttcaccataggcctctaagcgatccaaatgtgcacttgcagattctagaaaaatagagtttcaaaactactcaatcaaaagaaagctttaacactgtgagatgaatgcacatatcacaaagaagtttctgagattgcttctgtctagattttatgtaaaattatttccttttctaccataggcagcaaagtgctccaaatgtccacttgcagattctagaaaaagagagtttcaaaactgctcaatcaaaagaaagcttaaactctgtgagatgaattctgacatcacaaagtcgtttctcagattgcttctgtctagattttatgtgaatatatttccttttctaccatatgctgcaaagtgctccaaatatccacttgcagattctacaaaaagagtgtttacaaactgtccaatcaaaagaaaaggtcaactctgtgagatgaacgcacatataacaaagaagtttctcagaattcttctgtctagtttttatgggaagatatttctttttccaccataggcctcgaggcgctcgaaatgtccacttgcagagtctacaaaaagagtatttcaaaactcgtccttcaaacgaaagtttcaactctgggagatgaatgcccacatcacaaagaagtttctcagaatgcttctatctagtttttatgtgaagatactaccttttaagccataggcatcaaagtactccaaatgcccacttgcagattctacaaaaagagagtttcaaaactgttgaatcaaaagaaaggttttactctatgagatgaatacacgtatcacaaacacgtttctcagattgcttctttctagattttatgtgaagatattaccttttctaccataggcctcaaagcgctctaaatgtccacttgcagattctccaaaaagagtgtttccaaactgcttaatcgaaagaaactttcatatctgtgagttgaatgcacacatcacaaagaagtttctcagaatgctactgactagtttttatgtgaagatatttccctttccaccatagacctcagagggctccaaatgtcctctcccaggttctacaaaaagagtgtttcaagtctggtcaatcaaaacaaaggttcaattctgtgagataaatgcacacatcacaaagtagtttctcagaatatttctgtcttgtttttatgtgaagattttttcttttccaccattggcctcaaagcgctgcaaatatccacttatagattctacaaaaagagtgtttcaaagtgctcaatcaaaagtaaggttcaactgtttgcgagatgaatgcactcatgccaaaaagtttctcataatgcttgtctaattaatataaaacggtattttgttatccaccataggactcaaagcgctccaaaatccacttgcagattctacaaaaagagtgtttcaaagctgctcaatcaatagaaacgttcaatgctgtgagacgaatgcacacatcatgaagaagtttgtcagattgcatctgtctagtttttatgtgaagatatttccgtttccaacataggcctcaaaacgctccaaatgtccacatgcagattctacaaaaaaagtgtttcaaaactgctctatcaagaggaaggttcaactctgtgagatgaatgcacacataagaaagaaatttctcagaatgctttggtctagtttttatgtgaagatatttccttttccaccgtaggtctcaaagcgcaccaaatgtccccttgcagattatacgaaaacaatgtttcaaaacttctcaatcaaaagaagggtacaaatctgtgagataaatgcacacatcacaaattttgttagaatgattctgtctagtttttatgtggagatatttcgttttccaacataggcctcaaagtgcttcaattgtccacttgcagattctacaaaaagagtgtttcaaaattcctcaatcaaaactgaggttcaaatccatgagatgaatgcacccatcacaacgaggtttgtcaaaatgtttctgtatagtttttatgtgttgatatttccttttccgccataggcctttaagccctccaaatgttcgcttgcagatactacaaaaagagtgcttcaaacttgctcaatcaaaagaaaagttcaactccctgagatgaatgcacacatcacaaagaagtttctcactatgcttctgtctagtttttatgtgaagatatttccttttccgccataggccacaaagcgctccaaatgtccacttgcagattttacaaaaagagtgtttcaaaacttctcaatcacaagaaaatctcaactctgtgacatgaatgcacacatcacaaagaaatttctcagaatgcttctgtctagtttttaagtgaagatatttcattttccaccataggcctcaaagcgctcaaatgtccacttgctgattctacaaaaagagggtttccaaattactcaatcaaatgaaaggttcaactctgtgagataaacgcacacatcacaaagtaatttgtcagaatgcttcagtctagttttaatgtgaagatatttccttttccaccatgggcctcaaagccctcctaatgtacacttgtagattctacaaaaacagtgtttaaaactgctcaatcaaaagaaatgttcaactctgtgagatgaaggcacatatcacaaagaagtttatcataatgtttctgtccagttttgaaacaccctttctgtactatctgcaagtggactttaggagtgcttagaggcctacggtggaaaaggaaatatcttcacataaaaactagacagaagcattctgacaaatttccttacaatgtgtgcattcatctcacagagttgaaactttcttttgattgagcagatttgaaacactctttttgtagtatctgcaagtggacatttggagtgctttgaggtctgctttggaaaaggaaatatcttcacataaaaactatacagaaacattctgagaaacttctttgtgatgtgtgcattcatctcacagagttgaacgtttcttttcattgagcagttttgaaacactctttttgtataacatgcaagtggacatctggagggctttgaggcctacaatggaaaaggaaatatcttcacataaaaactatacagaatcattcggaaaaaattctttttgatgcatgcattcatctcacaggtttgaaactttcctttgattgagcagttttgaaacactctttttgtagaatctgcaagtggacatttggagagctttgaggcccatggtggaaaaggaaatatcttcacataaaagcgagacagaaacattctgagaagcttctttgtgttgtgtgcattcatctcacagagttgaaactttctttttattgagaagtttggaaacactctttttgtagaatctgaaagtggacatttggagcgctttgaggctatggtagaaaaggaaatatcttcacataaaaattagaagcattatgacaaactactttgtgatatgtgcattcatctcacagagttgaaacttacttttgattgagcagttttgaaacaccatttttgaattatctgcaagtggttatttggagtgcttcgaggcctatggtggaaaaggaaatatcttcaaataaaaactagaaagaagcattctgacaaatttatttgtgatgtgtacattcatctctcagagttgaacctttcctttgggcagttttgaaaaaccatttttgtactgtctgcaagtgaacatttggagtgatttgaggcctatggtgcaaaaggaaatctcttcaaataaaaagtagatagaagcattctgaaaaactcctttgtgatgtgtgcatttaactcacagagttgaacccttcttttgattgggtaatttgaaaatctcattttgtagaatctgcaagtggacatttggagctctttgaagcctatggtggaaaaggaaatatcttcacataaaaactatacagaatcattccgagaaaattctttgtgatacgtgcattcatctcacagagttggacctttcttttgattgagtagtttggaaactttctctttgtagggtctgcaagtggacacttggagcactttgaggtctacggtggaaaaggaaatatcttcacttaaaactagaccgaagcattctgagaaacttcattgtgatgtgtgcattcacctcactgagttgaaactttcttttgattgagcagtttgaaaacagtctttttgtagaatctgcaagtggacattcagagggctttgcagcctatggtagaaaaggaaatatcttcacatgaaatctagacagaagcaatctgagaatcttctttgtgatgtgtgcattcatctcatatagttaaacctatcctttgactgagcagtttttaaactctctttttgtggagtctgcaagtggacgtttggagtgctttgaggcctatggtggaaaaggaaatatcttcacataaaaactagacagaagaattctgagaaacttctttgtgatgtgtgcgttcatatcacagagttgaacctttctgttggttgagcagtttggaaacactctttttgtagaatctgcaagtggacattctcagcgctttgagacctatggtagaaaatgaaatatcttcacataaaatctagattgaagcaatctgagaaacttctttgtgatgtgtgcattcatctcacagagttaaacctttcctttgagtgagcagttttgaaactctgtttgtgtggaatctacaaatggacatttggagcactttgaggcctatggttgaaaaagaaatatgttcacataaaaacgagacagaagaattcttagaaacttatttgtgatgtgtgcattcgtctcacagagttgaacctttcttttgattgagcagtttggaaacagtctttttgtagaatctgcaaatggacatttggagcggttagaggccaacggtagaaaaggaaatatcttcacataaaatctggacagaggcattctgagacgtctttgtgatgtgtgcattcacctcagagttaaacctttcttctggttgagcagttttaaaactctctttttgtagaatctgcaagtggacatttggagcgccttgaggcctatggtggaaaaggaaatatcttcacatgacagaatagttctgagaaacttctttgtgatgtgtgcattcctctcacagagttgaacctttctttttattgaacagtttggaaactatctttatgtagaatctgcaagcggatatttggagtgctttgcggcctatggtagaaagggaaatatcttcacataaaatctacaaagaagcaatctgagaaacttctttgtgatgtgtgcattcaactcacagaattaaaactttctgttgattgaggagttttgaaactctcttttcgtagaatctgtagttggacatttgcagtgttttgaggcctatggtggaaaatatcttcacataaaaactaggcagaagaattctgagaatcttctttgtgatgcatgctttcatctcacagagttcaacattttttttgattgagcagtctggaaactctctttttgtacaatctgcaagtggacatttttagcgctttgtggtctatggtggaaaaggaaatatcttcacataaaatctagacagaaacaatctgagaaacttctttgtaatgtgtgcattcatctcacggaggtaaacctttcttttgattgagcagttttgaaactctttttgtagaatctgcaagtggacatttggagtgctttgatgcccatggtggaaaaggaaatatcttcacattaaaactagacagaagaattctgaaaaacctctttgtgatatgcgcgttcatcacacagagttgaacctttcttttcattgagcagtttggaaacactccttttgtagtatctacaagtggatatttgctgcgctttgtgccctatggtagaaaaggaaatatcttcagataaaatctagaaataagcaatctgagaaacatctttgagatgtatgcatttatctcaaagatgaaacgtttcttttgattgagcggatttgaaactccttttatagaatatgcaattggacattcggagtgccttgaggcctaaggggtaaaggaaacatcttcacataaaaactagacagaataattctgagaaactactttgtgatgtgtgcattcatctctgagagttgaaccgttgttctgaaggacagttttgaaatactctttttgtagaatctgcaagtggacatttcgagcaccttgaggcctattttggaaatggaaatatcttcacataaaaactagatagaataattctgagaaacttctttgtgatatgtgcgttcatctcacacagttgaacctttcttttgattgagcagtgtggaaacactctttttatagaatctgcatgtggacatttggagcgcgttgtggtcatggtaggaaaaaaaatcttcaaataaaatctagacagaagcaatctgagaaactgctttgtacggtgtgcattcatctcacagagttaaacctttgttttcattgagcagttttgaaactctctctttgtagattctgaaagtggatgcttggagtgctttgagacctatggtggaaaatgaaatatcttcaaataaaaactagagagaagaattctgagaaacttctttgtgatgtgtgcgttcatcccacagtttagaacctttcttttcattgagcagtttggaaacactctttttgtagactctgcaagtagacattctgagggctttgagacctatggtagaaaatgaattatcttcacataaaatctagaccgaagcaatccgagaaacctctttgtcatgtgtgcattcatctcacagagttaaacctttcctttgagtgagcagttttgaaactctctttttgtggaatctgcaagtggacatttggagccctttgaagcctatagtggaaaaggaaatatgttcacataaaaactagacagaagaattcttagaaacttctttgtgatgtgtgcattcatctcacagagttcaacctttcttttgattgtgccatttggaaacagtgtttatctagaatctgcaaaccgacatttggagcagttagcgccccacggtagaaaaggaaatatcttcacatagaatctagacagaatcattctgagaaacttctttggtatgttttcattcatctcccagcgttgaagctttcttttgaagaaccagttttgaaatactctttttgtaggatctgcaaatggacatttcaagcgccttgaggcctatggtggaaaaggaaatatcttcacataaaaactagacagaagaattctgagaaacttctttgtgatgtgtgcattcatctcacagagttgaaactttcttttgatggaccagtttttaaataccctttttggagaatctgctagtgggcattttgagcaccttgaggcctatggtggaaaatgaaatatcatcacgtaaaaactagacagaagaattctgagaaagatctttgtgatgtgtgcgtttatctcacagtgttgaacctttctttttattgagcagtttgaaaacactcttttgtagaatctgcaagtggagatttggagcgctttggggccaatggtagaaaaggaaatatcttcacataaaaactagacagaggaattctgctaaacttctttgtgatgcgtgccttcgtctcagagagttcaacctttcttttgacagagcagtttggaaatgctctttttgtagaatctgcaagtggacattttgtgtgctttcagacctatgttagaaaaggaaatatcttcacataaaatcaagacagaagcaatctgagaaactacattgtgatgcgtgcattcatctcacagagttgaacctttcttttgaaggacctgttttgaatacttttttcgtagaatttgcaagtgggcatttcgagggccttgaggcctatggtagaaaaggaaatatcttcacataaaaactacacagaagaattctgagaaacttctttctgatgtgtgtgttcatctcacacagttgaacctttcttttcattaagccgtttggaaacgttctttttgtagaatctgcaagtggatatttggagcactttgtggcctagggtagaaaaagaattatctccacataaagctagacagaagcaatctaagaaactcctctgtgaagtgtgcattcaactcacagagttaaacctttcttttgattgaacagttttgaaactctctttttgtagaatctgcaagtggacatttggagggctttgaggcctatggtagaaaagaaaatatcttcacataaaaactagacagaagaattctaggaaacttctttgtgatatccgcgtttatctcacaagttgaacctttcttttgattgagcagtttggaaacactctttttgaagaatatgcacgtggacatgtggagcgctttgcggcctatggtagaaaaggaaatatcttcacataaaaactagacagaagaattctgataaacttctttgtgatgtgtgcattcatctcaaggagttaaacctttcttttgattgagcagtattga

SEQ ID NO: 824 - DNA, 5053 bp, Homo sapiens
  source 1..5053: mol_type = other DNA
tcctcctcgtttctctctccctgtctctctgtttcttcagtcctccgctgttcattatgggcacccttccaccctccattcctcctccttgtcctttggactgtgtccttaggaatctaaaaccgctccgtctttcacctgatttggaacctaaacatctcattttcttctgtaatatggcctggccccaatataaattagacagtggctctcagtggccagaaaatggcactttcaatttctctattttgtgggacttagacaacttttgtcacaaaatgggcaaatggtttgaggttccatacatccaggcatgttttacacttcggtccctccccagcccttgttcccaatgcaatttgtctcaaattctccttctgtcccgcccatctgctcccctaccaccctctggcgacagcgagtccttcttgtccacagacccttccgatatttctcctccctgcccgtccgactccggtcccaacccttctccagaccccagtcccccttctacccataccatgcctccctatatcccttctgtccctactctgccccatacccgaactggctgacaatttggtcccacttctaatccccctcctcccaccccactatttcccctttgagaggtggctggagctgaagggatagtccgagttcatgtttctttctccctgtctgacctgtctcaggtcagccagtgtttaggttcttttccataagactccactaaatatatccaggaatttcaatatttaactcagtcttataacctcacctggagtgacttaaatgtcatcctcacttctacactcactcctgaagaatgggagggtgtttgggccctagctcagtcctatgcaggtgaccactggcgccttgagccaggtctccagggaggtcccccgtgaggacccccagtggaactatcaaacaggatctcctggtatggccgggcgagattatatgatcacttgcttagtagagggactccaaaaagctgcgtataaggctgtcaattatgataagttaaaagaaatcactcagggcaaggacgaaaatccagcccagtttgtggcccatctggccataaatccagctttagaccctgaagggccaggggccagaaggccgactcatgcattttattacccagtcagctcccgacattagaaaaaaacttcaaaaattagagtctggccctcaaaccccacaacaggatttaattaaccttgcctttaaggtgttcagtaacagggaagaggctacctggtggcagcgtgtttctgaattacagatgcttgcctccgccgtaagacgaaccccagccacaccaatggcctgtagggatttcaaggcatccagaccgcagcgcccagcagcccctccagggccatgcttcaagtgccataaaaatagtcactgggccaaggaatgcctgcagcctggggttcctcctaagccatgccctgtttgtgcaggccctcactggaagtcagactgtccaactcaagctgccatccctagagctcctggagcttaaccccacagccccctggctgactccttctctgatctcctcggcttggcggctgaggaatgacactgcccgaacacctcggaggccccatggaccatcatggacctcgggtaactcttaaggtggagggtaagtccatcccctttttgatcgatatgggggccactcactccaccctgccctcctttcagggacctgtctccctagcctccatgactgttgtgggaattgacggcaaagcctccagacctctccagactccacttgtgtgtcaactagatcagcactcctttttgcactccttttagtcatccccacttgtccagtccctctcctcggctgaggcatcctaacaaaactgtctgcctccctcactattcctaggctacagccacacctccttgccacccttctccccaacccttcaccatccccacaagctcctctaacgtctcccttcctcaaccccagggtctgggatatcatctctccctcccttgctacagatcactccccccttatcatccctttaaggccaaaccatccttaccctgcccaatgccagtatcctatccctatgccacccctaaaaggcctaaagcctttttacccactttttacaacatggcctcttagtacccattaactctcccatccttccctttcaaaaaccagacaagtcctacatattagttcaagaccttcgtctcatcaatcagattgtacttttcatccattctatagtgccaaacccatatactctcttgtccagaatacctcccaccactacctattattccgttctcagcctaaaagatgccttctacaccattcccctacatccctcctctcaacctctttttgccttcacctggactgacgctgacacccatcagtcccaacaactaacctggaccattcttcccagggcttccggaatagccctcattattttagccaagcccttgcctgcgacctactctcttttcagccttccttttcctacctcatccagtatgtcgatgatctctgcagtctctcctaggaatcctcccaacagaatatcctcctactccttcagcatttagactctaaagggtaccgaatgtccccttctaaagctcaaatttcttccccttctgttatttgtctcagcataattctccatcagcacacccgcactccccccgctgaccgtattcacctaatctcctagaccccagtcccttcaaaaacagcagcttctctccttcctaggcatcattgggtacttccacctctaggtacctggttttgccctcttaacaaaacccctttataagcttacaaaaggcaacctagctgaccccatagaccccaaaccttccctcattcatcctttcactccctgaaaaaagctcttgagacagcctcctcactggcgttcctcgactccacccagcccttctctctacatggcagaggtaaagggatgtgcagttggggtcctaacacaagggccaggcccacgaccagtggcctacttatctaaacttgacctcacagtcctaggctggctgccctgtttacatgctgcagcggccactgccctaatactcctagaatccctcaaaatcactggttacaccccagttaccctctatagcgctcacaacctccagagtctcatttcttcctctcacctcacacaactactctcctcccatctcctccagctttattcactctttattttaaaccccatgctaaccattgctcttggacccagtttcaacccagcctttcacttagcacccaacacatgtcctgagccacatgactgcatctccttaatacacatggcatcctccccctctcctcacatttctgtttttccagtcccaaacccagatcacacttggtttattgatggtagttcttcaagacccaaccaattttcgccagccaaggcaggttatgctatttgttgtgtcccacacatctgttatcgaggctgctgcacttccaccctccaccacctctcagcaagctgaactaattgctttaactcacgctgtctctctctaagggaatgcacgtcaatatttatactgattccaggtatgctttccacatccttcatcacagtgctgccatctgggtggaaagaggttttctaaccacacaagggtcttccattatcaatgcctttctcataaaggccctccttaaggctgctcttctgccagccaaggctggagttgtccactgcagaggatgccaaaaaccaacagaccctatcactaaaggaaatgcccatgccagtaaaacagcaaaagaggtggcaaacacctcagtgtctgcagacgttccagtctctgctccaaaagaccagtatatttctttctcatctattatccctacctactactcttcttctgaaaacctgctctgctagtcctttccaactcacaaggcaagtggttcttagatcatagaaagttccttcttcctgcctcacaagcgcaatctattctcttatccctccatgaccgcttccatgtaggatacaagcctttggctcgcctcctagagccccttatttctttctcatcatggaagtccgtccttaaacaatcacttcttaatgttctgtctgccactccaaggttttcttaggccccctccttccccagcacatcaggcctgagggtttactactacacaagattggcaaattgacttcactcatatgcctcgtgtcaaaaaatataagtacctcctagtttgggttgataccttcaccagatgggtcgaggccttccctactggatctgaaaaggctgcagcagtttttacctctcttctaacagatattgttacctgtttcggcctccctacttccatccaatctgacagtggtccagccttcattagccaaatcacccaggcagtttcccaggcccttggcatccagtggaatctccacaccccataccatcctcattcctcaggaaaggttgaaagagccaacggcctcttaaaaactcaccctccaactccgaaaggactggactgttctcctaccacttgtgcttctcaggatctgagccaccgcccatgaacctaccaggtatagcccattcgaactcttatatggtagtacttttctactggggcccaacctcatcccagacaccagtcctccaacaggctaggaatgaaatctgtcaggctgctaaccttcttttacccacctcagatacccagccatatgaggacactctggccagacagcccatcctgataaagagcttaaccccctgatctctacaacctcagtggacaggacccttcctggtcgtttatggtaccccaatggctgtctgcttacaagatcctcctcagtggattcacccttccagagtaaagctgtgtccatctgacactcagcctgacccttcttcctcctcttggaagtcgcaagtactctccccgacctcgttaaaactcaccgaaatccctgaagaa

SEQ ID NO: 825 - DNA, 295 bp, Homo sapiens
  source 1..295: mol_type = other DNA
tcaggcacagtgactcacacctataatcccagcactttgggaggcagaggcatgtggatcacttgaggtcaggagttcaagatcagcctggccaacatggtgatagccagtctctactaaaaataaaaaaattagccaaatgtggtggtgtgtgcctgtagtctcagctactctggaggctaaggcaggagaattgcttgaacctgggaggcagaggttgcagtgagccaagatcacaccactgcactccagcctgggtgacagagcaagactccatctaaaaaaaaaaaaaaaa

SEQ ID NO: 826 - DNA, 8427 bp, Homo sapiens
  source 1..8427: mol_type = other DNA
ttttggcgagccagccaggaggggagactacaggtttactgtctcctttggctgtgggactggagccccgggctgggggagacccgtgacccaaggcaccattgggagaccttcaacccggaggggagattggctctcccatgacccggcgcccctccctgacagtgcattggaacctaaggggctacaggacgattccaggacttcacgctacaggactgcagtaaggtttgggcccaaggcaggacccgtcccataaggatggaaggggagcctgatcacctcctggggtgtacctagtaatccgactcaggacatgagaggggctcgcaaagttggaagaaacctacaccccaactgacccaggacgtgagagtggctcactaagttggttaagaaaggaaactggaagtggggaggtgtgtgaataaatgtgaaagagatggttccaaaaggaaccaacatgctgagtgacgtgtgtggagccacaggtctcttagcatagactgtaccatctgagtgaagtgtggaaccgaccgagactagtggcaaacatcctttggggctacggcatatggcttagggaggtgccccacaacttatagattgtggtggtccgggttcaggactcatatgaaccctccattaaatctaagaagtgtctgaaatactcctgcaagggacacggtctaatcagtctgaaatgaaaggaagagtgagtgggttctgccataactgggaggaaatgggagggaagtcatcaaaacccatcccattagaatgtatgttaaggaactttaagtaagattatacaggggattatgagatcaagttgaccccccagaggttgagaactctctgtgaaatagaatggccctctttcaatgttggatggctggccgaaggaactatagatagggaaaaaattggccgtgtatttaaggtggtgactggggtcggaggacagccagggcatccagaccaatttccttatattgactcatggctaaatatagttcaaactcaacctgcatggctgcagccttgcctggcttcttattgcaaaacgctcatagctcgagccaagcctaaagtaaaagaaaaatcagcttcactgtcagctacagagacaaaaggaaagccacaagaaaaaccagttttgcaggaaccagcagaggagatagaaacccctcctccctatgtgccaatctatccccctttaccaaggacggcccctgagcagccagactcagatggtgacacactccaggctacacctcaaagggggaaatctgagcccccacctcaggaggtcaagaaggaaagtcaggatgatcaagcaggccgccttcgacctggccacaccagagtgtggcagatgcccctccgtgaaacacggggacctatctattatgatgaacaggggcaggttcaagggggggcaaccgacttttatttaccagcctttttcaaccactgatctcctaaactggaaacaccatactccctactccctcctacacagagaagccccaagccctcacagatctgatgcagtccatttttcagacacaaaatccaacgtggccagattgcaaacagctcctcctgacactgtttaacaccgaggaatgccgaagggtgacccaggcagccctccactggctggaacacaatgcaccagaaggcacacttaatgtccaggcatatatgctcagggccaattcccagaagccagcctacactgggacccaaatgatgcagcccaattacagtacctacagaggtactgggaggcactcctgcaagggctaaaggaaggtgggaaaaaggcagtcaacacggggaaaatcttggaagtgctgcaggagactaattaaagtcctggtcagttttatgagagactctgtaaagcattctagctttacaccccgtttgacactgaggctactgagaaccagtgcatggtgaacgcagagtttgtaggacaggcccagggagacatcaggcgaaagctgcaaaagctagagtgtttcacgggcatgaatgccactcagcttttagaagtggccaccaaggtgtatgttaaccgtaaccaggagacaaagagaggctgatcagacttaagaaaaaggccgatctgctagtggcagtcctcacaggaagggaaactagcatcgcgagtgggtgtggacatagccatggacatggaggggttcaggccaggcagagacctgaaagtcaaccaagactatgtaggaatcaatgtgcgcaatgcaaaaagaggggacactggaaaggtgaatgtccagagggcaatgaagaaaatgacagagactataaaactggaaaactgccagccaagggctattgtgtcccaagggagtcagatacctacttgatcaggctggcaggaactggagaatatgaagattaggccagactgggctccttctctttagccccccaggagcccatggtcacattagaagtaggaggccagctaatgaactttatggtagacactggggctgaacacttggtagtgacccagcccatagggccatcatccaaagatcatacaactattgttggggctacaggggtcccagagaagaggccattttgtcagccaaggaggtgtgtctttggaggatgagaggtccaacataaattcctgtatctccccaattatccagtgcctctactaggaagagacctactccaaaaattgcatgcacagattacctttgggtcacaaggagatattactttaagcctaactcaaccaaaggccatggtgttaaccctcaccatcccgcaggctgaggaatggagactatacatgaagtacaggcaccaatgcagccttgtacgcaggaggaagagaaattattatttaggccaattgataaaattcctggagtatgggctgaagacaagccacctgggctggctgtaaatcaggcactggtagtagaattaaaaccaggagcaactccagttcaggtttgtcagtacccactttcccaagaggatatttggggcatttataagcatttaaagtggctctgtgaccatgggatcataatccaatgccagtcaccctggaacactccacttttgctggtacaaaaaccattgcctggaccaggatctgatgagtatataccggtgcagggcttgcatgctgtaaaccaagccacggtgaccatacatccagtagtaccaaacctgtatactttaatgggacttattctagcaagtgccacctggtttacagtcctggacttaaaggatgctttcttctgtctctacctggcaccagttagtcagcccatctttgcattttaatgggacaattcagtcacaggcacagggggacagctcgcctggactagtctcccacaagggttcaagaattctcccacaatctttggggaagcactggcctcagacctcaaggcatacaccccaccaaatgacaactgcgccttgttgcagtacatagacaaccttcttttggcagccccaacccaagaggactgttactggggaacccaggacctcctccatctcttatggaaagcagggtatagagtatccaaaaagaaggcccaaatttgccatgaaaaggttaaatatttaggcttcatagtaagccaaggggaacgctggcttggccatggatgaaagcaagccatttgtgcacttccaactccaaccacctggcgccaaataggggaattcttaggggcagcagggttctgccatatctggatcccaaatttctcacttatagccaggcccttatatgaagccacaagggagggtgaaaaggaacccctcctctgaaaggctgaccagaagaaggtgtttaaacaaatcaaagaagccctaactcaggctccagccttaggactgccagatactactaagcctttctttctatatgtccatgaattaaagggaatggctataggggtcctgactcaaatcataggatcatggcatcgcccagtggtgtacttatccaaacagttgactctgtggtgctagggtggcctccttgctgtaaagcactagccactaccaccctattgacacaagaagctgacaaactgaccctggggcaacaattgaccatccaggtaccacatgcggttataactttaatggatcagagagagcagcattggttatcaaacccaacgatgacttgataccaagggctcctatgtgaaaatccacgcataactttagaaacagtgaacacccttaacccagctaccctgctcccagtcaaaccgggaatcaccttccgtgactgtggcaacagtggacgaggtattctccagtcgaggagaccttacagaccagcctttcaaggacccagatgtagaatacttcatagatggaagcagttttgtgctggaaggggtctgctgggctgggtaggcagtggtgaccttagactcagtggtggaggcgtagcctcagcctgctggaacatcagcccagaaggcagagctagcagccctaacgagggttctccagctggcagaagacaaaaagatcagtgtttacacggattccaaatatgcttttgccacactgcatgttcatggagctatatataaagaaagaggactcttaactgccacaggcaaagaaataaaatggaaagaatgaattctacagctcttagatgctgtatggatcccagagaaagtagcagctatgcactgcaggggacaccagagggcagggacgtcagaggcaaaaggaaacagaaaggcagacagggaggcaaaatgggcagcaatggttacacctcattttaaaaaggaagccttagctatgcccctcctcccagagcctcccctccaggaggtctcaagttactctccgaatgagaaggcctgttttgcccaaaaaactggaaaatatattgaaggaggatggtggaaattttctgatgggaggtcggccattcccaaaatggtggcccccaaatttgtgaagtaattgcatcatggaactcgtgggaaaaacagcactagaaacgctactaggacgccatttctatgtgccgcgactcactgccatcacccaagctgtttgtgaacaatatttaacctgtgcccagaacaacccatgacaatggcccactcggcccccaggaattcaggaaataggaaccatgccctgtgaaaacctgcttatggacttacagagttgcctcaggcagggagctatcggtacatgttagtacttgtctacaccttttcaggatgggccaaggctttccctaccagaagcaagaactcatgagaagtgactaaaatactattaagaaacattatccccagatttggactgtctgtgactctagggtcagacaacaggctggcatttctagctgaaataattcaggaactaacacgagtgttaaaaataaaatggaaattacacacagcctaccggctgcagagcttaggaaaagtagagtgcatgaactggacactcaaacagctactgaagaaatattgccaagaaacccctctgagatgggatcaagtcctgcccatggtcctccttcaagttaggtgcacccccaccaaacaaactgggtattcgccctatgaaatactgttcggcaagccatccccaatcataagtcaaattaagggtaatctccgtgaactaggggaattaactttaaggaggcaaatgcaggctttagggatagccatgtgaagtgtccatggctgggtacaggaaagaatgcccataagcctgatagatccaatacacccctttaaacccagggactctctttgggtcaaaaaataaaacccaaccactctgggacccatatgggatgggctccatactgtaatcttgtctattcccactgttgttaaagttgcaggaattgtgccttggatccatccatccagtcagctgaaaccagcagcccaggacaagtggaccagccaacaggacctagaccatgcaacccagctgatcctacgatggaaccaaggtgccagtgagatgacaacagccctgctctggtcactccggaagctgaccagtccacacacggctgaagcttgaggagacaacagccctgctctagtcaccccagaagctgactagtctatgcacggccgaagcttgagtcatcatcagggaagtaaatgtggttagaaatctgaagtccagtaattttccttgtcatattaattactttgctattaagctgtcactttgcttagccttctccccccaggaaaaagccttttctgtccatgctgggtatgaacatgctactcatcactttgttcttgctactccccttatccatgttaaaaggagaaccctgggagggatgcctccactgcacccacactacgtggtcggggaacatcatgactaaaaccctgttgtatcacacttattatgagtgtgctgggacctgcctaggaacttgtactcacaaccagacaacctactcagtctgtgacccaggaaggggccagccttatgtgtgttatgaccctaagtcttcacctgggacctggtttgaaattcatgtcgggtcaaaggaaggggatcttctaaaccaaaccaaggtatttccctctggcaaggatgtcgtatccttatactttgatgtttgccagatagtatccatgggctcactctttcccgtaatcttcagttccatggagtactatagtagctgccataaaaataggtatgcacaccctgcttgttccaccgattccccagtaacaacttgctgggactgcacaacgtggtccactaaccaacaatcactagggccaattatgcttaccaaaataccattagaaccagattgtaaaacaagcacttgcaattctgtaaatcttaccatcttagagccagatcagcccatatggacaacaggtttaaaagcaccgctaggggcacgagtcagcggtgaagaaattggcccaggagcctatgtctatctatatatcataaagaaaactcggacccgctcaacccaacagttccgagtttttgagtcattctatgagcatgttaaccagaaattgcctgagccccctcccttggccagtaatttattcgcccaactggctgaaaacatagccagcagcctgcacgttgcttcatgttatgtctgtgggggaatgaacatgggagaccaatggccatgggaagcaagggaactaatgccccaagataatttcacactaaccgcctcttccctcgaacctgcaccatcaagtcagagcatctggttcttaaaaacctccattattggaaaattctgtattgctcgctggggaaaggcctttacagacccagtaggagagttaacttgcctaggacaacaatattacaacgagacactaggaaagactttatggaggggcaaaagcaataattctgaatcaccacacccaagcccattctctcgtttcccatctttaaaccattcttggtaccaacttgaagctccaaatacctggcaggcaccctctggcctctactggatctgtgggccacaagcatatcgacaactgccagctaaatggtcaggggcctgtgtactggggacaattaggccgtccttcttcctaatgcccctaaaacagggagaagccttaggataccccatctatgatgaaactaaaaggaaaagcaaaagaggcataactataggagattggaaggacaatgaatggcctcctgaaagaataattcaatattatggcccagccacctgggcagaagatggaatgtggggataccgcaccccagtttacatgcttaaccgcattataagattgcaggcagtactagaaatcattaccaatgaaactgcaggggccttgaatctgcttgcccagcaagccacaaaaatgagaaatgtcatttatcaaaatagactggccttagactacctcctagcccaggaagagggagtatgcggaaagttcaaccttactaactgctgcctggaacttgatgacgaaggaaaggtcatcaaagaaataactgctaaaatccaaaagttagctcacatcccagttcagacttggaaaggatagtctccagattcccttttcagaggttggttctcatcccttggaggatttaaaaccttagtacaaatagtcctagccatattgggagtttgccttatactcccttgtctcttacccctcattgtcaaaaatatccaaacagccatagaggctcttgtggacagacggactaccacacgactaatggccctaactaagtattaacccctgccaagaaaagagctacttcctcttgaagtaaatgaagatagtgatgctttctcttaaactttacttataaaaagcatcaaagggggga

SEQ ID NO: 827 - DNA, 6030 bp, Homo sapiens
  source 1..6030: mol_type = other DNA
ggaggaggagccaagatggccgaataggaacagctccggtctacagctcccagcgtgagcgacgcagaagacgggtgatttctgcatttccatctgaggtaccgggttcatctcactagggagtgccagacagtgggcgcaggccagtgtgtgtgcgcaccgtgcgcgagccgaagcagggcgaggcattgcctcacctgggaagcgcaaggggtcagggagttccctttccgagtcaaagaaaggggtgacggacgcacctggaaaatcgggtcactcccacccaaatattgcgcttttcagactggcttaagaaacggcgcaccacgagactatatcccacacctggctcagagggtcctacgcccacggaatctcgctgattgctagcacagcagtctgagatcaaactgcaaggcggcagcgaggctgggggaggggcgcccgccattgcccaggcttgcttaggtaaacaaagcagccgggaagctcgaactgggtggagcccaccacagctcaaggaggcctgcctgcctctgtaggctccacctctgggggcagggcacagacaaacaaaaagacagcagtaacctctgcagacttaagtgtccctgtctgacagctttgaagagagcagtggttctcccagcacgcagctggagatctgagaacgggcagactgcctcctcaagtgggtccctgacccctgacccccgagcagcctaactgggaggcaccccccagcaggggcacactgacacctcacacggcagtgtattccaacagacctgcagctgagggtcctgtctgttagaaggaaaactaacaaccagaaaggacatctacaccgaaaacccatctgtacatcaccatcatcaaagaccaaaagtagataaaaccacaaagatggggaaaaaacagaacagaaaaactggaaactctaaaacgcagagcgcctctcctcctccaaaggaacgcagttcctcaccagcaacagaacaaagctggatggagaatgattttgacgagctgagagaagaaggcttcagacgatcaaattactctgagctacgggaggacattcaaaccaaaggcaaagaagttgaaaactttgaaaaaaatttagaagaatgtataactagaataaccaatacagagaagtgcttaaaggagctgatggagctgaaaaccaaggctcgagaactacgtgaagaatgcagaagcctcaggagccgatgcgatcaactggaagaaagggtatcagcaatggaagatgaaatgaatgaaatgaagcgagaagggaagtttagagaaaaaagaataaaaagaaatgagcaaagcctccaagaaatatgggactatgtgaaaagaccaaatctacgtctgattggtgtacctgaaagtgatgtggagaatggaaccaagttggaaaacactctgcaggatattatccaggagaacttccccaatctagcaaggcaggccaacgttcagattcaggaaatacagagaacgccacaaagatactcctcgagaagagcaactccaagacacataattgtcagattcaccaaagttgaaatgaaggaaaaaatgttaagggcagccagagagaaaggtcgggttaccctcaaaggaaagcccatcagactaacagcggatctctcggcagaaaccctacaagccagaagagagtgggggccaatattcaacattcttaaagaaaagaattttcaacccagaatttcatatccagccaaactaagcttcataagtgaaggagaaataaaatactttatagacaagcaaatgctgagagattttgtcaccaccaggcctgccctaaaagagctcctgaaggaagcgctaaacatggaaaggaacaaccggtaccagccgctgcaaaatcatgccaaaatgtaaagaccatcgagactaggaagaaactgcatcaactaatgagcaaaatcaccagctaacatcataatgacaggatcaaattcacacataacaatattaactttaaatataaatggactaaattctgcaattaaaagacacagactggcaaggtggataaagagtcaagacccatcagtgtgctgtattcaggaaacccatctcacgtgcagagacacacataggctcaaaataaaaggatggaggaagatctaccaagcaaatggaaaacaaaaaaaggcaggggttgcaatcctagtctctgataaaacagactttaaaccaacaaagatcaaaagagacaaagaaggccattacataatggtaaagggatcaattcaacaagaggagctaactatcctaaatatttatgcacccaatacaggagcacccagattcataaagcaagtcctcagtgacctacaaagagacttagactcccacacattaataatggaagactttaacaccccactgtcaatattagacagatcaacgagacagaaagtcaacaaggatacccaggaattgaactcagctctgcaccaagcagacctaatagacatctacagaactctccaccccaaatcaacagaatatacatttttttcagcaccacaccacacctattccaaaattgaccacatagttggaagtaaagctctcctcagcaaatgtaaaagaacagaaattataacaaactgtctctcagaccacagtgcaatcaaactagaactcaggattaagaatctcactcaaagccgctcaactacatggaaactgaacaacctgctcctgaatgactactgggtacataacgaaatgaaggcagaaataaagatgttctttgaaaccaacgagaacaaagacaccacataccagaatctctgggacgcattcaaagcagtgtgtagagggaaatttatagcactaaatgcctacaagagaaagcaggaaagatccaaaattgacaccctaacatcacaattaaaagaactagaaaagcaagagcaaacacattcaaaagctagcagaaggcaagaaataactaaaatcagagcagaactgaaggaaatagagacacaaaaaacccttcaaaaaatcaatgaatccaggagctggttttttgaaaggatcaacaaaattgatagaccgctagcaagactaataaagaaaaaaagagagaagaatcaaatagacacaataaaaaatgataaaggggatatcaccaccgatcccacagaaatacaaactaccatcagagaatactacaaacacctctacgcaaataaactagaaaatctagaagaaatggatacattcctcgacacatacactctcccaagactaaaccaggaagaagttgaatctctgaatagaccaataacaggctctgaaattgtggcaataatcaatagtttaccaaccaaaaagagtccaggaccagatggattcacagccgaattctaccagaggtacaaggaggaactggtaccattccttctgaaactattccaatcaatagaaaaagagggaatcctccctaactcattttatgaggccagcatcattctgataccaaagccaggcagagacacaaccaaaaaagagaattttagaccaatatccttgatgaacattgatgcaaaaatcctcaataaaatactggcaaactgaatccagcagcacatcaaaaagcttatccaccatgatcaggtgggcttcatccctgggatgcaaggctggttcaatatacacaaatcaataaatgtaatccagcatataaacagagccaaagacaaaaaccacatgattatctcaatagatgcagaaaaggcctttgacaaaattcaacaacccttcatgctaaaaactctcaataaattaggtattgatgggacgtatctcaaaataataagagctatctatgacaaacccacagccaatatcatactgaatgggcaaaaactggaagcattccctttgaaaactggcacaagacagggatgccctctctcactgctcctattcaacatagtgttggaagttctggccagggcaatcaggcaggagaaggaaataaagggtattcaattaggaaaagaggaagtcaaattgtccctgtttgcagacgacatgattgtttatctagaaaaccccatcgtctcagcccaaaatctccttaagctgataagcaacttcagcaaagtctcaggatacaaaatcaatgtacaaaaatcacaagcattcttatacaccaacaacagacaaacagagagccaaatcatgggtgaactcccattcacaattgcttcaaagagaataaaatacctaggaatccaacttacaagggatgtgaaggacctcttcaaggagaactacaaaccactgctcaaggaaataaaagaggacacaaacaaatggaagaacattccatgctcatgggtaggaagaatcaatatcgtgaaaatggccatactgcccaaggtaatttacagattcaatgccatccccatcaagctaccaatgactttcttcacagaattggaaaaaactactttaaagttcatatggaaccaaaaaagagcccgcattgccaagtcaatcctaagccaaaagaacaaagctggaggcatcacactacctgacttcaaactatactacaaggctacagtaaccaaaacagcatggtactggtaccaaaacagagatatagatcaatggaacagaacagagccctcagaaataatgccgcatatctacaactatctgatctttgacaaacctgagaaaaacaagcaatggggaaaggattccctatttaataaatggtgctgggaaaactggctagccatatgtagaaagctgaaactggatcccttccttacaccttatacaaaaatcaattcaagatggattaaagatttaaacgttaaacctaaaaccataaaaaccctagaagaaaacctaggcattaccattcaggacataggcgtgggcaaggacttcatgtccaaaacaccaaaagcaatggcaacaaaagacaaaattgacaaatgggatctaattaaactaaagagcttctgcacagcaaaagaaactaccatcagagtgaacaggcaacctacaacatgggagaaaattttcgcatcctactcatctgacaaagggctaatatccagaatctacaatgaactcaaacaaatttacaagaaaaaaacaaacaaccccatcaaaaagtgggcgaaggacatgaacagacacttctcaaaagaagacatttatgcagccaaaaaaccatgaagaaatgctcatcatcactggccatcagagaaatgcaaatcaaaaccactatgagatatcatctcacaccaggtagaatggcaatcattaaaaagtcaggaaacaacaggtgctggagaggatgcggagaaataggaacacttttacactgttggtgggactgtaaactagttcaaccattgtggaagtcagtgtggcgattcctcagggatctagaactagaaataccatttgacccagccatcccattactgggtatatacccaaatgagtataaatcatgctgctataaagacacatgcacacgtatgtttattgcggcactattcacaatagcaaagacttggaaccaacccaaatgtccaacaatgatagactggattaagaaaatgtggcacatatacaccatggaatactatgcagccataaaaaatgatgagttcatatcctttgtagggacatggatgaaactggaaaccatcattctcagtaaactattgcaagaacaaaaaaccaaacaccgcatattctcactcataggtgggaattgaacaatgagatcacatggacacaggaaggggaatatcacactctggggactgtggtggggttgggggaggggggagggatagtattgggagatatacctaatgctagatgacacattagtgggtgcagcgcaccagcatggcacatgtatacatatgtaactaacctgcacaatgtgcacatgtaccctaaaacttagagtataataaaaaaaataaa

SEQ ID NO: 828 - DNA, 975 bp, Homo sapiens
  source 1..975: mol_type = other DNA
gttcagggaatcacaagaaaatagagatagaaaattaaatgaaatttagaaagcaatccatgtatgtagtgagaaatttgacaaagaaatagaaacaagaaaacaaatagaaatcctatctataaacaatacagtaactgaactggaataactcattggaaagctttagcagcagacttaatcaaataaaagaattggtgagcttcaggacagaacatatgaaattacccattcagaggagcaagaataaaaaagggtaaagaagacctacaagaattgtggaataccatcaagcagactaacctctgcataataggaattcctgaagatgaggaagaaaagggtgtagaaagcatacttaagcaaatcatggctgaaaaagtcccaaatctagagaaagatgacactgtctaggtacaggaagctcagtgatcagcaattaaaatcaacccaaagaagagatacctatggcacataacaatctggttaacaaaaatcaaagacaaagaaagattactcaaggcagcaagagaaaagaaatgtgtcccattcaacataccccaatagagctttcagcagatatcccagcagaaaccctgtaggccagcaaagagtggaatggtatatttagagtgctgaaggaaaagaaaaaaactgccaagcaagaatactgtacccagcaaagttaccctttataaacacaaaggcaagataaagatttttccagacaaacaaaagttgagggaattcatcaacaccagacctgtcttacaaaaaatgctaaagggagctgttcagtcagaaagtgaaggatgctaatgggtaaaaagaaagcatctaatggcattaaactcaccggcaaaagaaagaaaactcactggtaaaagaagacttctgaaaaattcagaatattgtaatactgcaaatgggatgagtaaaccacttatattttaagtatgaagactaaaagacaaa

SEQ ID NO: 829 - DNA, 1367 bp, Homo sapiens
  source 1..1367: mol_type = other DNA
cggccagccgccccgtccgggagggaggtgggggggtcagcccccgtccgggaggtgaggggcgcctctgcccggctgcccctactgggaagtgaggacccctctgcccggccagccgccccgtccgggagggaggtgggggggtcagccccccgcccggccagccgcccagtccgggagggaggtggggggtcagccccctgcccggccagccgccccgtccgggagggaggtggggggatcagccccccgcctggccagccgccccatccgggagggaggtgggggggtcagccccccgcccggccagccgccccgtccgggagggaggtggggggatcagccccccgcctggccagccgccccgtccgggaggtgaggggcgcctctgcccggccgcccctactggaaagtgaggagctcctctgcccggccagccgcccagtccgggagggaggcgggcgggggtcggccagccgccccgtccgggagggaggtggagggggtcagccccccttccggccggccgccccgtccgggaggtgaggggcgcctctgcccggccgcccctactgggaagtgaggacccctctgcccggccagccgccccgtccgggagggaggtaggggggacagccccccgcccggccagccgccctatccaggaggtgaggggcgcctctgcccggccgcccctactgggaagtgaggagccgctctgcctggccagccgccccgtccgggagggtggtggggggtcagcccccgcccggccagccgccccatccgggaggtgaggggcgcttctgcccggccgcccctactgggaagtgaggagcccctctgcctggccacgaccccgtctgggaggtgtgcccagcggctcattggggatgggccatgatgacaatggcggttttgtggaatagaaaggcgggaagggtggggaaaaaattgagaaatcggatggttgccgggtctgtgtggatagaagtagacatgggagacttttcattttgctctgtactaagaaaaattcttctgccttgggatcctgttgatctgtgaccttatccccaaccctgtgctctctgaaacatgtgctgcgtccactcagggttaaatggattaagggcggtgcaagatgtgcttggttaaacagatgcttgaaggcagcatgctcgttaagagtcatcaccactccctaatcttaagtacccagggacacaaacactgcggaaggccgcagggtcctctgcctaggaaaaccagagacctttgttcacttgtttatctgctgaccttccctccactattgtcctatgaccctgccaaatccccctctgcgagaaacacccaagaatgat

SEQ ID NO: 830 - DNA, 160 bp, Homo sapiens
  source 1..160: mol_type = other DNA
ccacctgtttttgtaaataaagttttactggaactcaaccatttacatatttttcatattacgattgctgtggtaaacagatccaacacagataatatgaccagcaaagttgaacatatttaatatttttccctctgtagcaaaaagtttgctgatctct

SEQ ID NO: 831 - DNA, 6028 bp, Homo sapiens
  source 1..6028: mol_type = other DNA
gaggaggagccaagatggccgaataggaacagctccggtctacagctcccagcgtgagcgacgcagaagacgggtgatttctgcatttccatctgaggtaccgggttcatctcactagggagtgccagacagtgggcgcaggccagtgtgtgtgcgcaccgtgcgcgagccgaagcagggcgaggcattgcctcacctgggaagcgcaaggggtcagggagttccctttccgagtcaaagaaaggggtgacggacgcacctggaaaatcgggtcactcccacccgaatattgcgcttttcagaccggcttaagaaacggcgcaccacgagactatatcccacacctggctcagagggtcctacgcccacggaatctcgctgattgctagcacagcagtctgagatcaaactgcaaggcggcaacgaggctgggggaggggcgcccgccattgcccaggcttgcttaggtaaacaaagcagccgggaagctcgaactgggtggagcccaccacagctcaaggaggcctgcctgcctctgtaggctccacctctgggggcagggcacagacaaacaaaaagacagcagtaacctctgcagacttaagtgtccctgtctgacagctttgaagagagcagtggttctcccagcacgcagctggagatctgagaacgggcagactgcctcctcaagtgggtccctgacccctgacccccgagcagcctaactgggaggcaccccccagcaggggcacactgacacctcacacggcagggtattccaacagacctgcagctgagggtcctgtctgttagaaggaaaactaacaaccagaaaggacatctacaccgaaaacccatctgtacatcaccatcatcaaagaccaaaatagataaaaccacaaagatggggaaaaaacagaacagaaaaactggaaactctaaaacgcagagcgcctctcctcctccaaaggaacgcagttcctcaccagcaacagaacaaagctggatggagaatgattttgacaagctgagagaagaaggcttcagacgatcaaattactctgagctacgggataacattcaaaccaaaggcaaagaagttgaaaactttgaaaaaaatttagaagaatgtataactagaataaccaatacagagaagtgcttaaaggagctgatggagctgaaaaccaaggctcgagaactaagtgaagaatgcagaagcctcaggagccgatgcgatcaactggaagaaagggtatcagcaatggaagatgaaatgaatgaaatgaagcgagaagggaagtttagagaaaaaagaataaaaagaaatgagcaaagcctccaagaaatatgggactatgtgaaaagaccaaatctacgtctgattggtgtacctgaaagtgatgtggagaatggaaccaagttggaaaacactctgcaggatattatccaggagaacttccccaatctagcaaggcaggccaacgttcagattcaggaaatacagagaacaccacaaagatactcctcgagaagagcaactccaagacacataattgtcagattcaccaaagttgaaatgaaggaaaaaatgttaagggcaaccagagagaaaggtcgggttaccctcaaaggaaagcccatcagactaacagcggatctctcggcagaaaccctacaagccagaagagagtgggggccaatattcaacattcttaaagaaaagaattttcaacccagaatttcatatccagccaaactaagcttcataagtgaaggagaaataaaatactttatagacaagcaaatgctgagagattttgtcaccaccaggcctgccctaaaagagctcctgaaggaagcgctaaacatggaaaggaacaaccggtaccagccgctgcaaaatcatgccaaaatgtaaagaccatcgagactaggaagaaactgcatcaactaatgagcaaaatcaccagctaacatcataatgacaggatcaaattcacacataacaatattaactttaaatataaatggactaaattctgcaattaaaagacacagactggcaagttggataaagagtcaagacccatcagtgtgctgtattcaggaaacccatctcacgtgcagagacacacataggctcaaaataaaaggatggaggaagatctaccaagccaatggaaaacaaaaaaaggcaggggttgcaatcctagtctctgataaaacagactttaaaccaacaaagatcaaaagagacaaagaaggccattacataatggtaaagggatcaattcaacaagaggagctaactatcctaaatatttatgcacccaatacaggagcacccagattcataaagcaagtcctcagtgacctacaaagagacttagactcccacacattaataatgggagactttaacaccccactgtcaacattagacagatcaacgagacagaaagtcaacaaggatacccaggaattgaactcagctctgcaccaagcagacctaatagacatctacagaactctccaccccaaatcaacagaatatacatttttttcagcaccacaccacacctattccaaaattgaccacatacttggaagtaaagctctcctcagcaaatgtaaaagaacagaaattataacaaactatctctcagaccacagtgcaatcaaactagaactcaggattaagaatctcactcaaagccgctcaactacatggaaactgaacaacctgctcctgaatgactactgggtacataacgaaatgaaggcagaaataaagatattctttgaaaccaacgagaacaaagacaccacataccagaatctctgggatgcattcaaagcagtgtgtagagggaaatttatagcactaaatgcctacaagagaaagcaggaaagatccaaaattgacaccctaacatcacaattaaaagaactagaaaagcaagagcaaacacattcaaaagctagcagaaggcaagaaataactaaaatcagagcagaactgaaggaaatagagacacaaaaaacccttcaaaaactcaatgaatccaggagctggttttttgaaaggatcaacaaaattgatagaccgctagcaagactaataaagaaaaaaagagagaagaatcaaatagacacaataaaaaatgataaaggggatatcaccaccgatcccacagaaatacaaactaccatcagagaatactacaaacacctctacgcaaataaactagaaaatctagaagaaatggatacattcctcgacacatacactctcccaagactaaaccaggaagaagttgaatctctgaatagaccaataacaggctctgaaattgtggcaataatcaatagtttaccaaccaaaaagagtccaggaccagatggattcacagccgaattctaccagaggtacaaggaggaactggtaccattccttctgaaactattccaatcaatagaaaaagagggaatcctccctaactcattttatgaggccagcatcattctgataccaaagccgggcagagacacaaccaaaaaagagaattttagaccaatatccttgatgaacattgatgcaaaaatcctcaataaaatactggcaaaccgaatccagcagcacatcaaaaagcttatccaccatgatcaagtgggcttcatccctgggatgcaaggctggttcaatatacgcaaatcaataaatgtaatccagcatataaacagagccaaagacaaaaaccacatgattatctcaatagatgcagaaaaagcctttgacaaaattcaacaacccttcatgctaaaaactctcaataaattaggtattgatgggatgtatttcaaaataataagagctatctatgacaaacccacagccaatatcatactgaatgggcaaaaactggaagcattccctttgaaaactggcacaagacagggatgccctctctcaccgctcctattcaacatagtgttggaagttctggccagggcaatcaggcaggagaaggaaataaagggtattcaattaggaaaagaggaagtcaaattgtccctgtttgcagacgacatgattgtttatctagaaaaccccatcgtctcagcccaaaatctccttaagctgataagcaacttcagcaaagtctcaggatacaaaatcaatgtacaaaaatcacaagcattcttatacaccaacaacagacaaacagagagccaaatcatgggtgaactcccattcacaattgcttcaaagagaataaaatacctaggaatccaacttacaagggatgtgaaggacctcttcaaggagaactacaaaccactgctcaaggaaataaaagaggacacaaacaaatggaagaacattccatgctcatgggtaggaagaatcaatatcgtgaaaatggccatactgcccaaggtaatttacagattcaatgccatccccatcaagctaccaatgactttcttcacagaattggaaaaaactactttaaagttcatatggaaccaaaaaagagcccgcattgccaagtcaatcctaagccaaaagaacaaagctggaggcatcacactacctgacttcaaactatactacaaggctacagtaaccaaaacagcatggtactggtaccaaaacagagacatagatcaatggaacagaacagagccctcagaaataatgccgcatatctacaactatctgatctttgacaaacctgagaaaaacaagcaatggggaaaggattccctatttaataaatggtgctgggaaaactggctagccatatgtagaaagctgaaactggatcccttccttacaccttatacaaaaatcaattcaagatggattaaagatttaaacgttaaacctaaaaccataaaaaccctagaagaaaacctaggcattaccattcaggacataggcgtgggcaaggacttcatgtccaaaacaccaaaagcaatggcaacaaaagacaaaattgacaaatgggatctaattaaactaaagagcttctgcacagcaaaagaaactaccatcagagtgaacaggcaacctacaacatgggagaaaattttcgcaacctactcatctgacaaagggctaatatccagaatctacaatgaactcaaacaaatttacaagaaaaaaacaaacaaccccatcaaaaagtgggcgaaggacatgaacagacacttctcaaaagaagacatttatgcagccaaaaaacacatgaagaaatgctcatcatcactggccatcagagaaatgcaaatcaaaaccactatgagatatcatctcacaccagttagaatggcaatcattaaaaagtcaggaaacaacaggtgctggagaggatgcggagaaataggaacacttttacactgttggtgggactgtaaactagttcaaccattgtggaagtcagtgtggcgattcctcagggatctagaactagaaataccatttgacccagccatcccattactgggtatatacccaaatgagtataaatcatgctgctataaagacacatgcacacatatgtttattgcggcactattcacaatagcaaagacttggaaccaacccaaatgtccaacaatgatagactggattaagaaaatgtggcacatatacaccatggaatactatgcagccataaaaaatgatgagttcatatcctttgtagggacatggatgaaattggaaaccatctctcagtaaactatcgcaagaacaaaaaaccaaacaccgcatattctcactcataggtgggaattgaacaatgagatcacatggacacaggaaggggaatatcacactctggggactgtggtggggtcgggggaggggggagggatagcattgggagatatacctaatgctagatgacacattagtgggtgcagcgcaccagcatggcacatgtatacatatgtaactaacctgcacaatgtgcacatgtaccctaaaacttagagtataataaaaaaaaaaaaa

SEQ ID NO: 832 - DNA, 236 bp, Homo sapiens
  source 1..236: mol_type = other DNA
caggttgtgaagtagatagagtctgtgtattgaagttacacagctctaagtctaaatcctcagctctgaaactttttagttgggtgacagttgacaagttactaaacttctcagagcctcagctttcttacctatataagtggttaataatatgtacatcctagggctgtagtgagaattcaattacatgtataagttgtaaatactcagtatacactcaaatatagtgctgtatt

SEQ ID NO: 833 - DNA, 292 bp, Homo sapiens
  source 1..292: mol_type = other DNA
ctaggcacagtggctaacgcctgtaatcccagcattttgggaggccaaggcaggcagatcacctgaggtcaggagttccagaccagcctggccaacatggtgaaatcccatctctacaaaaataaaacagttagctgggcatgatggcgggtgcctgtaatcccagctactcgggaggctgaggcaggatagtcgcttgaacccaggaggtggaggttgcaatgagccaagatcatgccactgcactccagcctggacgacagagtgagactccatcacaagaaaaaaagaa

SEQ ID NO: 834 - DNA, 6364 bp, Homo sapiens
  source 1..6364: mol_type = other DNA
ggctggcaagatggctgaataggaacagctctggtctgcagctcccagtgagatcaatgcagaaggctggtgatttctgcatttccaactgaggtacctggctcatctcactgggactggttagacagtgggggcagcacacagagggtgagttgaagtagggtggggcattgcctcacctggaaagcacaaggggtcagggaactccctcccctagccaagggaagccatgagggactgtgccatgaggaacggtgcactctggtccagatactatgcttttcccacagtatgcacagcccacagaccgggagagtcccttgggtgcctacgccaccagggccctgggtttcaagcacaatactgggaggctgtttgggcagacaccgagctagctgcaggagtgtttttttttttcataccccagtggcacatggaacgccagcgagacagaactgttcactcccctggaaagggggctaaagccagggtgccaagtggtctacttcagcggatcccacccccgcggagcctagcaagctaagatccaatggcttgaaattctcactgccagcacagcagtctgaagttgacctgggatgctcaaatttggtgtggagaaagaggtccacttttcccctcacaatgtaaagaaagttgcggggaagtcccaattgggtggaatcctccacagctcagcaatgccgctgtagcctgactgcctctctagattcgtcctctctggtcagggcatatctgaaaaaaggcagcagcccagcaaggggcttatagataaaacccccgtctccctcggacagagcacctgggggaaggggagactgtgggtgcagcttcagcagacttaaacatccctgcctgctggctttgaagagagcagtgcatctcccagcccagcgttcaagctctgctaagggtcagactgcctcctcaagtgggtccctgaaccctgtgtctcctgactgggagacacctcccaccagcagacatctcatacaggagagctctgtctggcatctggtgggtacccgtctgggacgaagcttccagaggattgaacaggtggcagtctttgctgttctgcagcctccactggtaatgcccaggcaaacagggtctggagtggacgtccagcaaactccagcagacctgcagcagaggggccagactgttagaaggaaaactaacaaacagaaagtaatagcatcaacatcaacaaaaggacatccactcagaaaccccatctgaagatcaccaacatcaaagaacaaaggtagataaatccatgaagatgaggaaaaacaagcacaaaaagccagaacgcctcttctcctccaaaggatcacaactcctcgccagcaagggaacaaaactgatcgagaatgaatttaacgaattgacagaagtaggcttcagaaggtgagtaataccaaactcctctgagctaaaggagcatgttgtaacccaatgcaaggaagctaagaaccttgaaaaaaggttagaggaattgctaactagaataactagcttagagaagaacataaatgacctgatggagctgaaaaacacagcacgagaacttcgtgaagcatacacaagtatcaatagccaaatcaatcaagtggaagaaaggatatcagagattgaagatcaacttaatgaaataaagcatgaagacaagattagagaaaaaagaatgaaaaggaaccaacaaagcctccaagaaatatgggactatgtgaaaagaccaaacctacgtttgattggtgtacctgaaagtgacattgagaatggaaccaagttggaaaatactctttaggatattatccaggagaacttccccaacctagcaagacaggacaacattcaaattcagaaattacagagaccaccacaaagatactcctcgagaagagcaaccccaaggcacataatagtcagattcaccaaggttgaaatgaaggaaaaaatgttaagggcagccagagagaaaggtcaggttacccacaaagggaagcacatcagactaacagcagatctctctgcagaaaccctacaagccagaagagagtgggagccaatattcaacattcttaaaagaattttcaacccagaatttcatatccagccaaactaagcttcacaagtgaaggagaaataaaatcctttacagacaaacaaatgctgagagattttgtcaccactgggcctgccttacaagagctcctgaagggagcactaaacatggaaaggaacaaccagcaccagccaatgccagaaacataccaaattctaaagaccattgacactgaagaaattgcatcaactaatgagcaaaataaccagctaacatcataatgaccggatcaaattcatacataacaatattaactgtaaacgggctaaatgccccaattaaaagacacagactggcaaattaaataacaagtcaagacccatcagtgtgttgtattcaggagacccatctcatgtgcaaggacacacataggctcaaaataaagaggtggagggatatttatcaagcaaatggaaagcaaaaaaaaaaaaaaaaaaagcaggggttgcaatcctagtctctgataaaacagactttaaatcaacaaagatcaaaaaagacaaagaagggcattacataatggtaaagggatcaatgcaacatgaagagctaacctaaatatataggcacccaatacaggagcacccacatttataaagcaacttcttagagacctacaaagagacttagattcccacacaataatagtgggagacttttacacagcactgtcaatattacacagattaacgagacagaaaattaacaaggatattttggacatgaactcagctctggaccagctggacctaatagacatctacagaaccttccaccccaaatcagcagaatatgcattcttctcagcactacatcacccttattctaaaattgagcacataattggaagtaaaacactcctcagcaaatgcaaaagaatggaaatcataacaaacaatctctcagaccacagtgaaatcaaattagaactcaggattaagaaactcactcaaaaccgcacatctacatggaaactgaacaacctgctgctgaatgactactgggtaaataacgaaattaaggcagagataaataagttctttgaaaccaaggagaacaaagatacaaggtaccagaatctctgagccacagctaaagcagtgtttagagggaaatttatagcacgaaatgcccacaagagaaagtgggaaagatttaaaatcgacaccctaacatcgcaactaaagaactagagaaacaagaccaaacaaattcaaaagctagaagaagacaagaaataactaagatcagagcagaactgaaggagataaagacacaaaaagactcttcaaaaaatcagtgaatccaggagctggttgaaaagatcaacacaatagaccactagctggaccaataaaagagagaagaatcaaatagatgcaataaaaaatgataaaggggatatcactgctgatcccacagaaataccaactaccatcagagaatactataaatacctctatgcaaataaactagaaaatctagaagaaatggataagttcctggacacatacacacttccaagcccaaaccaggaagaagttgaatcctcgaacagaccaaaacaagttctgaaattgaggcagtaattaatagcctaccaagcaaaaaaagcccaagaccagacagattcacagccgaattctaacagaggtacaaagaggagctggtaccatgtcttctgaaactattccaaaccatagaaaaagagggactcctccctaactcattttatgaggccggcattatcctgatatgaaaacctggcagagacccaacaaaaagagaaaatttcaggccaatattcctgatgaacatcaatgcaaaaattctcaataaaatactggcaaactgaatccagcagcacatcaaaaagcttaaccaccacgatcaagttggcttcatccctgggatgcaaggctggttcaacatacgcaaatcaagtaacataatccaccacctaaacagaaccaatgacaaaaaccacatgattgtctcaatagatgcagaaaaggcctttgacaaaattcaacatcccttcatgctaaaaactctcaataaactaggtattgatggatcatatctcaaaataataagagctatttatgacaaacccaaagccagtatcatgtggaatgggcaaaaactggaagcattcccgttgaaatttggcacaagatagggatgccctctctcaccattcctattcaacatagtattggaagttctggccaaggcaatcagtcaagagaaagaaataaagggtattcaaataggaagagaggaaatcaaattgtccctacagatgacgtggttgtatatttagaaaacactattgtctcagcccaaaatctccttaagctgataagcaacttcagcaaagtctcaggatacgaaatcaatgtgcaaaaatcacaagcattcttatacaccaataacaaacaaacagagccaaatcatgagtgaactcccattcacaattgctacaaagagaataaaatacctaggaatacaacttacaagggatgtaaaggacctcttcaaggagaactacaaaccactgctcaaggaaataagagaagacacaaacaaatggaaaagcactccatgctcatggacaggaagaatcaatattgtgaaaatggtcatactgcccaaagtaatttatagattcaatgcaatccctatcaagctactattgacttccatcacagatttagaaaaatctactttaaatatcttatggaatcaaaaaagagctcacataaccaagacaatcttaagcaaaaaggacaaagctggagggattacgctacctgacttcaaactatacaatgaggctacagtaacccaaacagcatggtattggtaccaaaacagatatgttgaccagtggaacagaacagaagcctcagaaataacactatacatctacaaccatctggtctttgacaaacctgacaaaaacaagcaatgaggaaaggatttcctatttaataaatggtgttgggaaaactggctagtcatatgcagaaaatgaaactggaccccttccttacactttatacaaaaattaactcaagatggattaaagacttaagtaagacctaaaaccttaaaaaaaaaccctagaagaaaacctaggcaataccattcaggacataggcatgggcaaaggcttcatgactaaaataccaaaagcaatggcgaccaaagccaaaattgacaaatgggatctaataaactaaagagcttctgcacagcaaaagaaactatcatcagagtgaacaggcaacctacagaatgggagaaaatttttgctatctatccatctgacaaagggctaatatccagaatctacaaagaacttaaatttacaagaaaaaaacaaccccatcaaaaagtgggtgaaggatatgaacagacacttctcaaaagaagacatatatgtagtcagcaaacgtgaaaaaaagctcatcatcactgtcattagagaaatgccaatcaaaaccacaatgagataccatctcacaccagttagaatggcgatcattaaaaagtcagaaaactacagatgctggagaggatgtggagaaataggaatgcttttacagtgttggtgggagtgtaaattagttcaaccatgtggaagacagtgtggcgattcctcaaggatctagaaccagaaataccatttgacccagcaatcccattactgggtatatacccaagggattataaatcattctataaagacacatgcacccacatgtttatcgcggcgctgttcacaatagcaaaggcatggaaccaacccaaatgcccgttaatgatggactggataaagaaaagtggcaatatacaccatggaatactatgcagccataaaaaaggatgagttcatgtcctttgcagagacatggatgaagctggaaaccatcattcttagcaaactaacataagaacaggaaactgaacactgcatgttctcactcataactgggagttgaaaaatgagaacacatgggtacagggaggggaacatcacacaccaaggcctgtcatggggtggggggctaggggagggatagcattaggagaaatgtctaacgtagatgatgggttgatgggttcagctaaccaccgtgacacatgcatacctatgtaacaaaccatgttctgcacatgtaccccagaaattataattta

SEQ ID NO: 835 - DNA, 292 bp, Homo sapiens
  source 1..292: mol_type = other DNA
gctaggcacagtggctaacgcctgtaatcccagcattttgggaggccaaggcaggcagatcacctgaggtcaggagttccagaccagcctggccaacatggtgaaatcccatctctacaaaaataaaacagttagctgggcatgatggcgggtgcctgtaatcccagctactcgggaggctgaggcaggatagtcgcttgaacccaggaggtggaggttgcaatgagccaagatcatgccactgcactccagcctggacgacagagtgagactccatcacaagaaaaaaaga

SEQ ID NO: 836 - DNA, 6027 bp, Homo sapiens
  source 1..6027: mol_type = other DNA
ggggaggagccaagatggccgaataggaacagctccggtctacagctcccagcgtgagcgacgcagaagacgggtgatttctgcatttccatctgaggtaccgggttcatcccactagggagtgccagacagtgggcgccggccagtgtgtgtgcgcaccgtgcgcgagccgaagcagggcgagcattgcctcacctgggaagcgcaaggggtcagggagttccctttccgagtcaaagaaaggggtgacggacgcacctggaaaatcgggtcactcccacccgaatattgcgcttttcagaccggcttaagaaacggcgcaccacgagactatatcccccacctggctcagagggtcctacgcccacggaatctcgctgattgctagcacagcagtctgagatcaaactgcaaggcggcaacgaggctgggggaggggcgcccgccattgcccaggcttgcttaggtaaacaaagcagccgagaagctcgaactgggtggagcccactacagctcaaggaggcctgcctgcctctgtaggctccacctctgggggcagggcacagacaaacaaaaagacagcagtaacctctgcagacttaagtgtccctgtctgacagctttgaagagagcagtggttctcccagcacgcagctggagatctgagaacgggcagactgcctcctcaagtgggtccctgacccctgacccccgagcagcctaactgggaggcaccccccagcaggggcacactgacacctcacacggcagggtattccaacagacctgcagctgagggtcctgtctgttagaaggaaaactaacaaccagaaaggacatctacaccgaaaacccatctgtacatcaccatcatcaaagaccaaaagtagataaaaccacaaagatggggaaaaaacagaacagaaaaactggaaactctaaaacgcagagcgcctctcctcctccaaaggaacgcagttcctcaccagcaacagaacaaagctggatggagaatgactttgaagagctgagagaagaaggcttcagacgatcaaattactctgagctacgggaggacattcaaaccaaaggcaaagaagttgaaaactttgaaaaaaatttagaagaatgtataactagaataaccaatacagagaagtgcttaaaggagctgatggagctgaaaaccaaggctcgagaactacgtgaagaatgcagaagcctcaggagccgatgtgatcaactggaagaaagggttatcagcaatggaagatgaaatgaatgaaatgaagagagaagggaagtttagagaaaaaagaataaaaagaaatgagcaaagcctccaagaaatatgggactatgtgaaaagaccaaatctacgtctgattggtgtacctgaaagtgatgtggagaatggaaccaacttggaaaacactctgcaggatattatccaggagaacttccccaatctagcaaggcaggccaacgttcagattcaggaaatacacagaacgccacaaagatactcctcgagaagagcaactccaagacacataattgtcagattcaccaaagttgaaatgaaggaaaaaatgttaagggcagccagagagaaaggtcgggttaccctcaaaggaaagcccatcagactaacagcggatctctcggcagaaaccctacaagccagaagagagtgggggccaatattcaacattcttaaagaaaagaattttcaacccagaatttcatatccagccaaactaagcttcataagtgaaggagaaataaaatactttatagacaagcaaatgctgagagattttgtcaccaccaggcctgccctaaaagagctcctgaaggaagcgctaaacatggaaaggaacaaccggtaccagccgctgcaaaatcatgccaaaatgtaaagaccatcgagactaggaagaaactgcatcaactaatgagcaaaatcaccagctaacatcataatgacaggatcaaattcacacataacaatattaactttaaatataaatggactaaattctgcaattaaaagacacagactggcaagttggataaagagtcaagacccatcagtgtgctgtattcaggaaacccatctcacgtgcagagacacacataggctcaaaataaaaggatggaggaagatctaccaagccaatggaaaacaaaaaaaggcaggggttgcaatcctagtctctgataaaacagactttaaaccaacaaagatcaaaagagacaaagaaggccattacataatggtaaagggatcaattcaacaagaggagctaactatcctaaatatttatgcacccaatacaggagcacccagattcataaagcaagtcctcagtgacctacaaagagacttagactcccacacattaataatgggagactttaacaccccactgtcaacattagacagatcaacgagacagaaagtcaacaaggatacccaggaattgaactcagctctgcaccaagcggacctaatagacatctacagaactctccaccccaaatcaacagaatatacatttttttcagcaccacaccacacctattccaaaattgaccacatacttggaagtaaagctctcctcagcaaatgtaaaagaacagaaattataacaaactatctctcagaccacagtgcaatcaaactagaactcaggattaaaaatctcactcaaagccgctcaactacatggaaactgaacaacctgctccggaatgactactgggtacataacgaaatgaaggcagaaataaagatgttctttgaaaccaacgagaacaaagacacaacattccagaatctctgggacgcattcaaagcagtgtgtagagggaaatttatagcactaaatgcctacaagagaaagcaggaaagatccaaaattgacaccctaacatcacaattaaaagaactagaaaagcaagagcaaacacattcaaaagctagcagaaggcaagaaataactaaaatcagagcagaactgaaggaaatagagacacaaaaaacccttcaaaaaatcaatgaatccaggagctggttttttgaaaggatcaacaaaattgatagaccgctagcaagactaataaagaaaaaaagagagaagaatcaaatagacacaataaaaaatgataaaggggatatcaccaccgatcccacagaaatacaaactaccatcagagaatactacaaacacctctacgcaaataaactagaaaatctagaagaaatggatacattcctcgacacatacactctcccaagactaaaccaggaagaagttgaatctctgaatagaccaataacaggctctgaaattgtggcaataatcaatagtttagcaaccaaaaagagtccaggaccagatggattcacagctgaattctaccagaggtacaaggaggaactggtaccattccttctgaaactattccaatcaatagaaaaagagggaatcctccctaactcattttatgaggccagcatcattctgataccaaagccgggcagagacacaaccaaaaaagagaattttagaccaatatccttgatgaacattgatgcaaaaatcctcaataaaatactggcaaaccgaatccagcagcacatcaaaaagcttatccaccatgatcaagtggacttcatccctgggatgcaaggctggttcaatatacgcaaatcaataaatgtaatccagcatataaacagagccaaagacaaaaaccacatgattatctcaatagatgcagaaaaagcctttgacaaaattcaacaacccttcatgctaaaaactctcaataaattaggtattgatgggacgtatttcaaaataataagagctatctatgacaaacccacagccaatatcatactgaatgggcaaaaactggaagcattccctttgaaaactggcacaagacagggatgccctctctcaccactcctattcaacatagtgttggaagttctggccagggcaatcaggcaggagaaggaaataaagggtattcaattaggaaaagaggaagtcaaattgtccctgtttgcagacgacatgattgtttatctagaaaaccccatcgtctcagcccaaaatctccttaagctgataagcaacttcagcaaagtctcaggatacaaaatcaatgtacaaaaatcacaagcattcttatacaccaacaacagacaaacagagagccaaatcatgggtgaactcccattcacaattgcttcaaagagaataaaatacctaggaatccaacttacaagggatgtgaaggacctcttcaaggagaactacaaaccactgctcaaggaaataaaagaggacacaaacaaatggaagaacattccatgctcatgggtaggaagaatcaatatcgtgaaaatggccatactgccgaaggtaatttacagattcaatgccatccccatcaagctaccaatgactttcttcacagaattggaaaaaactactttaaagttcatatggaaccaaaaaagagcccgcattgccaagtcaatcccaagccaaaagaacaaagctggaggcatcacactacctgacttcaaactatactacaaggctacagtaaccaaaacagcatggtactggtaccaaaacagagatatagatcaatggaacagaacagagccctcagaaataatgccgcatatctacaactatctgatctttgacaaacctgagaaaaacaagcaatggggaaaggattccctatttaataaatggtgctgggaaaactggctagccatatgtagaaagctgaaactggatcccttccttacaccttatacaaaaatcaattcaagatggattaaagatttaaacgttagacctaaaaccataaaaaccctagaagaaaacctaggcattaccattcaggacataggcgtgggcaaggacttcatgtccaaaacaccaaaagcaatggcaacaaaagccaaaattgacaaatggaatctaattaaactaaagagcttctgcacagcaaaagaaactaccatcagagtgaacaggcaacctacaacatgggagaaaattttcacaacctactcatctgacaaagggctaatatccagaatctacaatgaactcaaacaaatttacaagaaaaaaacaaacaaccccatcaaaaagtgggcaaaggacatgaacagacacttctcaaaagaagacatttatgcagccaaaaaacacatgaagaaatgctcatcatcactggccatcagagaaatgcaaatcaaaaccactatgagatatcatctcacaccagttagaatggcaatcattaaaaagtcaggaaacaacaggtgctggagaggatgtggagaaataggaacacttttacactgttggtgggactgtaaactagttcaaccattgtggaagtcagtgtggcgattcctcagggatctagaactagaaataccatttgacccagccatcccattactgggtatatacccaaaggactataaatcatgctgctataaagacacatgcacacgtatgtttattgcggcactattcacaatagcaaagacttggaaccaacccaaatgtccaacaatgatagactgtattaagaaaatgtggcacatatacaccatggaatactatgcagccataaaaaatgatgagttcatatcctttgtagggacatggatgaaattggaaaccatcattctcagtaaactatcgtaagaacaaaaaaccaaacaccgcatattctcactcataggtgggaattgaacaatgagatcacgtggacacaggaaggggaatatcacactctggggactgtggtggggtcgggggaggggggagggatagcactgggagatatacctaatgctagatgacgagttagtgggtgcagcgcaccagcatggcacatgtatacatatgtaactaacctgcacaatgtgcacatgtaccctaaaacttagagtataataaaaaaaaa

SEQ ID NO: 837 - DNA, 555 bp, Homo sapiens
  source 1..555: mol_type = other DNA
tctcaagaataaaatcaaagtctttggcttgacagccttccacaatctgacctctgttttctcgccagcctcatctcctgtcattcacaacatttccagcattccaaccagtctgaacttttgcagtttcccacgtgcgctaggctctttcttcatcagcatctctatgcatgctgtctcctgctactggaatgccctcattctcgttgcttcctgtgaacacgtggtaaactccaatcatcttctgaaactcggctcaaacgtcatctcccctggggagccttcactgactgccctgggcagcatgaagcattttgtcagtgccccgtagcaccgtggtcatatctttattattgcaaatttctgtttccacatataatgtcaggtggaaccgatagctggcttacaaaaacaatgcaatttcaggtggttctacttaacattccctagacaacaagttcactgagagcagggactgtgttttatttattttatatttccagtccctaaaatggagtttggcataaagtaaatgcttaatacaggctttctgaa

SEQ ID NO: 838 - DNA, 6606 bp, Homo sapiens
  source 1..6606: mol_type = other DNA
gctggcaagatggccaaataggaacagctccaatctgcagctcccagcgagatcgaggcaggtgatttctgaatttccaactgaagtacctggttcatctcactgggactggttggacagtgggtgcagcccacagagggcaagccaaagcagggtggggaatcacctcacctgggaagcacaaggggttggggaattctctccccttcccaagggaagccatgagagactgtaccaggaggaacaatgcactccagtccagatactgtgcttttcccaccatcttcacagccggcagaccaggagattccctctggtgcctaccccaccagggccctgggtttcaagcacaaaactgggcagccatttggccagacaccaaactagctgcaggagttttttttttcataccccagtggaacgtggaacaccagcaagacagaaccattcactcccctggaaaggaaaagaggctgaggccagggagccaagtggtctggctcagcgggtcccacccccacagagcccagcaagctaagatccactggcttgaaattctcactgccagcacagcagtctgaccctgacctgggacgcttgagcttgataggggaaggtgcatccaccactgctaaagcttgagtaggtggttttcccctcacagtgtacataaagctgccatgaagtacgaactgaggggagcccaccgcagctaagcaaggcctctgcagccagacttcctctctagactcctcaactctgggcagggcatctctaaaaaaaaaaggcagcaccccagtcagggacttatagataaaacccccatctccctgggacagagcacttgggggaaggggcggttctgggcacagcttcagcagacttaaacgtccctgcctgacagctctgaagagagcagtggttctcccagcacagcatttgagctctgttaagggacagactgcctcctcaagtgggtccctgacccctgtgtatcctgactgggagacacctcccagtaggagctgacagacacctcatacaggagagctatggctggcatctgcaggtgcccctctgggatgaagcttccagaggaaggaacaggcaacaaactttgctgttctgcagcatctgctggtgatacccaggcaaacagggtctggagtggacctccagcaaactccaggagacctgcagcagaggatcctgactgttagaaggaaaactaacaaagagaaaggaatagtatcagcatcaacaaaaagcacatccactcagaaactccatccgaaggtccccaacatcaaggaccaaaggtagataaatccacaaagatggggagaaaccagtgcaaaaaggctgaaaattccaaaaaccagaatgcctcttctcctccaaaggatcacaactcctcgccagcaagggaagaaaactgggtggagaatgagtttgacgaactgacagaagtacacttcagaaggtaggtattagcaaactcctccgaactaaaggagcatgttctaactcaatgcaaggaagctaacaaccttgaaaaaaggttagatgaattgctaaccaaaataaacagtttagagaaaatataaatgacctgatggagctgaaaaacacagcacaagaacttcttgaagtatacataagtatcaatagccgaatcgatcaagtggaagaaaggatattagagattgatatcaactcaatgaaaaaaagcgagaagagaagattagggaaaaaagagtgaaaagaaatgaacaaagcctccaagaaatatggaactatgtgaaaagaccaaatctacgtgtgattggtatacctgaaagtgacggggagaatggaaccaaggtggaaaacactcttcaggatatcatccaggagaacttccccaacatagcaagggagccaacattcaaattcaggaaattcagagaacaccacaaagatactcctcgagaagagcaaccccaacacacataattgtcagattcaccaaggttgaaatgaaggaaaaaatgttaagggcagccagagagaaatgttgggttacccacaaaaggaagcccatcagactaacagcagatctccctgcagaaaccctacaagccagaagagagtaggggccaatattcaacattcttaaagaattttcaacccagaatttcatctccagcccaactaagcttaataaatgaatgagaaataagatcctttacagacaagcaaatgctgagagattttgtcaccaccaggcctgccttacaagagctcctgaaggaagcactaaacatggaaaggatcaactggtagcagccactgcaaaaacatgccaaattgtaaagaccattgacactatgaagaaactgcatcaacaaacgggcaaaataaccagctagcatcataatgacaggatcaaattcatacataacaatattaaccttaaatgtaaacgaactacatgctccagttaaaagacatagactggcaaattggataaagagtcaagacccatcagtatgctatattcagtagacccatctcacgtgcaaagacacacatagactcaaaataaagggatggaggaatatttaccaagcaaatggaaagcaaaaaaaagcaggggttgcaatcctagtcgctgataaaacagactttaaaccaacaaagatcaaaagagacaaagaagggcattacataatgataaagggatcaatccaacaagaagagctaactgtcctaaatatatgtgcacccgatacaggagcacccagattcataaagcaagttcttagagacctagaaagagacttagactctcacacaataataacgggagactttaacacaccactgtcaacattagacagaccaacaagacagaaaattaacaaagatatccaggacttgaactcagctctggaccaagcagacctaatagacatctacagaactctccacctgaaatcaacagaatatacattcttctcagcaccacgtcgcatttattctaaaattgaccacataattggaagtaaaacactcctcagcaaatacaaaagaacggaaatcataaacagtctctcagaccacagtgcaatcaaattagaactcaggattaagaaactcattcaaaaccacacaactacatggaaaatgaacagcctgctcctgaatgactactgggtaaataacgaaatgaaggcagaataaagatgttctttgaaaccaatgagaacaaaggacacgatgcaccagaatctctgggacacatttaagcagtgtgtaaagggaaatttataacactaaatgcccgcaagagaaagcaagaaagatctaaaatcgacaccctaacatcgcaattaaaagaactagagaagcaagaacatacaaactcaaaagtgagcagaagacaaaaaataactaagatcagagcagaactgaaggagatagagacacaaaaaacccttaaaaaatcagtgcatctaggagctggtttttagaaaaggtcaaccaaatagactgctagcaagactaataagaaaagagagaagaatcaaatagactcaataaaaaatgataaaggggatatcaccaccgatcccacagaaatacaaactaccatcagaatagtataaacacctctacacaaataaactagaaaatctagaagaaatggataaattcctggacacatacaccatcctaagactaaaccaggaagaagtcaaatccctgaatagaccaataccaagttctgaaattgaggcaataattaatagcctaccaaccaaaaaaagtccaggaccagacagattcacagccgaattctaccagagctacaaagaggatctggtaccattccttctgaaactatcccaaacaacagaaaaagaaggaatcctccctaattcattttatgaggacagcatcattctgaaaccaaaacctggcagagacacaaccaaaaaagaaaatttcaggccaatatccctggtgaacctcaattcgaaaatcctcaataaaatactggcaaaccgaatccagcagcacgtcaaaaagcttatcctccacgatcaagtcggcttcatccctgggatgcaaggctggttcaatcaacataatgcatcacataaacggaaccaatgacaaaaaccacatgattatctcaatagatgcagaaaaggcctttgataaaattcaacaccccttcatgctaaaaactctcaataaactaggtattgatggaacatatctcaaaataataagagctatttatgacaaacccacagccaatatcatactgatataggaaaaaactgtaagcattcccccctttgaaaactggcacaagacagggatgccctctctcaccactcctattcaacatagtgttggaagttctggccagggcaatcaggcaagagaaagaaaaaaaaggtattcaattaggaaaagaggaagtcaaattatcactgtttgcaattatgtgcaatacttccaattatgtggtcaattttagaataaataagacgtgttgctgagaagaatggacattctgttgatttcaggcagagagttctgtagatgtctattaggtctgcttggtccagagctgagttcaagtcctggatatctttgttaattttctgtctcgttggtctgtctaatgttgacagtggggtgttaacgtctcccattatttagaaaaccccatcgtctcagccccaaatctccttaagctgataggcaacttcagcaaagtctcaggatacaaaatcaatgtgcaaaaatcacaagcattcctatacaccaataacagacaaacagagagccaagtcatgagtgaaatcccattcacaattgctacaaagataataaaatacctaggaatacaacttacaagggatgtgaaggacctcttcaagaagaactacaaaccactgctcaaggaaatcagagaggacacaaatggaaaaatattccatgctcatggataggaagaatcaatatcatgaaaatggccatactgcccaagataatttatagactcaatgctatccccatcaagctaccattgactttcttcacagaattggaaaaaactacttcaaatttcatacagaatcaaaaaagagccctcacagccaagacaatcctaagcaaaaagaacaaaactggagacatcatgctatcagacttcaaactatactacaaggctacattaacacaaacagcatggtactggtaccaaaacagatacatagaccaatggaacagaacagaggccccagaaataccaccacatatctaccagcatttgatctctgacaaacctgacaaaaacaagcaatggggaaaggattccctatttaataaatggtgttgggaaaactggctagccatatgcagaaagctgaaactggaccccttccttacaccttatacaaaaattaattcaagatggattaaagacttaaatgttagacctaaaaccatagaaaccctagaagaaaacctaggcaataccattcaggacatagtcatgggcaaagactttatgactaaaacaccaaaagcaatggcaacaaaagccaaaattgacaaatgggatctaattaaaggccttctgcacagcaaaaggaactatcatcagggtgaacaggcaacctaaagaatgggagaaaatttttgcaatctatccatctgacaaagggctaatatccagacttaaacaaatgtgtaagaaaaatcaaacaaccccatcaaaaagtgggcgaaggatatgaatagccacttctcaaaagaagacatttatgcagccaacaaacatgaaaaaaaagctcatcatcactggtcattagagaaatgcaaatcaaaaccaccatgagatactatctcatgccagttagaatggcaatcattaaaaagttagtaaacaacagatgctggagaggatgtggagaacatgaatgcttttacactgttggtgggagtttaattagttcaactattgtggaagacagtgtggcaatccctcaaggatctagaactagaaataccatttgactcaacaatcccattactggttgtatatccaaaggatcatatatcattctactataaggactcatgcacaaatatgtttattgtggcactgttcacaatagcaaagacttggaaccaacccaaatgcccatcagtgatagactggataaagaaaatgtggcatatatacaccatagaatactatgcagccattataaaagagtgagttcatgtcctttgcagggacgtggatgaactagaaaacatcattctcagcaaattaacacaagaacagaaaacgaaacaccacatgttctcactcataagtgtgaggtgaacaatgagagcacatggacatagggaggggaacatcacacaccggggcttgtcagtgggtggggggctggttgagggatagcattaggagaaatacctaatgtagatgatgggttgaagggtacagcaaaccaccatggcacgtgtatacctatgtaacaaacctgcacattctgcacatgtaccccagaacttaaagtataataaaaa

SEQ ID NO: 839 - DNA, 6091 bp, Homo sapiens
  source 1..6091: mol_type = other DNA
gttccaagatggccaaataggaacagctctagtctgaaactcccagcatgagcgatgcagaagacgggtgatttctgcatttccaactgaggtactgggttcatctcactggggcttgtcaggcagtgggtgcagcccacagagcagggcggggcatcgcctcacccgggaagtgcaaggggtcggggaattccctttcctagcaaagggaagccttcacagatggtacctggaaaatcgggacactcccaccctaatactgcacttttccaatggccttagcaaacggcacaccaggagattatatcccatgcatggcttggagggtcccatgcccagggagcctcactcactgcaagcacagcagtctgagatcgaactgcaacttggcagcgaggcttggggaggggtgcccgccattgctgaggcttgagtaggtaaacaaagctgcctggaagctccaacagggtggagcccactgcagctcaaggaggcctgcctgcctctgtagactccatctctgggggcagggcatagctgaacaaaaggcagaagaaacttctgcagacttaatgtccctctctgacagctttgaagagagtagtggttctcccagcacagagtgtgagatctgagaatggacagactgcctcctcaagggggtgccagaaccctgagtagcctaactgggagacacctcccagtaggggccgaatgacacctcatacagccgggggcccctctgagacgaagcttccagtggaaggatcaggcagcaacatctgccgttctgcaatatttgcttttctgcagcctccgctggtgatacccaggcaaacagggtctggagtgaacctccagcaaactcccacagacctgcagctgagggtcctgactgttagaaggaaaactaacaaacagaaaggacatccacaccaaaaccccatctgtatgtcaccatcatcaaagaccaaaggtagataaaaccacaaagatggggataaaccagagcagaaaagctgaaaattctaaaaatcagagcgcctcttctccaaaggaatgcagctcctcctcagcaatggaacaaatctggatggagaatgactttgaagagttgagagaagaaggcttcagatgatcggtaataacaaacttctccaagctaaaggagaatgtttgaacccatagcaaagaagctaaaaaccttgaaaaaagattagacgaatggctaaccagaataaacagcgtagagaagaccttaaatgacctgatggagctgaaaaccatggcacgagaactacgtgacatatgcacaagcttcagtagctgatttgatcaagtggaagaaagagtatcagtgactgaagatcaaatgaatgaaatgaagagagaagagaagtttagagaaaaaagagtaaaaagaaatgaacaaaacctccaagaaatatgggactaggtgaaaagaccaaatctaagtctgattggtgtacctgaaagtgatggggtgaatggaaccaacttggaaaacactcttcaggatactatccaggagaactaccccaacctagtgaggcaggccaacattcaaattcaggaaatacagagaacgccatgaagatactcctcaagaagatcaactccaagacacataattgtcagattaacaaagttgaaatgaaggaaatagtgttaagggcagccagagagaaaggtcgggttacccacaaagggaagcccattggacaaaccctggatctctcagcagaaactctacaagccagaagagagtgggggccaatattcaacattcctaaagaaaagaattttcaacccagaatttcatatccagtcaaactaagcttcataagtgaaggagaaataaaatcctttacagacgaacaaatgctgagagattttgtcaccaccaggcctgccctaaaagacctcctgaaggaagaactaaacatggaaaggaacaactgataccagccactgcaacaacatgccaaattgtaaagaccatcgatgctaggaagaaactgcatcaactaacaagtaaactaaccagctaacatcataatgacaggatcaaattcacacataacaatattaaccttaaatgtaaatgggctaaatgctccaattaaaagacatagatgggcaaattgggtaaagagtgaatacccatcagtgtgctgtattcaggagacccatctcacgtgcagagacacacataggctcaaaataaagggatggaggaagatctaccaagcaaatggaaaacaaaaaaaaaagcaggggttgcaatcctaatctctgataaaacagactctaaacccgcaaagatcaaaagagacaaataaggccattacataatggtaaagggatcaattcaacaagaagagctaactatcctaaatatatatgcacccaatacaggagcacccagattcataaagcaagtccttagagacctacaaagagacttagactcccacacaataataatgggagactttaacaccccactgtcaacattagagagatcaacgagacagaaagttaacaaggatatccaggaattgaactcagacataatagacatccacagaactctccaccccaaattaacagaatatacattcttcttagtaccacataacacttattccaaaattgaccacatagttggaagtaaagcagtcctcagcaaatgtaaaagaacagaaattataacaaactgactctcagaccacagtgcaatcaaactagaactcaggattaagaaactcactcaaaaccgctcaactacatggaaactgaacaacctgctcctgaataactactgggtgcataacgaaaggaaggcagaaataaagatgttctttgaaaccaatgagaacaaagacacaacataccagaatctatgggacacatttaaagcagtgtgtagagggaaatttatagcactaaatgcccacaagagaaagcaggaaagatctaaaattgacacgctaatatcacaattaaaagaactagagtaacaagagcaaaccattcaaaagctagcagaaggcaagaaataactgagttcagagcagaactgaaggagatagagacacaaaaaaacccttcaaaagatcaatgaatccaggagctggttttttgaaaagatcaacaaaattgatagaccactagcaagactaagaaagaagaaaatggagaggaatcaaatagatgcaataaaaaatgataaaggggatatcaccactgatccaaagaaatacaaactaccatcagagaataatataaacacctctgtgcaaataaactagaaaatctagaagaaatgcataaattcctcgacacatacaccctcccaagactaaaccaggaagaagctgaatcgctgactagatcaataacaggttctgaaattgaggcaatgattaatggcctaccaacaaaaaaaatccaggaccagacggaatcacagttgaattctaccagaggtacaaagaggatctggtaccattccttctgaaactattctaatcaataggaaaagagggaatcctccctaactcattttatgaggccaacatcatcctgataccaaagcctggcagagacacaacaaaaaaagagaattttagaccaatatccctgatgaacatcgatgtaaatatcctcagtaaaatactggcaaaccaaatccagcagcacatcaaaaagcttatccaccatgatcaagtgggcttcatccctgggatgcaaggctggttcaacatatgcaaatcaataaacgtaatgcatcatataaacagaaccaaacacaaaaaccacatgattatctcaatagatgcagaaaaggccttcaacaaaattcgacacctcttcatgctaaaaactctcaataaattaggtattgatgggaagtatctcaaaatagtaagagctatctatgacaaacccacagccaatatcatactgaatgggcaaaaactggaagcattccctttgaaaactggcacaagacagggatgccctctctcaccactcctattcaacatagtgttggaagttatggccagggcaatcagataggagaaagaaataaatagcattcaattaggaaaagacagagtcaaattgtccctgtttgcaggtgacatgattgtatatttagaaaaccccattgtctcagtccaaaatctccttaagctaataagcaacttcagcaaattctcaggatacaaaatcaatgtgcaaaaatcacaagcattcctttacaccaataacagacaaacagagagccaaatcatgagtgaactcccattcacaattgcttcaaggagaatagaatacctaggaatccaacttacaagggatctgaaggacctcttcaaggagaactacaaaccactgctcaacaaaataaaagaggacacaaacaaatggaagaacattccatgctcatggataggaaggatcaatattgtgaaaatggccacactgcccgtggtactttatagattcaatgccatccccatcaagctaccaatgactttcttcacagaattggaaaaaactactttaaagttcatatggaaccaaaaaagagcccacattgccaagacaatcctaagccaaaagaaaaaagctggaggcatcatgctacctgaattcaaactatactacaaggctacagtaaccaaaacagcatagtactggtaccaaaccagagatatagaccaatggaacagaacagagccctcggaaataataccacacatctacaaccatctgatatttgacaaacctgacaaaaacaagcaatggggaaaggattccctatttaataaatggtgctggggaaactggctagctatatgtagaaagctgaaactgcatcctttccttacaccttatacaaaaattaattcaagatggattaaagacttaaatattagacctaaaaccataaaaatcctagaagaaaacctaggcaataccattcaggacataggcatgtgcaaggacttcatgtctaaaacaccaaaagcaatggcaacagaagccaaaattgacaaatgggatctaattaaactaaagagcttctgcacagcaaaagaaagtaccatcagagtgaacaggcaacctacagaatgagagaaaatttttcaatctacccatctgacaaagggctaatatccagaatctacaaagaacttaaacaaatttacaagaaaaaatcaaacaaccccatcaaaaactgtgcaaaggatatgaacagacacttctcaaaagaagacatttatgcagccaacagacacatgaaaaaatgcttgtcactggccatcagagaaatgtaaagcaaaaccacaatgagataccatctcacacctgttagaatggcaatcattgaaaagtcaggaaacaacaggtgctgtagaggatgtggagaaacaggaacacttttacactgttggtgggactgtaaactagttcaaccattgtggaagacagtgtggcgattcctcaaggatctagaactagaaataccatttgacccagccatcccattactgggcgtatacccaaaggattataaatcctgctgctataactacacatgcacatgtatgtttattgcggcactattcacaatagcaaagacttggaaccaacccagatgtccatcagtaatagacaggattaagaaaatgtggcacatatacaccatggaatactatgcagccataaaaacagatgagttcatgtcctttgtagggacatggatgaagctggaaaccatcattctgagcaaactatctcaaggacagaagaccaaacaccacatgttctcactcataagtgggaattgtgcaatgagaacacttggatacagggtggggaacatcacacactggggcctgtcatggggtggagggagggagaagggatagcattaggagatatacctaatgtaaatgatgagttaatgggtgcagcacacaaacatggcacatgtctacatatgttacaaacctgcaagttgtgcacatgtaccctagaacttaaagtataa

SEQ ID NO: 840 - DNA, 6016 bp, Homo sapiens
  source 1..6016: mol_type = other DNA
gccaagatggccgaataggaacagctccggtctacagctcccagcgtgagcgacgcagaagacgggtgatttctgcatttccatctgaggtactgggttcatctcactagggagtgccagacagtgggcgcaggtcagtgggtgcgcgcaccgtgcgcgagccgaagcagggcaaggcattgcctcacttgggaagcgcaaggggtcggggagttccctttccgagtcaaacaaaggggtgacggacgcacctggaaaatcgggtcactcccacccaaatattgcgcttttcagacccgcttaaaaaacggcacaccacgagattatatcccgcacctggcttggagggtcctatgcccacggagtctcgctgattgctagcacagcagtctgagatcaaactgcaaggcggcagcgaggctgggggaggggcgcccgccattgcccaggcttgcttaggtaaacaaagcagccgggaagctcgaactgggtggagcccaccacagctcaaggaggcctgcctgcctctctaggctccacctctgtgggcagggcacagacaaacaaaaaaacagcagtaacctctgcagacttaaatgtccctgtctgacagctttgaagagagcagtggttctcccaacacgcagctggagatctgagaacgggcagactgcctcctcaagtgggtccctgacccctgacccccgagcagcctaactgggaggcaccccccagcaggggcacactgacacctcacacggcagggtattccaacagacctgcagctgaggatactgtctgttagaaggaaaactaacaaacagaaaggacatccacaccaaaaacccatctgtacatcaccatcatcaaagaccaaaagtagataaaaccacaaagatagggaaaaaacagaacagaaaaactggaaactctaaaacgcagagcgcctctcctcctccaaaggaacgcagttcctcaccagcaacggaacaaagctggatggagaatgactttgacgagctgagagaagaaggcttcagacgatcaaattactctgagctacgggaggacattcaaaccaaaggcaaagaagttgaaaactttgaaaaaaattgagaagaatgtataactagaataaccaatacagagaagtgcttaaaggagctgatggagctgaaaaccaaggctcgagacctacgtgaagaatgcagaagcctcaggagccgatgcgatcaactggaagaaagggtgtcagcaatggaagatgaaatgaatgaaatgaagcgagaagggaagtttagagaaaaaagaataaaaagaaatgagaaagcctccaagaaatatgggactatgtgaaaagaccaaatctacgtctgattggtgtacctgaaagtgatggggagaatggaaccaagttggaaaacactctgcaggatattgtccaggagaacttccccaatctaacaaggcaggccaacgttcagattcaggaaatacagagaacgccacaaagatactcctcgagaagagcaactccaagacacataattgtcagattcaccaaagttgaaatgaaggaaaaaatgttaagggcagccagagagaaaggtcgggttaccctcaaagggaagcccatcagactaacagcggatctctcggcagaaaccctacaagccagaagagagtgggggccaatattcaacattcttaaagaaaagaattttcaacccagaatttcatatccagccaaactaagcttcataagcgaaggagaaataaaatactttacagacaagcaaatgctgagagattttgtcaccaccaggcctgccctaaaagagctcctgaaggaagcgctaaacatggaaaggaacaaccagtactagccgctgcaaaatcaagccaaaatgtaaagaccatcaagactaggaagaaactgcatcaactaacaagcaaaatcaccagctaacatcataatgacaggatcaaattcacacataacaatattaactttaaatgtaaatggactaaatgctccaattaaaagacacagactggcaaattggataaagagtcaagacccatcagtgtgctgtattcaggaaacccatctcatgtgcagagacacacataggctcaaaataaaaggatggaggaagatctaccaagcaaatggaaaacaaaaaaaggcaggggttgcaatcctagtctctgataaaacagactttaaaccaacaaagatcaaaagagacaaagaaggccattacataatggtaaagggatcaattcaacaagaagagctaactatcctaaatatatatgcacccaatacaggagcacccagattcataaagcaagtcctgagtgacctacaaagagacttagactcccacacattaataatgggagactttaacaccccactgtcaacattagacagatcaatgagacagaaagtcaacaaggatacccaggaattgaactcagctctgcaccaagcagacctaatagacatctacagaactctccaccccaaatcaacagaatatacatttttttcagcaccacaccacacctattctaaaattgaccacatacttggaagtaaagctctcctcagcaaatgtaaaagaacagagattataacaaactatctctcagaccacagtgcaatcaaactagaactcaggattaagaatctcactcaaaaccactcaactacatggaaactgaacaacctgctcctgagtgactactgggtacataacgaaatgaaggcagaaataaagatgttctttgaaaccaacgagaacaaagacacaacataccagaatctctgggacgcattcaaagcagtgtgtagagggaaatttatagcactaaatgcccacaagagaaagcaggaaagatccaaaattgacaccctaacatcacaattaaaagaactagaaaagcaagagcaaacacattcaaaagctagcagaaggcaagaaataactaaaatcagagcagaactgaaggaaatagagacacaaaaaacccttcaaaaaattaatgaatccaggagctggttttttgaaaggatcaacaaaattgatagaccgctagccagactaataaagaaaaaaagagagaagaatcaaatagacacaataaaaaatgataaaggggatatcaccaccgatcccacagaaatacaaactaccatcagagaatactacaaacacctctacgcaaataaactagaaaatctagaagaaatggataaattcctcgacacatacactctcccaagactaaaccaggaagaagttgaatctctgaatagaccaataacaggagctgaaaatgtggcaataatcaatagtttaccaaccaaaaagagtccaggaccagatggattcacagccgaattctaccagaggtacaaggaggaactggtaccattccttctgaaactattccaatcaatagaaaaagagggaatcctccctaactcattttatgaggccagcatcattctgataccaaagcctggcagagacacaaccaaaaaagagaattttagaccaatatccttgatgaacattgatgcaaaaatcctcaataaaatactggcaagctgaatccagcagcacatcaaaaagcttatccatcatgatcaagtgggcttcatccctgggatgcaaggctggttcaatatacgcaaatcagtaaatgtaatccagcatataaacagagccaaagacaaaaaccacatgattatctcaatagatgcagaaaaagcctttgacaaaattcaacaaccttcatgctaaaaactctcaataaattaggtatcgatgggacgtatctcaaaataataagagctgtctatgacaaacccacagccagcatcatactgaatgggcaaaaactggaagcattccctttgaaaactggcacaagacagggatgccctctctcaccactcctattcaacatagtgttagaagttctggccagggcaattaggcaggagaaggaaataaagggtattcaattaggaaaagaggaagtcaaattgtccctgtttgccgacgacatgattgtatatctagaaaaccccactgtctcagcccaaaatctccttaagctgataagcaacttcagcaaagtctcaggatacaaaatcaatgtacgaaaatcacaagcattcttatacaccgacaacagacaaacagagagccaaatcatgagtgaactcccattcacaattgcttcaaagagaataaaatacctaggaatccaacttacaagggatgtgaaggacctcttcaaggagaactacaaaccactgctcaaggaaataaaagaggatacaaacaaatggaagaacattccatggtcatgggtaggaagaatcaatatcgtgaaaatggccatactgcccaaggtaatttacagattcaatgccatccccatcaagctaccaatgactttcttcacagaattggaaaaaactactttaaagttcatatggaaccaaaaaagagcccgcatcgccaaggcaatcctaagccaaaagaacaaagctggaggcatcacactacctgacttcaaactatactacaaggctacagtaaccaaaacagcatggtactagtaccaaaacagagatatagatcaatggaacagaacagagccctcagaaataacgccgcatatctacaactatctgatctttgacaaacctgagaaaaacaagcaatggggaaaggattccctatttaataaatagtgctgggaaaactggctagccatatgtagaaagctgaaactggatcccttccttacactttatacaaaaatcaattcaagatggattaaagacttaaacgttagacctaaaaccataaaaaccctagaagaaaacctaggcattaccattcaggacataggcatgggcaaggacttcatgtccaaaacaccaaaagcaatggcaacaaaagacaaaattgacaaatgggatctaattaaactaaagagcttctgcacagcgaaagaaactaccatcagagtgaacaggcaacctacaaaaaaggagaaaattttcacaacctactcatctgacaaagggctaatatccagaatctacaatgaactcaaacaaatttacaagaaaaaaacaaacaaccccatcaaaaagtgggcgaaggacatgaacagacacttctcaaaagaagacatttatgcagccaaaaaacacatgaaaaaatgctcgtcatcactggccatcagagaaatgcaaatcaaaaccacaatgagataccatctcacaccagttagaatggcagtcattaaaaagtcaggaaacaacaggtgctggagaggatgtggagaaataggaacacttttacactgttggtgggactgtaaactagttcaaccattgtggaagtcggtgtggcgattcctcagggatctagaactagaaataccatttgactcagccatcccattactgggtatatacccaaaggactagaaatcatgctgctataaagacacatgcacacgtatgtttattgcagcattattcacaatagcaaagacttggaaccaacccaaatgtccaacaatgatagactggattaagaaaatgtggcacatatacaccatggaatgctatgcagccataaaaatgatgagttcatgtcctttgtagggacatggatgaaattggaaatcatcattctcagtaaactatcgcaagaacaaaaaaccaaacaccgcatattctcactcataggtgggaattgaacaatgagatcacatggacacaggaaggggaatatcacactctgaagactgtgagggtggggggaggggggagggatagcattgggagatatacctaatgctagatgatgatttagtgggtgcactgcaccagcatggcacatgtatacatatgtaactaacctgcacaatgtgcacatgtaccctaaaacctaaagtataataataaaaaaaa

SEQ ID NO: 841 - DNA, 666 bp, Homo sapiens
  source 1..666: mol_type = other DNA
cccgagaactccccacttggctgagagtgactgctacttccagtgcagatgtgggcactgtgcttggctcttcaagggaggaacagggttccatcccagcagccaggtggcctcagtgcttaagcacagatgtggagaagggatatctctcctctgcagcttgtccactgctgcgaacacagccatggctgctcctatgggaggttggtacaggcgtatcacaagacagccattctagggcaattaggtatggctgtgtccgcactgataatctaaaaaataagaatttattcaagctgggcccaggcttgtgtgaaaggtggggcacctcccccttatatgtggagttgttatgttcctgcaacagaaatcaggagaaccacaaagatgtatgttttaggctgaagacaggttctacaccaaagatagtttggcagtaagctgtgagatgggcagatttcacagctcttggctacactgcagtgtggatatagacagtgttgtctgtcccgtcagagtgtcccaagtgcctaacaggggtgtgacagggaagcaaatcatgttcctgcctgcctaggtatggagctgaggcagttccctcccccacatagagagcttgtcacattctaccaggagctcctctcaccacccgcttcagggctagtg

SEQ ID NO: 842 - DNA, 5943 bp, Homo sapiens
  source 1..5943: mol_type = other DNA
cttttttttttttctataccccagtggcgcctggaatgccagtgagacagaactattcactcccctggaaaggggtgctgaagccagggagccaagtggtctgcacctcagcgggtcccacccccatggaacccaggaaactaagatccactggcttgaaattctcactgccagcacagcagcaatctgagattcacctgggacttttgagcttggtgcaaggaggggtgtccaccattgctaaggcttgagtaggtagtttttaaggttacagtgtaaacaaagctgctgggaagttcaaactgggtggagcccactgcagctcagcaaggctgctatggccagtctgccagatttctcctctctagacaggacatctctgtgaaaaaggcagcagccccagtcaggggcttatagcagacttaaacgtccctgcctgaagtctctgaagagagaagcagacctcccagcacagcattcgagctctgctaagggtcagactgcctcctcaagtgggtccctgacccccgtgtatactaactgggagacccctcgtacaggagagctctggctggcattgggcaggtgcccctctgggttgaagcttccagaggaaagaacagtcagcaatctttgctgctttgcagcctccgctgatgatacccaggcaagcaggatggggagtggacctccagcaaactccagcagactggcagcagaggggcctgactgttagaaggaaaagaaacaaacagaaaggactagcacatccactgaaagaccccatccaaaggtcaccaacatcaaagaccaaaggtagataaatccacaaagatggggaaaaatcagtgcaaaaagcctaaaaattccaaaaaccagaatgcctctcctcctccaaaggctcacaactccctgccagcaagggaacaaaactggatggagaatgagtgtgatgaactgacagaagtaggcttcagaaggtgggtaataacaaactcctccaagctaaaggagcatgttctaacccaatgcaaggaagctaagaaccttgaagaaaggttagttgaattgctaactagaataaccaatgtagagaagaacataaatgacctgatggagctgaaaaacacagcacaataacttcgtgaagaatacacaagtatcaacagccaaatcgatcaagcagaagaaaggataaaagtgagtgaagatcaacttaatgaaataaagagcgaagaaaagattagagaaaaaagaataaaaaggaacgaacaaagcctccaagaaatatgagactatgtgaaaagaccaaatgtacatttgactggtgtatctgaaagtgacagggagaatggaaccaagttggaaaacattcttcaggatattatccaggagaacttccccaagctagcaagacaggccaacattcaaattcaggaaatacagagaacaccacaaagatactccttgagaagagcgaccccaagacacataattgtcagattcaccaaggttgaaatgaaggaaaaaatgttaagggcagccagagagaaaggtcaggttacccacaaagggaagcccatcagactaacagcagatctctctgcagaaatcctacaagccagaagagtgagggccaatattcaatgttctcaaagaaaagaattttcaacccagaatttcatatccagccaaactaagcttcataagtgaaggagaaataaagtcctttacagacaaacaaatgctgagagattttgtcaccaccagacatgccttacaagagctcctgaaggaagcactaaacatggaaaggaacaatcagtaccagccactgcaaaaacataccaaattgtaaagaacatcaacattatgaagaaactgcattaactaatgggcaaaacaaccagctagcatcaaaatgacagaatcaaattcacacataacaatattaaccttaaatgtaaacaggctaaatgccccaattaaaagacacagactggcaaattggatagagtcaagacccatcagtgtgctgtattcaggagacccatctcacatgcaaagacacacataggctcaaaataaagggatggaggaatatttaccaagcaaatggaaagaaaaaaaaaaaacaggagttgcaataagaaacagactttaaaccaacaaagatcaaaagagacaaagaagggcattacgtaatagtaaagggatcaatacaatgagaaaagttaactattttaaatatatatgcaccctatacaggagcacccagattcataaagttcttagagacctacaaagagagttggactcccacacaataatagtgggagactttgacacccaactgtcaatattagacagatcaacaagccagaaaattagcaaggatattcaggacttgaactcagctctggcccaagcagacctaacagacatctacagaactctccaccccaaacaaacagaataatacattcttctcagcacctcatcacacttattctaaaattggccacataattggaagtaaaacactcatcagcaaatgcagaagaatggaaatcataacaaacactctctcagaccacaagagtaatcaaattagaactcaggattaagaaactcattcaaaatcgcacagctacatggaaactgaacaacctgctcctgaatgactactgggtaaataatgaaatgaaggcagaaataaagatgttctttgaaaccaataaaattgaagacacaatgtaccagaatctgtgggatgcatttaaagcagtgtttagagggacatttatagcactaaatgcccacaagagaaaggaggaaagatctaaaattgacaccctaacatcaaaatgaaaacaactagagaagcaacagcaaacaaattcaaaagctagcagaagacatgaaataacttagatcagagcagaactgaaggagatagagacatgaaaaacccttcaaaaaaaaaaaatcaataaatccaggacctgctttttgaaaaaagtcaacaaaatagacagtctgctagccagaccaataaagaagaaaagatctaagacccaaatagaatagaatgaaatacacacaataaaaagtgatatagggaatatcatccctgatcccacagaaatacaaactaccatctataagcacctctatgcaaataaactagaaaatctagaagaaatagataaatttctggacacatacaccccccacgtctaagccaggaagaagtcgaatccctgaataaaccaaaaacaagttctgaaattgaggcagttattaatagcctaacaaccaaaaaaagtccagggccagatggattcacagccaaattctaccagaggtacaaagaagagctggtaccattccttctgaaaggattccaatcaatagaaaaagagggactcctccctaactcattttatgaagccagcatcatcctgataccaaaacctggcagagatacaacaaaaaaagaaaatttcaggccaatatccctgttgaacatcgatgtgaaaatcctcaataaaagactggcaaactaaatccagcagcacatcaaaaagtttatctatccatcactatcaagttggcttcatccctgggatgcaagtctggttcaacatatgcaaatcaattaatgtaattcatcacataaacagaaccaatgacaaaaaccacatgattatctcaatagatacagaaaaggtatttgataaaatgtaacagcccttcatgctaaaaactctcaataaactaggtattgatgggatgtatctcaaaataataagagctatttatgacagacccacagccattatactgaatgggcaaaaactggaagcattccctttgaaaactggcacaagacagggatgccctctcaccacacctactcaacatagcattggaagttctggccagggcaatcaggcaagatatatataaagcaataaagggtattcaaataggaagagaggatgtcaaattgtctctgtttgcagatgacatgattgtatgtttagaaaaccccatcgtttcaacccaaaatctccttaagctgataagcaagttcagcaaagtctcaggatacaaaatcaatgtgcaaaattacaagcattcctatgcactaattacagacagagagccaaatcatgagtgaactcccattcacgattgctactaagagaataaaatacctaggaatccaacttacaagagaagtgaaggacctcttcaaggagaactacaaaccactgctcaaggaaataagagaggacacaaacaaatggaaaatcattccatgctcatggatcagcagaatcaatatcatgaaaatggccatactgcccaaagtaatttatagattcaatgctatccccatcaaccaaccactgactttcttcacagaactggaaaaaaactactttaaacttcatatggaaccaaaaaagagcccgcataaccaagacaatcctgggcaagaagaacaaagctggaggcatcacactacctgacttcaaactatactacaaggctagagcaaccaaaacagcatggtactactaccaaaacggatatatagaccaatggaacagaacagaggcctcagaaataacaccacacatctacaaccatctgatctttgacaaacctgacacacacaagcaacggggaaaagattccctatttaataaaaggtgttggaaaaaactggatagccatatgcagaaaactgaaacttccttacaccttatacaaaaatcaactcaagatggatcaaagacttaaacataagacctagggccataaaaatcctagaagaaaacctgggcaataccattcaggacataggcatgggcaaggacttcatgtcaaaaacaccaaaagcaatggcaacaaaagccaaaattgacaaatgggatctaattaaactaaagagcttctgcacagcaaaagaaactatcatcagagtgaacaggtaacctacagaatgggagaaaatttttgcaatctatccatctgacaaagggctaatatctagaatctacaaataacttaaacaaatttacaagaaaaaaacaacccaccccatcaaaaaatgggcaaaggatatgaacagacacttctcaaaacaagacatttatgcaaccaacagacatatgaaaaaatgctcatcaacacgggtcattagagaaatgcatatcaaaaccacaatgagatactatctcctgccagttagaatggcgatcattaaaaagtcaggaaacaacagatgctggagaggttgtagaaaaatacgaacgcttttacactgctggtgggagtgtcaatgagttcaaccacttcagaagacagtgtggtggttcctcaaggatctggaactagaaataccgtttgactcagcactcccattactgggcatatacccaaggattataaatcattctacgataaagacacatgcacacgtatgtttattgcatcactattcacaatagcaaagacttggaaccaacctaaatgtccatcaatgatagactggataaagaaaatgtggcacatatacaccatgcaatactatgcagtcataaaaaaggatgagttcatgtcctttgaagggacatggatgaagctggaaactatcgaactatcacaggatcagaaaaccaaataccgcacgttatcactcataagtaggagctgaacaatgagaacacatgtacacagggaggggagcatcacacaccaaggcctgtcggcgggtggggggctaggagagggatagcattaggagaaatacctaatgtaggtgacgggttgatgggtgcagctaaccaacatggcacgtgtgtaactgtgtaacaaagctgcccattctgtacatgtaacccagaacttaaagtataataaaaaaaa

SEQ ID NO: 843 - DNA, 2120 bp, Homo sapiens
  source 1..2120: mol_type = other DNA
gagttttgattaagcatggtggcttgaacaagcatatctatctttattttctttcaaatgccccattggaataaaataaaggaaaaatgaagacttaaatctgtgaggataaagatgataaaagagaagatagtgtcagataagaaatgctaacaaaattgtagagccagaagagagatcattgtcttctaagagcagaaagagcaaaaagctaagggcctctactgggataatatataataaatatttctattgggaaataatcacatttgcacctcatatctctggaagattttagaaacaggagccacaagctgcctttaaaaagctgggtgcaaaatatagctgaaaacataaagattcattgaaagtgtttaaaataaattatattcccagatccttcccatactgaactcagccctgggttgaacccaagaagctctggactcagagatagctggagctaagagatgtatgaggcatcattctaaaacaggaaactattttagaattaaataaagcctcttctttgaggtgtgagatacccaggctcctcccttcttgaatcctagaattagaaaggagtttgtaaacgtaatttctgcagctattggcacaagagaggagctcttcagagactgacattttgggatttgcaaacaaaatggccaggtcaccaactgaacaccctacttacctgttagcaaacctgcccatgcagaatgggctttcaactagcttttcaaagtcttactcttaaatatggataaacaaagattatgtatgattgaagaaagctttgaacttaatgagaaagtcaaaatgacaaacaggataaaaagaaaaaaaagacaaaagcaaaaaacagaggcaaccgagacaatgcaggaaactgaagaaaacttcaaaaaatgatattatacatccttagataagagatctttcatgtgtaaaacaagatttagagtgctatataaaagggccattgagataatttataaaaattcataactgcaacattaagtagaagtgaagaaaggtaaagttaaggagactctcctagaaaaaaggcaaagaaataaaaaatagaagataaagtcataggaaattagatcagtctatgaagtataaaataaggtttccgaaaagaaagaaaaaaaatcaaggggaagaaattattttttaatgtgtatgtgtgtgtgtgtatatatttgtatatactcacatatacatatatgcatacatatgtatttgtgattctcatatatttgtatatagtaagaatgcttactcatatattcatataaaatttgtttatttaaattatatatacccatgtataatttcccataactaatggacttggaagccagattgaaagacatcataagtaggaagtgaaataatgaacaggacgttgacaagaggtttgggaacactgaagaaattatattacagctccagagagaaagataaatgacagtacattggaataatagtcaaaaaggcagtagactttttaataacactggaagctaaagacaatgtgaaataccttaaaaattctgagaaatgataatttccaaactagaattgtatatccaaattatcaatcaagtgtaaggtaaagcacgtaaattttcaaaaaattgttttcccgatgcaccttttctcaggaagctactggaggaagtgctccaacaaaacaaggaaacaaacagtaaaaggaatacatggattgttttaaagaaacaggaaattggaaacgaagaagcaaggcaattactgatgtcagcagagcagcaagcaaggagtttaatcccatcaaataggtgcagggtgatggagttatccaggacttatgtctccaaggaaaacatgaggcagatggattgctgaatatatttgatcctgttgaagtgactaagttttcctttagagaacctgagaatgtataactccagggaaatcaataagttgtaaaataaaggaagtgtcacagcacactacattgcttagctatgagtaatattttcattatcataattatgtcagcactgaattatagaactacctaaaagttgccactagctaaactggaaaaattgaggaagagaaaa

SEQ ID NO: 844 - DNA, 6016 bp, Homo sapiens
  source 1..6016: mol_type = other DNA
gggggaggagccaagatggccaaataggaacagcttcggtctacagctcccagagtgagcgacgcagaagacagtgatttctgcatttccatctgaggtaccgggttcatctcactagggagtgccagacagtgggtgcaggtcagtgggtgagcgcaccgtgcgcgagccgaagcagggtgaggcattgcctcacttgggaagcgcaaggggtcagggagttccttttccgagtcaaagaaaggggtgacggatggcacctggaaaatcgggtcactcccacctgaatactgcacttttccgacgggcttaaaaaacggcgcaccaagagattatatcccgcacatggctcggagggtcctgtgcccatggagtctcgctgattgctagcacagcagtctgagatcaaactgcaaggcggcagctaggctgggggaggggtgcccgccattgcccaggcttgattaggtaaacaaagcagccgggaagttccaactgggtggagcccaccacagctcaaggaggcctgcctgcctctgtaggctccacctctgggggcagggcacagacaaacaaaaagacagcagtaacctctgcagacttaaatggccctgtctgacagctttgaagagagcagtggttctcccagcacgcagctggagatctgagaacgggcagactgcctcctcaagtgggtccctgacccctgatcccggagcagcctaactgggaggcaccccccagcaggggcacactaacacctcacacggcagggtattccaacagacctgcagctgagggtcctgtctgttagaaggaaaactaacaaacagaaaggacatccagaccaaaaacccatctgtacatcaccatcatcaaagaccaaaagtagataaaaccacaaagatggggaaaaaacagagcagaaaaactggaaactctaaaaagcagagcacctctcctcctcccaaggaacgcagttcctcaccagcaacggaacaaagctggatggagaatgactttgatgagctgagagaagaaggcttcagacgatcaaattactctgagctacgggaggacattcaaaccaaaggcaaagaagttgaaaactttgcaaaaaatttagaagaatgtataactagaataaccaatacagagaagtgcttaaaggagctgatggagctgaaaaccaaggctcgagaactacatgaagaatgcagaagcctcaggagccgatgcaatcaactggaagaaagggtatcagcgatggaagatgaaatgaatgaaatgaggcgagaagggaagtttagagaaaaaagaataaaaagaaatgagcaaagcctccaagaaatatgggactatgtgaaaagaccaaatctacgtctgattggtgtacctgaaagtgatggggagaatggaaccaagttggaaaacactctgcaggatattatccaggagaacttccccaatctagcaaggcaagccaacgttcagattcaggaaatataaagaatgccacaaagatactcctcgagaagagcaactccaagacacataattgtcagattcaccaaagttgaaatgaaggaaaaaatattaagggcagccagagagaaaggtcgggttaccctcaaagggaagccgatcagactaacagcagatctctcagcagaaaccctacaagccagaagagagtgggggccaatattcaacattcttaaagaaaagaattttcaacccagaatttcatatccagccaaagtaagcttcataagcgaaggagaaataaaatactttacagacaagcaaatgctgagagattttgtcaccaccaggcctgccctaaaagagctcctgaaggaagcactaaacatggaaaggaaaaaccggtaccagccactgcaaaatcatgccaaaatgtaaacaccatcaagactaggaagaaactgcatcaactaacgagcaaaataaccaggtaacatcataatgacaggatcaaattcacacataacaatattaactttaaatgtaaatggactaaatgctccaattaaaagacacagactggcaaattggatagagtcaagagccatcagtgtgctgtattcaggacacccatctcacgtgcagagacacacatacgctcaaaataaaaggatggaggaagatctaccaagcaaatggaaaacaaaaaaaggcaggggttgcaatcctagtctctgataaaacagacttgaaaccaacaaagatcaaaagagacaaagaaggccattacataatggtaaagggatcaattcaacaagaagagctaactatcctaaatatatatgcacccaatacaggagcacccagattcataaagcaagtcctgagtgactacaaagagacttagactcccacacattagtaatgggagactttaacaccccagtgtcaacattagacagatcaacgagactgaaagtcaacaaggatacccaggaattgaactcagctctgcaccaagcggacctaatagacatctacagaactctccaccccaaatcaacagaatatacactttttcggcaccacaccacatctattccaaaattgaccacatacttggaagggaagctctcctcagcaaatgtaaaagaacagaaattataacaaactatctctcagaccacagtgcaatcaaactagaactcaggattaagaatctcactcaaaaccactcaactacatggaaactgaacaacctgctcctgagtgactactgggtacataaggaaatgaaggcagacataaagatgttctttgaaaccaacaacaacaaagacacaacataccagaatctctgggacgcattcaaagcagtgtgtagagggaaatttatagcactaaatgcccacaagagaaagcaggaaagatccaaaattgacaccctaacatcacaattaaaagaactagaaaagcaagagcaaacacattcaaaagctagcagaaggcaagaaataactaaaatcagagcagaactgaaggaaatagagacacaaaaaacccttcaaaaaatgaatgaatccaggagctggttttttgaaaggatcaacaaaattgatagaccgctagcaagactaataaagaaaaaaagagaagaatcaaatagacacaataaaaaatgataaaggggatatcaccaccaatcccacagaaatacaaactaccatcagagaatactacaaacacctctacgcaaataaactagaaaatctagaagaaatggataaattcctcgacacatacactctcccaagactaaaccaggaagaagttgaatctctgaatagaccaataacaggatctgaaattgtggcaataatcaatagcttaccaaccaaaaagagtccaggaccagatggattcacagccgaattctaacagaggtacaaggaggaactggtaccattccttctgaaactattccaatcaatagaaaaagagggaatcctccctaactcattttatgaggccagcatcattctgataccaaagccaggcagagacacaaccaaaaaagagaattttagaccaatatccttgatgaacattgatgcaaaaatcctcaataaaatactggcaaaccgaatccagcagcacatcaaaaagcttatccaccatgaacaagtgggcttcatccctgggatgcaacgctggttcaatatatgcaaatcaataaatgtaatccagcatataaagagagccaaaggcaaaaaccacatgattatcgcaatagatgcagaaaaagcctttgacaaaattcaacaacccttcatgctaaaaactctcaataaattaggtattgatgggacgtatttcaaaataataagagctatctatgacatacccacagccaatatcatactgaatgggcaaaacctggaagcattccctttgaaaactggcacaagacagggatgccctctctcaccactcctattcaacatagtgttggaagttctggccagggcaattaggcaggagaaggaaataaagggtattcaattaagaaaagaggaagtcaaattgtccctgtttgcagacgacatgatcgtatatctagaaaaccccattgtctcagcccaaaatctccttaagctgataagcaacttcagcaaagtctcaggatacaaaatcaatgtacaaaaatcacaagcgttcttatacaccaacaacagacaaacagagagccaaatcatgagtgaactcccattcacaattgcttcaaagagaataaaatacctaggaatacaacttacaagggatgtgaaggacctctttaaggagaagtacaaatcactgctcaaggaaataaaagaggatacaaacaaaaggaagaacattccatgctcatgggtaggaagaatcaatatcgtgaaaatggtcatactgcccaaggtaatttacagattcaatgccatccccatcaagctaccaatgcctttcttcacagaattggaaaaaactactttaaagttcatatggaaccaaaaaagagcctgcgtcgccaagtcaatcctaagccaaaagaacaaagctggaggcatcacactacctgacttcaaactatactacaaggctacagtaaccaaaacagcatggtactggtaccaaaacacagatatagatcaatggaacagaacagagccctcagaaatagagccacatatctacaactatctgatctttgacaaacctgagaaaaacaagcaatggggaaaggattccctatttaataaatggtgctgggaaaactggctagccatatgtagaaagctgaaactggatcccttccttacaccttatacaaaaatcaattcaagatggattaaagacttaaacgttcgacctaaaaccataaaaaccctagaagaaaacctaggcattaccattcaggacataggcatgggcaaggacttcatgtctaaaacaccaaaagccatggcaacaaaagccaaaattgacaaatgggatctaattaaactaaagagcttctgcacagcataagaaactactatcagagtgaacaggcaacctacaaaatgggagaaaatttttgcaacctacttatctgacaaagggctaatatccagaatctacaatgaactcaaacaaatttacaagaaaaaaacaaacaaccccatcaaaaagtgggcgaaggacatgaacagacacttctcaaaagaagatatttatgcagccaaaaaacacatgaaaaaatgctcatcatcactggccatcagagaaatgcaaatcaaaaccacaatgagataccatctcacaccagttagaatgacaatcattaaaaagtcaggaaacaacaggtgctggagaggatgtggagaaataggaatacttttacactgttggtgggactgtaaactagttctaccattgtggaagtcagtgtggtaattcctcagggatctagaactggaaataccatttgacccagccatcccattactgggtatatacccaaaggactataaatcatgctgctataaagacacatgcacacgtatgtttattgcggcagtattcacaatagcaaagacttggaaccaacccaaatgtccaacaatgatagactggattaagaaaatgtggcacatatacaccatggaatactatgcagccataaaaaatgatgagttcatgtcctttgtagggacatggatgaaattggaaatcatcattctcagtaaactatcgcaagaacaaaaaaccaaacaccgcatattctcactcataggtgggaattgaacaatgagatcacatggacacaggaaggggaatatcacactctggagactgtggtggggtggggggaggggggagggatagcattgggagatatacctaatgctagatgacgagttagtgggtgcagtgcaccagcatggcacatgtatacatatgtaactaacctgcacaaggtgcacatgtaccctaaaacttaaaagaacaaaaa

SEQ ID NO: 845 - DNA, 303 bp, Homo sapiens
  source 1..303: mol_type = other DNA
gctgggtgcagtggctcatgcctataatcttagcactttgggaggccaaggtaggaggattgcttgaagctaggagtttgagaccagcctgggcaacagggtaaggtcctgtctctacaagatcaaaaacttagccgggtatggtggtgcatgtgtgcctgtagtccaagctacttgaaggctgagacaggaggatcggttgagcccaggaggttgtggctgcagtgagctgtgatgtgcccttatgctatagcctgggcaagagcgtgagaccctgtctcaaagaagaaaaaaagagaaaaa

SEQ ID NO: 846 - DNA, 5724 bp, Homo sapiens
  source 1..5724: mol_type = other DNA
cctgagcttccatgaagctggggcccatttctccctccctacatgggacagcagtattcctgcagtggagtgtgggccagccacagagctgtccgttttgggtgagaaaaaagggattctgccctgaagtcatttcagttgtagctgtaggacaggcattttccagggatttcagttacattgtggtctggagataaaggacaatgtctatctgaactgaaagtcatgaaccctggaagaggagtatgatgagaagaggatcactttcttgcctgccaagtatatgaggctgctgcagcccccttcccactctctgtggagacctcagctcatctgactatgagttcccccctgtagtgcccatcaggacaggtgcttctgctcctcttttgggtagctgagggcaagctggcttttactcataaacatcacctactagactgcagatcaaaccacaccaccaaataaaaaagcctgctgacagagggcatagtgataaggaagacgataagctccctgagacctccatacttccagccctgaagaagagaatgaatctgctcatattctgaatacattgctactacaattaacattgagaaagccactacacaaaagctatctataaccaaggaacttctacagagccttggccccctgaaagaacctgtaatcaaaacaatcatacacaacatacattacagcacaccctcaagaggagaaaagaatcccatcaaaatgaaagtaaaataaaaaataagaagtaacagcttattcagatgagaaggaatcagtgcaagaattccagcattagaaaaaaatagagtgttttgatacccccaaagaatcacattcgctctctagcaattgatattaaccaaaatgaaaattttgcaatgacagataattcaaaatatgaattgtaatgaatctcagtgagatctaagagaaagttgaacactaacacaaataagaaaaataattcagaatataaatgaaacatttactaaagggatacacttaaaacaaatcttctggaaataaactatttattatttatttattgaaggaattgcaaaatatagttgacagatgctagagtgagcagaataaaaatttcagaacttgaagactggtactttcaattaactcagtcagatgacaataaagaaaaaagaagttaaaactaaacaaaggattcaggaaatagggcattatgtaaagcaaccaaacctatgaattatagatattctgagggagaagaagaaaaagtaaaaagcttggaaaacatatttaacaaaacaattcaggaaagcttccctggtctagctaaagaattggacattcagatacatgaagctcagaaaatgcctgggaggtactctgcaagatgaacctcatcgaagcatatagtcatgagactattcaaagtcaatgtgaaagtaaaaatcataaaagcagcaagagagacacatttaattacttataaaggaaatcctatcagattaacagcagacttctcagcagaaatgttataaactggaagagagtgggggactattttcatttttcttaaagaaaaaaatacatcagccatgaattttatattctgctaaaccaaacttcataaatgatggagaaatgaactctttcccagataagcaaacactgaggaaattcatcaccactagactggtcctgcaagaaatgctcaaaggagttctaaacatgaaaatgaaagaatgatactagcaatcataaaagtacgtgaaagaacaaggttcacagatcccataaagcaattacaaaattaagagtacaaaagaagtaggtagcaattcatattatgacaggaacaaaacctcatatatcaatattaaccttcaatgtaaatggtctaaatgctccacttaaaagacaaagaattgcaaattggattaaagaaaaaaaaaaacaagatccaaccccacactgcctacagtaaacccacctaacaggtaaagacatccacagactcagagtataggtgtgaaaaaagttataccatagaaatgaaaactaaaagtgagcagtaatagctatgctaatatcagataaaacagattttaaataaaaaaacagttaaaaaaagacaaggtcattatatgataaagagttctagtcaacaagaacatacataacaatcctgaatatatatgcacccaacaccagaacaccaagattcataaaacaaatactacaatctcacaaaaagagatagaaagcaatacaataatagtgggagacttcaacactccactggcagcattagataaatcactgagagagacaattgacaaagaaactctgactgaaattggactctagacaaaataaacctaatagactattacagatcattttacccaacaattgcagaatatacatttttctaatctactcatgaaacattctccaaaatagaccataagcttggccataaagcatcttaatacattaagaaaattcaaagtcatattgcatatcttcttagactacaatcgaataaaattaaaaattaatattaagaggaactcttaaaactatacaaatacatagaaacttaacaacctgctcttgaatgatctttaggtaaatgatgaaattaaggcagaaattaaaacaaaatgaaacaaatgaaaatagggcgacaacacaccaaaacttctgggatacagcaaaagcagtgctaagagaaaagtttatagcattaaatgcctacatgaaaaagatctcaaattaacaacctaatgctgcacctcaatgaactagaaaaacaagactaaaccaaacagaatgctagcacaagcaaagaaataacaaagattagatcagagcaaaattatattgagaataaaaaatgatacaaaggatcaatgaaagaaaagtttgttctttgaagagatgagtaaaatttgtagacctctagttggatcaccaagaaaaaaaaggaagaagatttaaataagcacagtaagaaataataaaggcgagattaccactgataccacagaaatacaaaagattatcacagactactatgagcatctctatatgcagaaactagaaaagctagaaaaaaaggatgaattcctggaaacatactacctccaaagattaaaccatgaagaaattcttaacagaccaataatgagtaatgacattgaatcagtaataaaaatctctcagttaaaaaaagcccagggccaaatggattcacagccacattttaccagatgtacaaggactggtgccaattttgctggagttgttccagaaaattgaggaagagggattcctcccttattctatgaaaccagtactaccctgatattaaaatcaagcaaggggacaacaaaaaagaaaattacaggccaatatatctgataaacatagacgcaaaaatcctcaaccaaatactagcaaacaaattccaacagcacatcaaatagataattcaccatgatcaggtgtgttttatcctagggatgcaatgatagttcagcatacacaaatcaataaatgtgattcactacgtaagtagaagtaaaacaaaaaccatgtgatcatctcaatagatgcaggaaaaacatttgagaaaattcagcatcccttcatgataaaaaccttcaacaaaggcatcaaaggaacatatctgaaagtaataaaagtcacatatgacaaacccacagccagaatcatattaaatggggaaaagcagaaaacatttctcctaagaactggaacgagagaaggatgccactttcaccattcctattcaatatagtactagaagtcctagccagagaaatcattcaagataaagaaaaaaaaaaaggcatctaaattaagaaagaggaaatcaaattatttctgttcactagtaagataatcttatacctagaaaattttaaagactctgtcagaggacacccagatttgataaatgactttagtaaagttttaggatacaaagtcaaggtacaaaaatcagtagcatttctatacaccaacaaggtgaaagctgtgaactaaactaagaactcaataccatttacaatagccacacaaaataataaaatacctaggaatacgtttaaccaaggaggtgaaagagctctacaagtggaactacaaaacaataataaagaagtcatagatgacacaaatgaaaaaaaatctcatgctcatgaactggaagaatcaatatcgttaaaatgacaatactgcccataacaatatacagattcaatgcaattcctattaaattactaacaatttttcacagagttagacaaaagcaatcccaaaattcatatgaaatcaaaacagagcctgaatagccatggaaaccttaagcaaaaagaacaaagctgcaggtgtcacattacctgacttcaaactatactacaaggctataataaccaaaatagcatggtactggtacaaaagtagacatatagataaatgaaataaaatatgtaccctagaaataaatccacatacctacaaccaagtgatatttaacaaagttggcaaaaatatattctagagaaaggacaacctattcaataaatggtgctggaaaaattggatagccatatgcagaagaatgaaactggacctctatctctcactatatacataattaactaagatgaattaaaggtttaaatgtaagacctgaaactagaaaaattctggaagaaattctagaaaaacctcttctgaacattggcctatgcaaagaatttatgactaagacctcaaaagcaaatgcaccaaaaacaaaaaaagacaaatgggacttaattaagctaaaaacttctgcacaacaaaagaaactatcaacacagtaaagagacaacctacagaatgggagaagatacttgcaatgtatgttatctgacaaagggctaatatgcagaatctatagggaactcaaacaactcaacaccaacaaaaataaccccattaaaaagtgggcaaataacgtgaacaaacacttctcaaaagaagacatacaagaagcccaaaaacatatggaaaaatgttcaacatcagtaatcataagagaaatgcacattgaaatcacaatgagatgccatctcaaaccaatcagaatggcttttattaaaaagtcaaaaaacgaccagtgctggtgagaatgtgaagaaaagggaatgcttatacactgctagtggcagagtaaattagtacaacctcttggaaaacagtacaaaaatttctcaaaaaattgaaactaaaactgccatttgaaccagcaaccccacttctgggtatataaccaagggaaaagaaatctttatatcaaaagtacaactgcattgtatgtttatcacagcactattctcaaaagcaaagtcacagaatcaacctaggtgtccatcaatggatgattggataaagaaatgatgatatatatacattatgtaatactactgagtcataaaaaagaatgaaatcatgtattttgcagcaacacagatggagctggaagccattattttatgtgagataactcagaaacagaaatcaaatgctcatttataagtgggagataaaaaatgggtacacgtgtacatacagaggggaatgacacacactgcagactccaaaggggagggcagaagcagagtaagggttgaaaaattatctactggg

SEQ ID NO: 847 - DNA, 6406 bp, Homo sapiens
  source 1..6406: mol_type = other DNA
gctggcaagatggccaaataggaacagctcccatctgcagctcccagcgagatcaacacggaaggcaggtgatttctacacttccaactgaggtacccggttcatctcactgggactggttggacagttggtgcagcccacggagggctaaagctgggtagggcatcgccttgcccaggaagcgcaaggggtaaagggatttccctcccccagccaagtgaagccatgagagactgtaccgggaggaacagtgcactctggcccagatactgtgcttttaccacagtgtttgcaaccggaagaccaggagattcccgccggtgcctaggccaccagggcctgggtttcaagcacaaaactgggcagccgtttgggcagacaccgagctagctgcagcagtttatttttcataccccagtggcacctggaatgccagggagacagaaccgttcactcccctggaaagggggctgaagccagggagccaagtggtctggctcggcaggtcccacctccacggtgcccagcaagctaagatccactggcttgaaattctcgctgccagcgtagcagtgtgaagtcgacctgggacgcttaagctaggtgggggtgggagaatcgcctttgctgaggcttgagtaggtggttttaccctcacagtgtaaacaaagccatcgggaaggttgaaatgggcagagcccactgtagctcagcaaggccaggccaaaggccgctggtggccagactccttctctagattcctcctctctgggcagggcatttctgaaagaaaggcagcagccccaagtcagggacttagagataaaacccccatctccctgggacagagcaacgggggaaaggggcggctgtgggcgcagcttcagcagaacttaaacatccctgcctgacagctctaaagagagcagcggatctcccagcacagtgttcaagccctgataagggacagactgcctcctcaagtgggtccctgaaccccatgtatcctgactgggagacacctctcagtggggaccgacggaaactcatacaggataattctggctggcatctggtgggtgaccctctgggatgaagcttccagacgaaggaacaggcagcaatctttgctgttgtgcagcctctgctcgtgatacccaggcaaacagggtctagactggacctccagcaaactccagcagacctgcagcagaagcgcctgttagaaagaaaactaacaaacagaaaggaacagcatcaacatcaacaaaaaggatgtccactcagagaccccatccgaaggtcaccaacatcaaagaccaaaggtaggtaaatccatgaagatggggagaaaccagcgcaaaaaggctgaaaattacaaaaaccagaacacctcttctctcccaaaggatcacaactcctcgccagcaggggaacaaaaccagacggagaatgagtttgacgaattgacagaggtaggcttcagaaagtgggtaataacaaactcctctgagctaaaggagcgtgttttaacccaatgcaataaagctaagaaccttgaaaaaaggttagatgaactgctaactagaataaccagtttggagaagaatataaatgaactaatggagctgacaaacatagcacaagaactttgtgaaccatacacaagtatcaatagctgaatcgatcaaggggaagaaaggacatcagagattgaagatcaactcaatgaaataaaacaagaagataagattagagaaaaaagagtgaaaagaagcaaataaagcctccaagaaatacgggactgtgagaaaagacaaaatctatatttgactgatgtacctgaaagtgacggggagaatagaaccaagttggaaaacactcttcaggatatcatccaggagaacttccccaacctagcaaggcaggacaacattcaaattcaggaaatacagagaccaccacaaagatactcctcaagaagagcaaccccaagacacataatcctcagagtcaccaaggctgaaatgaaggaaaaaatgctaagggcagccagagagaagactcaggttacccacaaagagaagcccatcagactaaaagcagatctctcagcagaaaccctacaagccagaagagagtggaggccaatattcaacattctcgaaggaaagtattttcaacccagaatttcatatccagctaaactaagcttcataagggaaggagaaataaaatcctttagagacaagcaaatgctgagagacactgtcaccaccaggcctgccttacaagagctcctgaaggaagcactaaacatggaaaggaacaaccagtaccagccacagtaaaaacataccaaattgtaaagaccatcaacgctatgaagaaactgcatcaactaatgggcaaaataaccagctagcatcataataacacgatcgaattcacacctaacaatacaataacctaaaatgtaaataggtcaaatgccccaattaaaagacacagactggcaaattggacagagtcaagacccatcagtgtgctgtattaaggagacccatctcatgtgcaaagacacacatacactcaaaataaagggatggaggaatatttaccaaccaaacggaaagcaacaaaagcaagggttgcactcgataaaacaggctttaaaccaacaaagttaaaaagaaacaaagaaggacattactaatggtaaagggatcaatgcaacaagaagaggtaactatcctaaatatatatgcacccaatacaggagcaccctgattcataaagcgagttcttagagacctacaaagagacttagactcccaaacaatagtaggaaactttaatatcagacagatcaattagacagaaaattaacaaaaatatctaggacttgaactcagctctggaccaaacagacctaaatgatatctacagaactctccaccccaaatcaacagaatatacattcctctcagcaccacatcacacatacactaaaattgaccacataactggaagtaaaacactcctcagcaaatgcaaaagaatggaaatcataatagtctctcagaccacagtgcaatcaaattagaactcaggattaagaaactcactcaaaaccacataagtacatggaaacggaacaacctgctcccgaatgactactgggtaaataacgaaattaaggcagaaataaagatgttctttgaaaccaacgagaacaaagacacaacataccagaatctccaggacacatttaaagcagtgtgtagagggaaatttatagcactaaatgcccacaagagaaagcaggaaagatctaaaattgacaccctaacatcaaaattaaaagaactagagaaggaagagcaaatacattcaaaagctagcagaagacaagaaataactaagatgagagcagaactgaaggatatagagacaggaaaaactcttcaaaacatcactgaatacaggagctggttttttgaaagatcaacaaaatagatagacctctagccagattaataaagaagaaaagagagaagaatcaaatagacacagtaaaaaatgattagggggatatcaacaccaatcccacagaaatacaaactactatcagaaaatactataaatacctctatgcaaataaactaaaaaatctagaagaaatggataaattcctggacacatacaccctcctaaaactaaaccaggaagaagtagaatccctgaatagaccagtaacaagttctgaaattgaggcagtaattaatagcctaccaaccaaaaaaagtccaggaccagaaggattcacagccgaattctaccagaggtacaaaggggagctggtaccattccttctgaaacgattccaaacaacagaaaaagagggaatcctccctaactcattttatgatgccagcatcatcctgatagcaaagcctggcagagacacaacaaaaaaagaaaatttcaagccaatatccctgatgaacatggatgagaaaattctcaataaaatactggcaaaccaaatccagcagcccatcaaaaagcttatccaccatgatcaagtcggcttcatccctggaatgcaaggttggttgaacataagccaatcaataaatgtaatccatcacataaacggaaccaaggacaaaaaccacatgattatctcaaaagatgcagaaagggcctttgacaaaattcaacagcccctcatgctaaaaactctcaagaaactaggtattgatgggatgtttctcaaaataataagagctatttatgataaacccacaaccagtatcatactgaataagcaaaaactggaagcattccctttgaaaaccggcacaagacaaggatgccctctctcacccctcctattcaacatagtattggaagttctggccagggcaatcaggcaagagaaagaaataaagtgtattcaattaggaaaacaggaagtcaaattgcctctgtttgcagagacatgattgtatatttagaaaaccccatcatctcagcccaaaatctccttaagctgataagcaacttcaacaaagtctcaggataaaaaatcaatgtgcaaaaatcacaagcattcctatacaccaataacagacaaacagacagccaaatcatgagtgaactcccattcacaattgctacaaagagaataaaatacctaggaatccaacttacaagggatatgaaggacctcttcaagaagaactacaaaccactgctgaaagaaataagaggacaaaaacaaatggaaaaacattccatggtcatggatatgaagaatcaatatcatgaaaatggccatactgcctaaagtaatttatagattcaatgctatccccatcaagctatcattgactttcttcacagaactggaaaaaactactttaaatttcatatggagcctgcatagccaagacaatcctaaacaaaaagaacaaagctggaggcatcacactacctgacttcaaactatactacaaggctacagtaacaaaaacagcatggtactggtacaaaaacagatatatagaccaatgaacagaacagagacctgagaaataacaccacacatctacaaccatctgatctctgacaaacctgacaaaaacaaagcaataggaaaagggttccctatttaataaatagtgttgggaaaactggctagccatatgtaaaaagccaaaactggatcccttgcttacaccttatacaaaattaactcaagatgggttatagacttaaatgtaagacctaaaaccataaaaaccctagaagaaaacgttggcaataccattcaggacacaggcatgggcaaagacttcatgactaaaacaccaaaagcaatggcaacaaaagccaaaattgacaaatgggatctaattaaacgaaagagctcctgcacagcaaaagaaactatcatcagagtgaacaggcaaactccagaatgggagaaaatttttataatctatccatctgacaaagggctaatatccagaatctacaaagaacttaaacaaatttacaagagaaaaaagaaaacaacatcaaaaagtaggcaaagaatatgaacagacaattctcaaaagaagacatttatgcagccaacaaacatgaaaaaaagctcatcatcactggtcagtagagaaatgcaaatcaaaaccacaatgagataccatctcacgccagttagaatgatgatcattgaaacatcaggaaacaacagatgctggaaaggctgtgaagaaataggaatgcttttacactattggtgggagtgtaaattagttcaatcatcgtggaagacagtgtggcaattcctcaaggatctagaactagaaacaccatttgacccagcaatcccattactgggtatatacccaaaggattgtaaatcattctgctataaagacacatgcacacgtatgtttactgcagcatagttcacaatagcaaagacttgaaaccaacccaaatgcccatcaaagatagactgaattaagaaaatgtggcacatatacaccatggaatactatgcagccataaaaaaggatgagttcatgtcctctgcgcggacatggatgaagctggaaaccatcattctcagcaaactaagagaagaacagaaaaccaaacaccacatgttctcactcataagtgggagttaaacaatgagaacacatggacacagggaggggaacatcatacaccagggctaggggagggatagcattaggagaaatatctaatgtaaatgacaggttgacgagtgcagcaatccaccatggcaagtgtatacctatgtaacaaacctgcatgttctgcacatgtaccccagaacttaaagtataattttaaaaaaaga

SEQ ID NO: 848 - DNA, 6139 bp, Homo sapiens
  source 1..6139: mol_type = other DNA
cgaagatggccaaataggaacagctccagtctacagctcccagcgtgagcgatgtagaagacaggtgatttctgcatttccaactgaggtaccaggttcatctcactgggaagtgttggaaagtgggtgcaggacactgagtgcagtgcaccgagcatgagccaaatcagggcgaggcatcgcctcacctgggaagcacaagaggtcagggaattccctttcctagtcaaagaaaggggtgacagacggcacctggaaaatcaggtcactcccaccctaatactgtgcttttccaatggtcttagcaaacggtacaccaggagattatatcccgtgcctggctctgagggtcctacacccgcggagcctcactcattgctagcacagcagtctgaggtcaaactgcaaggtagcagcgaggctgggggaggggcacccgccattgcccaggcttgagtaggtaaacaaagtggccaggaagctcaaactgggtggagcccactgcagctcaaggaggcctgcctgcctctgtagactccacctctgggggcagggcatagccaaacaaaaggcagcagaaacctctgcagacttaaatgtccctgtctgacagctttgaagagagtagtggttctcccagcacgcagctggagatctgagaatggacagactgcctcctcaagtgggtccctgacccccgagtagcgtaagtgggaggcaccacccagtaggggcagactgacacctcacatggccagttactcctctgagacaaaacttgcagaggaatgatcaggcagcaacatttgctgttcaccaatacctgctgttcttcagcctctgctgctgatacccaggcaaacaggtctggagtggacctccagcaaactccaacagacctgcagctgagggtactgaatgttagaaggaaaactaacaaacagaaaggacatccacaccaaaaacccatctgtacgtcatcatcatcaaagaccaaaggtagataaaaccacaaagatggggaaaaaacagagcagaaaaactggaaactctaaaaatccgagtgcctctcctcctccaaaggaatgcagctcctcaccagcaacggaacaaagctggacagagaatgactttgacaagttgagagaagcaggcttcagacgatcaaactactccgaactaaaggaggaagtccgaacccatggcaaagaagttaaaaaccttgaaaaaacatagacaaatggctcactagcataaccagtgcagagaagtctttaaaggacctgatggagctgaaaaccaaggcacaagaactacatgacgaatgtacaagcctcagtagccaattcgatcaactggaagaaagggtatcagtgatggaagatcaaatgaatgaaattaagtgagaagagaagtttagagaaaaaagaataaaaagaaatgaacaaagcctccaagaaatatgggactatgtgaaaagaccaaatctacgtctgattggtgtacctgaaagtgacgaggagaatggaaccaagttggaaaacactcagcaagatattacccaggagaagttccctaatctagcaaggcaggccaacgttcaaattcaggaaatacagacaacaccacaaagatactcctcgagaagagcaactccaagacacataattgtcaggttcaccaaagttgaaatgaaggaaaaaatgttaagggcagccagagagaaagattgggttacccacaaagggaagcccatcagactaacagtggatctcttggcagaaaccctacaagccagaagagagtgggggccaatattcaacattcttaaagaaaagaattttcaacccagagtttcatatccagacaaactaagcttcataagtaaaggagaaataaaatactttacagaaaggcaaatgctgagagatttctgtcaccaccaggcctgccatacaagagaccctgaaggaagcactaaacatagaaaggaacaactggtaacagccactgcaaaaacatgccaagttgtaaagaccatcgaggctaggaagaaactgcatcaactaacgagcaaaataaccagctaacatcataatgacaggatcaaattcacacataaagatattaaccttaaatgtaaatgggctaaatgctccaattaaaagacacagactggcaaattggataaagagtcaagacccatcagtgtgctatattcaggaaacccatctcatgtgcagagacacacataggctcaaaataaagggatggaggaagatctaccaagcaaatgaaaaacaaaaaaaggcaggggttgcaatcctagtctgtgataagacagactttaaaccaacaaagatcaaaagagacaaagaagaccattacataatgaatggtaaagggatcaattcaacaagaagagctaattatcctaaatatatatgcacccaatacagaagcacccagattcataaagcaagtccttagagacctacgaagagacttagactcccatacaataataatgggagactttaacaccccactgtcagcattagacagatcaatgagacagaaagttaacgaggatatccaggaactgaactcagctctacaccaagtggacctaatagacatctacagaactctccaccccaaatcaacagaatatacattcttttcagcaccacaccacacctattccaaaattgaccacatagttggaagtaaagctccccttagcaactgtagaagaacagaagttataacaaactgtctctcagaccacagtgcaatcaaactagaactcaggattcagaaactcactcaaaaccgctcaactacatggaaactgaacaacctgctcccgaatgactgctgggtacataacaaaatgaaggcagaaataaagatgttctttgaaaccaacgagaacaaagacactacataccaaaatctctgggacacattcaaagcagtgtgtagagggaaatttatagcactaaatgcccacaagagaaagcaggaaagatctaaaattgacaccctaacatcacaaattaaaagaactagagaagcaagagcaaacacattcaaaagctagcagaaggcaagaaataactaagatcagagcagaactcaaggaaatagagacacaaaaaacccttcaaagaaatgaatccaggagctagttttttgaaaagatcaacaaaattgatagaccgctagtaagactaataaagaagaaaagagagaagaatcaaatagaagcaataaaaaatgataaaggggatatcaccaccaatcccacagaaatgcagactaccatcagagaatactatgaacacctctatgcaaataaactagaaaatctagaggaaatggataaattcctggacacatacaccctcccaagactaaaccaggaagaagttgaatctctgaatagaccaataacaggctctgaagttcagtcaataattaatagcttaccaaccaaaaaaagtccaggaccagatggattcatagctgaattctaccagaggtataaggaggagctggtaccattccttctgaaactattccaatcaatagaaaaagaggaaatcctccttaactcattttatgaggccggcatcatcctgataccaaagcctggcagagacacaacaaaaaaagagaattttagaccaatatccctcatgaacatcgatgcagaaatcctcaataaaatactgggaaaccaagtccagcaacacatcaaaaagtttatccaccatgatcaagtgggcatcatcccagggatgcaaggctggttcaacatatgcaaatcaaaaaaacgtaatccagcgtagaaacagaaccaaagagaaaaaccacatgattatctgaatagatgtggaaaagacctttgacaaaattcaacaacccttcatgctaaaaactctcaataaattaggtattgatgggaggtatctcaaaataataagagctatctatgacaaacccacagccaataccatactgaatgggcaaaaactggaagcattccctttgaaaactggcacaagacagggatgccctctctcaccactcctattcaacatagtgttggaagccagggcaattaggcaggagaaggaaataaagggtattcaattaggaaaagaggaagtcaaattgtccctgtttgcagatgacatgattgtatatctagaaaaccccatcgtctcagcccaaaatgtccttaagctgataagcaacttcagcaaagtctcaggatacaaaatcaatgtacaaaaatcacaagcattcttatacatcagtaacagacaaacagagagccaaatcatgagtgaactcccattcacaattgcttcaaagagaataaaatatctaggaatccaacttacaagggacgtgaaggacctcttcaaggagaactacaaaccactgctcaatgaaataaaagaggatacaaacaaatggaagaatattccctgctcatggataggaagaatcaatatcgtgagaatggccatactgcccaaggtaatttatagattcagtgccatccccatcaagctaccaatgactttcttcacagaactggaaaaaactactttaaagtttatgtggaaccaaaaaagagcccccattgccaagtcaatcctaagacaaaagaacaaagctggaggcatcatgctacctgacttcaaactatactacaaggctacagtaaccaaaacagcatggtactggtaccaaaacagagatatagaccaatggaacagaacagagccctcagaaataacgccgcatatctacaactatctgatctttgacaaacctgagaaaaacaagcaatggggaaaggattccctatttaataaatggtgctgggaaaactggctagccatatgcagaaagctgaaactggatcccttccttacaccttatacaaaaaataattcaagatggattaaagacttaaacgttagacctcaaaccataaaaaccctagaagaaaacctaggcaataccattcaggacataggcatgggcaaggacttcatgtctaaaacaccaaaagcaatggcaacaaaagccaaaattgacaaatgggatctaattaaactaaagagcttctgcacagcaaaagaaactatcatcagagtgaacaggcaacctacagaatgggagaaaattttcgcaatctactcatctgacaaagggctaatatccagaatctacaatgaactcaaacaaatttacaagaaaaaacaaacaaccccatcaaaaagtgggcgaaggatatgaagagacacttctcaaaagaagacttttgtacaaccaaaagacacatgaaaaaatgctcatcatcactggccatcagagaaatgcaaatcaaagccacaatgagataccatctcacaccagttagaattgcgatcattaaaaagtcaggaaacaacaggtgctggagaggatgtggagaaataggaacacttttacactgttggtgagactgtaaactagttcaaccattgtggaagtcagtgtggcgattcctcagggatctagaactagaaataccatttgacccagccatcccattactgggtatatacccaaaggattataaaacatgctgttataaagacacatgcccatgtatgtttattgtggcactattagcaatagcaaagacttggaaccaacccaaatatccaacaatgataaactggattaagaaaatgtggcacatatacaccatggaatactatgcagctataaaaaatgatgagttcatgtcttttgtatggacatggatgaagctggaaaccatcattctcagcaaactatcgcaaggacaaaaaaccaaacacggcatgttctcactcataggtggtaattgaacaatgagaacacgtggacacaggaaggggcatatcacacactggggcctgttgtggggttggggaaggggggacggattgcattaggagatatacctaatgttaaatgacgagttgctgggtgcagcacaccagcatggcacatgtatacatatgttactaacctgcacattgtgcacatgtaccccaaaacttaaagtataataataataaaaaaa

SEQ ID NO: 849 - DNA, 6435 bp, Homo sapiens
  source 1..6435: mol_type = other DNA
gggcagggccaagatggccgactagaagcagtggtgatctgaggctctcatcaaaaagaactaaaacagcttgctatcctgcactggcaaccaaggtatccaggttctgtcatggggacagaccaggcagctggcatgatccaccgagaggaaggaagagcagtgtagtgcggcggcccacctgagagccacatggggcaggggacccctcacccccccagccaagggaggcagtgagtgagcgtgctacccagcctgggaaactgtgctttttccacggaactgtgcaacccacggatcggaagatcccactcatgagcccatgccaccggggcctagggtcccaaccatggagctgctcagattctcaacagccactaagctagaatctgcttaagcctgccaagctcctggtgggagggccggccatcaccacagctgcgggtgcctgctgtctaagccctctgtgctccttcagggaggggcagcagccaacactgggactgctagctgcctaacacactaagctcccagggcggggtaagggcagcagccatctctatagctctaggccatgctcttcccctgctgaagccagggaggctggatggcttggtcccaagagggattccccacagcccaacacactggctgtggcagattgtggccagagtacctcttcagacctgaccctgactcatcttttctcatggggacggggcatccctgcaggaactccaacaactccaggcaggggctcaggggcagaactctgatctctctgggcctgagcccctagggggaggggtggccatagtctctgcagaccagcagacttagtctttcctcctgctagttctgaggaacccaggcagcccagatgagtaggtttccatccagctcggcacaccccctccaccaagggacaaccaaagtgcttcattaaatgggtcctgctccccgtgccacccaactgggcgagaccctcttaacgggttgtcagacaccctatataggaatgtttctattagcatcaggtaggtgccccttgaggtcagatatctcagaggaaggagcaggtacccatctttgccgttctccagcctcctcaagttcactccaggtgcaggagtgaaacagataaatagggcctgaagtaaatgcccagcaaaccacagcagccatacagaagagggacctgaccattgaaagaaaaaacaaacaaacaaatagaaagcaacaacagcatcaacaaaaatgttcccgcaaaaacctcctccaagggtcagcagcctcaaagattgacactagacaaactcatgaagatgagaaagaatcaacaaaaagatgctgaaaacccaaaaggccagagtgcctctactccttcaaacgatcgcaacagctctccagcaatggcgcagaactggacagaagatgagatggatgaagtaggcttcagaaggtgggtagtaataaactctgctgtgctaaaaggagcatgtactaactcaatgcaaagaagctaagaaccttgataaaaaccttacaggagcttctaactagaataaccagtttagacaggaacataaatgacatgatggagatgaaaaacagcatgagaccttcgtgaagcatacacaagtatcaatagccaaattgatcaagcagaagaaagaatatcagagttggaaggccatcttgctgaaataaggcagccacacaagattagagaaaaaaagaatgaaaaagaacaaacaaaacttccaagaaatatggaactatgtaaaaagacagaacctacaattgattggagtacctgaaagagacagggagaatggaaccaagttggaaaacacatttcaggatattatctaggagtacttccccaacctagcaagacaggccaacattcaaattcaggaaatacagagaacaccataaagataccaaccccaagacacatgatcaacagattcttcaaggtcaaaatgaaggaaaaaatgttaagggcagccagagagaaaggccaggtgacctacaaagggaagcccatcagactaacagctgatctctcagcagaaaccctgcaagccagaagagagtgggggccaatattcaacattcttaaagaattttcaacccagaatttcatatccagccaaactaagcttcataaatgaaggagaaataaaatcattttcagacaagcaaatgctgagggattttttcaccaccaggcctgtcttgcaagagctcctgaaggaagcactaaatatggaaaggaaaaactggtagtagccactgcaaaaaacacaccaaaatataaagaccaatgatgttgtgaagaaactgcatcaactagtgtgcaaaataaccagatagcatcatgatgacaggatcaaattcacatgtaacaatattaaccttaaatgtaaatgggctacatgccccaattagaagacagactggcaaactggataaagaatcaaaacccatcggtgtgcggtacccacgagacccatctcatgtgcagagacacacatgggccaaaataagggatggaggaaaatttaccaagcaaatgaaaagaaaaaaaaaaagcagaggttgcagtcctagtctcttgacaaaacagactttaaaccaacaaagatcagaaaagacaaagaagggcattacatgatgataaacagtacaattgaaaaagaacaactaactatccaaaatatatatgtacccaatacaggagcacctagattcataaaacaagttcttagagacctagaaagagttttagactcccacaaaataatactaggagactttaacaccccagtgtcaatattagattaatgagacagaaaattaacaaggatattcagaacttgaactcagctctggatcaagtggacctaatagacagctacagaactctccaccccaaatccacagaatatacattcttctcagtcccacatgacactttttcagaaaacaactaaataattagaagtggaatcactcctcagcaaatgcaaaagaactgaaatcataacaaaacattctctcagaccacagtacaatcaaattagatctcaggattaagaaactcactcaaaaccacacaattacatggaaattgaatagcctgcccctgaatgactcctgggtaaataatgaaattaaggcagaaatcaagaagttcgttgaaaccaatgagaacaaagagacaatgtaccagaatctctgggatgcagctaaagaagtgttaagagggaaacattgcactaaatgctcacatcagaaagttagaaagagctcaaatcgacacccaagtatcacaattaaaggaactagagaagcaagagcaaacaaatcctaaagctagcagaagacaagaaataactaagatcagaggagaactgaaggatatggagacacaaaaaaacccttcaaaagatgaatgtatccaggagctggtttttttgaaaaaattaacaaaatagagcactagatagactaatgaaaagagagaagaatcaaatagacacaataacaaatgataaatgggatatcaccagtgaccccagagaagtacaaactaccatcagagaatactgtaaacacctctacacaaataaactagaaaatctagaagaaatggataaactcataacacatacaccctctcaagattaaaccaggaagaagttgaatctctgaatagaccaataacaagttctgaaattggggcagtaattcgtagcctacaaaccaaaaaaagcccaggaccagatggattcacagccaaattctaccagagatacagagaggagctggtactattccttctgaaactattccaaacaattgaaaaggagggactccttcctaacacattttatgaggccagcatcatcctgataccaaaaccaggtggaaacacacacaaaaaagcaaacttcaggccaatatccttgatgagcattgaaacaaaaatcctcaataaaatactgacaaaccaaatccagcagcacatcaaaaagcttcatccccaggatgcaaggctgcttcaacatatgcaaatcaataaatgtaatccatcatataagcagaaccaatgaaaaaaaccacatgattaactcaatagatgcagaaacggccttcgataaaattcaacatcgcttcatgttaaaaactctcaataaactaggtattgatggaagtacctccaaataataagagctatttatgacaaacccatagccaatatcatactgaatgggcaaaagctggaagcattccctttgaaaaccgtcacaagacaaggatgctctctctcaacactcctattcaacatagtattggaagtcctggccagggcaatcaggcaagagaaagaaataaaggatattcaaataggaagagaggaagtcaaattgcctctgtttgcagatgtcatgattctgtatttagaaaaccctattgtatcagcccaaaaacttcttaagctgataaggaacttcagcaaagtctcagcatacaaaatcaatgtacagaaatcacaagcattcctacgtaccaacaatagacaaacagagagacaaatgatgaatgaactcttattcacaattgccataaagagaataaaatacctaggaatacagctaacaagggatgtgaagggcctcttcaaggagaactacaaaccactgctcaagaaaataagagaggacacaaacaaatggaaaaacattccatgctcgtggataggaagaatcaatatcatgaaaatggccatactccccaaagtaatttatagattcaaagctatccccatcaagctatcattgacattcctcacagaattagaaaaaaaaactactttaaattttatataaaaccaaaaaagagcctgtatagccaagacaatcctgagcaaaaagaacaaagctggaggcatcatgctacctgacttcaaactatactacagtgctacagtaaccaaaaaaaaaaaaaaaaaaaaaaaaaaaaaaaaaatcatggtactggtaccaaaacagacatacagaccaatggaatggaacagaaacctcagaaacaatgccacacatctataaccatctgatcttcgacaaacctgacaaaaacaagctatgggaaaaggattccctgtttaataagtgatgctgggaaaactggctagccatatgcagaaaactgaaactggaccccttccttacaccttatacaaaaattaactcaaaatgaattaaagacctaaatataaagccccaaatcataaaaaccctagaaaaaatcccaggtaataccattcaggacttacgcatgggcaaagatttcgtgacaaaaatgccaaaagcaattttaacaaaagctaaaattgacaaatgggatctaattaaactaaagagcttctgcacagcaaaagaatgaatagagtgaacagaatgaacaggcaacagaatgggggaacatttttgcaatctacccatctgacaaaggtctaatatgtggaatctacaaggaacttaaacagatttacaaggaaaaaacaaccccatcaaaaagtgggcaaaggatacaaacagaaatttctcaaaagaagacatttatacagccaacaaacatatgaaaaaaagttcaacatcactgatcattagagaattgcaaatcaaaaccataatgagaccatctcatgcctgtcagaatggcaattattaaaaagtcaagatacagtagctgctggtgaggctgaggagaaataggaacacttttacactgttagtgggaatgtgaattagttcaatcatggtggaagacagtgtggtgattcctcaaggatctagaaccagaaataccatttgacccagcaatcccattactgggtatatacccaaaggaatataaatgattctgctataaagacacatgcacatgtatgtttattgcagcactatttacaatagcaaagacatggaaccaacccaaatgcccatcaatgatagactggataaagaaaatgtggtacatattaaccatggaatactacgtagccataaaaaggaatgagatcatgtcctttgcagggacatggatgaagctggaacccatcatcctcatcaaactaacacataaacagaaaaccaagcatgttctgactcgtaagtgggaatttaacaatgtgaacatatggacacagcgagggaaatatcacacacaggggcctgttggggagtcagggggcgaggggagggagagcatcaggacaaatagctaatgcatgcagggcttaaaacctagatgacgggtagataggtgcagcaaaccaccatggcacaagtatacctacataacaaacctgcatgtcttgcacatgtatcctggaacgtaaagtaaagtaaaaaagaaaaa

SEQ ID NO: 850 - DNA, 6121 bp, Homo sapiens
  source 1..6121: mol_type = other DNA
gagccaagatggccgaacaggaacagctccggtctacagctgccagcgtgagcgatgcagaagacgggtgatttctgcatttccatctgaggtactgggttcatctcactagggagtgccagacactgggcgcaggacagtgggtgcagcacactgtgcgcgagccaaagcagggcgaggcattgcctcatttgggaagtgcaaggggtcagggagttccctttcctagtcaaagaaaggggtgacagacggcacctggaaaatcgggtctctcccaccctaatactgcgcttttccaacgggcttaaaaaaacggtgcaccaggagattatatcccgcacatggctcagagggtccttcacccacagagtctcgctgattgctagcacagcagtctgagatcaaactgcaaggcggcagcgaggcttggggaggggcgcccgccgttgcccaggcttgcttaggtaaacaaagcagccgggaaactcgaactgggtggagcccaccacagctcaaggaggcctgcctgcctctgtaggctccacctctgcgggcagggcacagacaaaaagacagcagtaacctctgcagagttaaatgtccctgtctgacagctttgaagagagcagtggttctcccagcacgcagctggagatctgagaacgggcagactgcctcctcaagtgggtccctgaaccctgacccctgagcagcctaactgggagacaccccccagtaggggcaacctgacacctcacaaggccgggtactcctctgagacaaaacttccagtggaatgatcagacggcagcattcgcggttcatgaaaatccgctgttctgcagccaccactgctgttacccaggcaaacggtctggagtggacctctagcagactccaacagacctgcaactgagggtcttgtctgttagaaggaaaactaacaaacagaaaggacatccacaccaaaaacccatctgtacatcaccatcatcaaagaccaaaagtagataaaaccacaaagatagggaaaaaacagcagaaaaactggaaactgtaaaaagcagagcgcctctcctcctccaaagaaacgcagttcctcaccagcaacggaacaaagctggatggagaatgactttggcgagttgagagaagaaggcttcggacgatcaaactactccaagctagaggaggaaattcaaaccaaaggcaaagaagttgaaaactttgaaaaaaatttagacgaacgtataactagaatcaacaatacagagaagtgcttaaaggagctgatggagctgaaagccaaggctaaggactacgtgaagaatgcagaaccctcaggagctgacgcgatcaactggaagaaagggtatcagtgatggaagatgaaatgaatgaaatgaagcgagaagggaagtttagagaaaaaagaataaaaagaaacgaacaaagcctccaagaaatatgggactatgtgaaaagacgaaatctacatctgattggtgtacctgaaagtgacggggagaatggaaccaagttggaaaacagtctgcaggatattatccagaacttccccaatctagcaaggcaggccaacattcagattcaggaaatacagagaacgccacaaagatactcctcgagaagagcaactccaagacacataattgtcagattcaccaaagttgaaatgaaggaaaaaatgttaagggcagccagagagaaaggtcgggttacccacaaagggaagcccatcagactaacagcggatctctcggcagaaactacaagccagaagagagtgggggccaatattcaacattcttaaagaaaagaattttcaacccagaatttcatatccagccaaactaagcttcataagtgaaggagaaataaaatcctttacagacaagcaaatgctgagagattttgtcaccaccaggcctgccttaaaagagctcctgaagaaagcactaaacatggaaaggaaaaaccagtaccagccactgcaaaatcatgccaaattgtaaagaccattgaggctaggaagaaactgcatcaactaactagcaaaataaccagctaacatcaaaatgacaggatcaaattcacacataacaatattaactttaaatgtaaatggagtaaatgctccaattaaaagacacagactggcaaattggataaagagtcaggacccataagtgtgctgtattcaggaaacccatctcacgggcagagacacccataggctcaaaataaaaggatggaggaagatctaccaagcaaatggaaaacaaaagaaggcaggggttgcaatcctggtctctgataaaacagactttaaaccaacaaagatcaaaagagacaaggccattacataatggtaaagggatgaattcaacaagaagagctaactatcctaaatatatatgcacccaatactggagcacccggattcataaagcaagtcctgagtgacctacaaagagacttagactcccacacaataataatgggagactttaacaccccactgtcaacattagacagatcaacgagacagaaagttaacaaggatacccaggaattgaactcagctctgcaccaagcggacctaatagacatctacagaactctccaccccaaatcaacagaatatacatttttttcagcaccgcaccacacctattccaaaattgaccacatacttggaagtaaagctctcctcagcaaatgtaaaagaacagaaattataacaaactatctctcagaccacagtgcaatcaaactagaactcaggattcagaaactcactcaaaaccgctcaactacatggaaactgaacaacctgctcctgaatgactactgggtacataatgaaatgaaggcagaaataaagatgttctttgaaaccaatgagaacaaagacacaacataccagaatctctgggacacattcaaagcagtgtgtagagggaaatttatagcactaaatacccacaagagaaagcaggaaagatccaaaattgacaccctaacatcacaattaaaagaactagaaaagcaagagcaaacacattcaaaaactagcagaaggcaagaaataactaaaatcagagcagaactgaaggaaatagagacacaaaaaagccttcaaaaaattaatgaatccaggagctggtttttttgaaaggatcaacaaaattgatagaccactagcaagactaataaagaagaaaagagagaagaatcaaatagacacaataaaaaatgataaaggggatatcaccaccgatcccacagaaatacaaactaccatcagagaatactacaaacacctctacgtaaataaactagaaaatctagaagaaatggataaattcctggacacatacacctcccaagactaaaccaggaagaagttgaatctctgaatagaccaataacaggctctgaaattgtggcaataatcaatagcttaccaaccaaaaagagtccaggaccagatggattcacagccaaattctaccagaggtacaaggaggaactggtaccattccttctgaaactattccaatcaatagaaaaagagggaatcctccctaactcattttatgaggccagcatcatcctgataccaaagccagggagagacacaaccaaaaagaattttagaccaatatccttgatgaacattgatgcaaaaatcctcaataaaatactggcaaaccgaatccagcagcacatcaaaaagcttatccaccatgatcaagtgggcttcatccctgggatgcaaggctggttcaatatatgcaaatcaataaatgtaatccagcatataaacagaaccaaagacaaaaaccacatggttatctcaatagatgcagaaaaggcctttgacaaaattcaacaacctttcatgctaaaaactctcaataaattcggtattgatgggatgtatctcaaaataataagagctatctatgacaaacccacagccaatatcatactgaatgggcaaaaactggaagcattccctttgaaaactggcacaagacagggatgccctctctcaccactcctattcaacatagtgttggaagttctggccagggcaatcaggcaggagaaggaaataaagggtattcaattaggaaaagaggaagtcaaattgtccctgtttgcagatgacatgattgtatatctagaaaaccccattgtctcagcccaaaatctccttaagctgataagcaacttcagcaaagtctcaggatacaaaatcaatgtacaaaaatcacaagcattcttatactccaataacagacaaacagagagccaaatcatgagtgaactcccattcacaattgcttcaagagaataaaatacctaggaatccaacttacaagggacctgaaggaccccttcaaggagaactacaaaccactgctcaaggaaataaaagaggatacaaataaatggaagaatattccatgctcatgggtaggaagaatcaatatcgtgaaaatggccatactgcccaaggtaatttatagattcaatgccatccccatcaagctaccaatgactttcttcacagaactggagaaagactaccttaaagttcatatggaaccaaaaaagagcccgcgttgccaagtcaatcttaagccaaaagaacaaagctggaggcatcacgctacctgacttcaaactatactacaaggctacagtaaccaaaacagcatggtactggtaccaaaacagagatatagatcaatggaacagaacagagccctcagaaataatgccacatatctacaactatctgatctttgacaaacctgagaaaaacaagcaatggggaaaggattccctatttaataaatggtgctgggaaaactggctagccatatgtagaaagctgaaactggatcccttccttacaccttatacaaaaagtaattcaagatggattaaagacttaaacgttagacctaaaaccattaaaaaccctagaagaaaacctaggcattaccattcaggacataggcatgggcaaggacttcatgtctaaaacaccaaaagcaatggcaacaaaagccaaaattgacaaatgggatctaattaaactaaagagcttctgcacagcaaaagaaagtaccatcagagtgaacaggcaacctacacaatgggagaaaatttttgcaacctactcatctgacaaagggctaatatccagaatctacaatgaactcaaacaaatttacaagaaaaaaacaaccccatcaaaaagtgggtgaaggacatgaacagacacttctcaaaagaagacatttatgcagccaaaaaacacatgaaaaaatgcttaccatccctggtcatcagagaaatgcaaatcaaaaccacaatgagataccatctcacaccagttagaatggcagtcattcaggaaacaacaggtgctggagaggatgtggagaaataggaacacttttacactgctggtgggactgtaaactagttcaaccattgtggaagtcagtgtggcgattcctcagggatctagaactagaaatacaatttgacccagccatcccattactggctgtatacccaaaggactataaatcatgctgctataaagacacatgcacacgtatgtttattgtggcactattcacaatagcaaagacttggaaccaacccaaatgtccaacaatgatagactggattaagaaaatgtggcacatatacaccatggaatagtatgcagccataaaaaaggatgagttcatgtcctttgtagggacatggatgaaattggaaatcatcattctcagtaaactatcgcaaggagaaaaaaccaaacaccgcatgttctcactcataggtgggaattgaacaatgagaacacatggacacaggaaggggaacatcacactctggggactgttgtggggtggggggaagggggagagatagcattaggagatatacctaatgctaaatgacgagttaatgggtgcagcacaccagcatggcacatgtatacatatgtaactaacctgcacattgtgcacatgtaccctaaaacttaaagtataataataataaa

SEQ ID NO: 851 - DNA, 3331 bp, Homo sapiens
  source 1..3331: mol_type = other DNA
gaaggcactgacctgtgcccaccagcaccccatcactgagccaacaccaccttcaggaagacagtctccagcagggcttcccccaattcccctagctgctttgcctctgctactccggtaagcacctgcagggaggcaggcaccccagcacccactagcattctgcaacagctgttgcaccttggctcccccagtacagtggattccaaacctcaaggagtcaaagaacagatggggcccaatacaaattccccagaattacaacatgccgtccaggagttgagagctgagtgttgaccttctaaaatctcccagaaacaaagccaggtggctgaatccaccttatattatagtcaaaccctcaaggtcatcaaatcatcaaataggataaaagaaaaaaaaatccaaaggtcagcaacatccaagattgaagacagataagctcacaaagatgagaaagagtcagcacaggaaaactgaaaactcgaaaaaccagagtgccctctttcctacgaacagccacatcacctctccagcaaaggttctgaactgagctgagatggccaaaatgacagaaatagaattcagaatatggataagaatgaagatcattgagctacaggagtatgttgaaacccaatgcaaggaagtgaaaaatcatgataaaacaatgccagagctgacagacaataatggacagtatagaaaagactgtaactggcctgatagagtcaaaaaatataatacaagaatttcataatgcaatcacaactattaatagcagaatataacaagtggatgaatgaatcagagcttaaagaatggctttctgaaataagacaatcagacaagaatagagaaaaaagaaaaaaaggaaagaacaaaagctcttagaaatagactcactaaagagactgagtaaagagaccaaatctaaaactcacttgtgtccctgaaggagatggggagaatagaaccaacttggagacatatttcaggctattatccatgagaaattccccagcctagattgagaggccaacattcaaattcaggaaattcagagaactccagtaagatacttcacaacaaaatgatccacaagacacataatcatcaaattcttcaagattgaagtgaaagaaaaaatattaaaggcagcaagagagaaaggttagttacctacaaagggaagcccatcagactaacagtgggcctctcagctgaaaccctacaagtctgaagaaatcagaggccaacgttcaacattgttaaggaaaacaaattccatcccagaatttcatatccagccaaactaagcttcataagcaaaggagaaataagatcatctgtagacaagcaaatgctgagcaaatttggtaccaccagacctgccctgcaaaagttcctgaaggaagcaccaactatggaaaggaaagactattaccagccactataaaaacacactgaagtacacaggccagtgacactataaagcatccacacatacaagtttgcaaaataacccgctaacactatgatgacaggatcaaatccacagatatcaatactaaccttgaatgtaaatggactaaatgcccccaagtgaaagacagagtgtggcaagctggataaagaaccaagacccattggtatgctgtcttcaagacacccatctcatatgcagtgacatatataggctcaaaataaagagatgaagaaaaatctaccaagaaaatggaaaacaaaagaaagcaggggttgcaatcccagtttctgacaaaacagactttaaaccaacaaacatccaaaaagacaaaaaagggcattacataatggtaaatggttcaattcaacaagaagatctaactatcctaaatatatatgcacccaacaggagcacccagattaataaagcaagggtttagagaccttcaaagagcattgtacccccacacaaaaatagtgggagaatataacacctcactgaaaatattaaagagattatcaaaacagaaaattaacaaagatattcagtacctgaactaagcattggatcaaatggatctaatagatatctacagaactctccatcccaaaacaacataatatacattcttctcattgccacatggcatatactctaaagttgatcacataatcagaagtaaaacactcctcagcaaatgcaaaagaactgaaatcataacaatctctcagaccacagtgcaatcaaattagaaatcgagactaagaaattcactcaaaaccatataattacatggaaattgaataacctactcctgagtgacttttaggtaaataatgaaattaaggaagaaatcaagaagttctttgaaactaatgagaacaaatatacaacatactagaatctctgggacacagataaggcagtgttaagaggaaaatttgtagcactaaatgcccacatcaaaaagttagaatgatctcaagttaacaacctaacatcacaactaaaagaactagagaaccaagagcaaacaaatcccaaagctatcagaagacaagaaataaccaaaattagagcttaactgaaagagatagaaacacaaaaaatccttcaacaattaacaaatccaggatctagtttttgaaaaaaaaatagaataaactgctagctagactaataaagaagaaaagagagaagattcaaatgaaaacaatcagaaatgatgagagggatattatcactgacctcacagaaatacaaacaaccaccagagactattatgaacacttctatgcacataaactagaaaatctagaagtggataaattcctggacccattcaccctcccaaaactgaaccaggaagaaattggtccccgaacagactaatagtgagctctgaaattgagtcagtaataaatagcctaccaaccaaaacaaaaaacaacaacaaaaaaacaaaacctgggaccagacagattcacagctgaattctatcagatgtacaaaaaaagagctgataccattcctactgaaactattccaaaaaattgaggacaaggaattcctccctaacttgttctatgaggccagcatcatcctgatatcaaaatctgagaaagatacaccaaaaaaagaaaacttcagaccaatatttttgatgaacatcaatgcaaaaattctcaacaaaataccggcaaaccaaatccagcaacatctgaaagcctatccaccacaatcaagtaggctttatccctgagatgcaacgttggttagacatacgcaaaacaataaatgtgattcatcacataagcagaatcaaagacaaaaaccacatgg

SEQ ID NO: 852 - DNA, 5123 bp, Homo sapiens
  source 1..5123: mol_type = other DNA
ccggttttaactttatatcactgaaagaggcactgaagaggtggtaaaacagtcttgaatcaccgacaccacccctccctcatcctgtgacagcagtggcatggtgcagagagcttttctgtgcactggggagagagagagtgcagtaattatgaggcactgagctcagtgctgtcctattataaaagaaaaaaactggatgaaacttaactgatgctcacccatggagggagcatttaatccagccctaaacagaggggaatcactgacccccagcagtctaaacttgagttccccgcaagccttgccaccatgggctacagtggcagtctaggccactgggactacaactcctaggcaagccctaatgctgaactgggcccagagacagtgatagtgggctaagcggggcatgtgacctaatgacacatcagtcaggggaagctaagggagtgctggcatcaccattcccctaaccccaggctgcacagcttgtggctccaaaagagaccctttccctccacttgaggagaggagatggaataatgtggaaaactttgttttgcatcttggataagctcagccacagcaggataggacatcagtcagagtcatgaggtcccctttccaggctgtagctcctggacaacatttctatacatacctgagaccagaagagaacccactgcctcgaaaggaaggacctactcctggcaggattaattatctcctaactaaagagtccttgggtcctgaataaccagcagtaatagccaggtatcatggcaagggccttgggtgagcctctgagacttgctgccttcaggtgagactcagcctattcccaaatctggtggctaggtggcaagatgcctttcacgtgaagaacagaggatggaaaagtaaaggggactttgtcttgcaccttaggtgccaccttggctacagggggatagagcaccaagaggactctcagggtccccaattccaggagttggctcttggatggcatttctggacctgccctgggccagaggggagcctgttcccctgaaaagtgagtcccaaaccaggcagcattcaccacaagctgactgaagagctgttaggccctcaaggaacatcagaggtagtctggcagtactcctcatgagcctatggtagtgtggccacagggtgaggctcctctctgtttggaaaggggtgggaagagtgggaaggactgtgccttgtggcttgagtgccagctcagccgcagcacactagaataccacgtagaattctaaggtttttgcttttagttcttagctcccagatggcacttctggacctgcgtggggagtggaggaactcaccacctgaaaggaagaacacaggcctggctggctttaccacctgctaagtgtagagccctagggccttaagcgaacataagctgcagccaaggactggttatggtaagccttgggcaacacccaatgctgtggtgactttgggtctgatccagcacagtgctagtggtggtggccacaagggtgcttgggtcactccactgccagctccaggtggctcagaacagagagagaggctctgtttgggagaaagtaaggaaagagaacaagagtctcagtctggtaatccacagaattcttctaaatcttatccaagaccatcaaggcagtacctctatgagtctggaggaaccactgcattattgggcatggggtggcccctaaagcacatacagcttagatcacaactcccaagtccttctgaatatatggaaagccttcccaaggaggatgggtacaaacaagcccagactgagaagactacaatgaatacctaactcttcaatgcccaaacacagacaaatatctacaagtgtcatgaccatccaggaaagcatgacctcaccaaatgaactaaataaggcactagggaccaatcctggagaaacggatatgtgacctttcagacagagaattcaaaatagctgttttgaggagactcaaagaaaaatcaagataacacaaagaaggaattcagaattctatcagacaaatttagtagagattgaaataactaaaatgaataaagcagaaattctggaatttggcatactgaagaattcatcagagtcttttaataggagaattgatcaagcagaagaggaattagtgagcttgaagatagagtatttgaaaatacaaagttagaggaaacaaccacaaaaaagaataaaaaagcaatgaagcatacctgcgggatctagaaaatagctgcaaaagggcaaatctaagagttgttggccttaaagagaaggtagagaaaaagacgggtagaaagtttattcaaagggataataacagggaacttcccaaacctagagaaagatacccatatcaaatacaagaaggttatagaacaccaagcagatttaactcaaaagactgcctcaaggcatttaataatcaaactcccaaaggtcaaggataaagaaaggaccctaatagcagcaagagaaaagaaacaaacaacatacaatggagctcccatatgtctggcagcagacttttcagtgcaaaccttataggccagaagagaggggcatgacgtaattaagtgctaaaagaaaaagaaaactaacctagattagtgtatctggtgaaaatattcttcaaacgtgaaggaaaactaaagacttccccagacaaacaaaagtggagagatttcatcaacaccacacctatcctactacaaatgctaaagggagtacttcagtcagaaagaaaagaacattaatgagcaatataaaatcatcggaagctacaaaactcactggtaatagtaagcacaaagaaaaacaaagaatattgtaacactgtaattatggtgtgtaaactactcatgccttaagtagaaagatgaaaagatgaaacaattgaaaggaataactagaactttttaagacataggcagtatagtaagatataaatacaaacaacaaacagttaaaaagtgggaggataaagttaaagtgtagagcttttattcattttctctttgcttgtttatgcaatgagtattcagttgtcatcagtttaaaataatgggttataaaatactatttgcaagcctcacggtaacatacataataacatacgatggctacaaaaaaataaaaagcaagaaactaaattatatcaccagaggaaaaaactttcactaaaagaaagacaggaggaaaattaaaaaggaagagaaggccacaaaacaaccagaaaacaaataacaaaatggcaggagtaagtacttctttatcaataattacattgaatgtaaattgactaaatgtacccaatgaaaagatccattgatctgtcacctacaagaaacacaaataaagataactataaagacacacatagactgaaaataaagggaagaaaaaagatattccatgcaaatggaaacaaaaaaagagtaagaatagttatatcagacaaaatagatttcaagacaaaaactataggaagagacaaagaaggtcgctgtataatgataaaggggtcaatttagcaagaggatataacattttaaatatatatgcacccaacaccggagcactcagagatataaagcaaatattattagagctaaagagaaagataggctccaatacaatcatagttaagagacttcaacactccattttcagcattggacagatcttccagacagaaaatcgacaaagaaacattggacttaatttttactatagaccaaatggacctaatagatatttacgaacatttcatccagtggctgcagaataaacattgttttcctcagcacatggatcattctcaaggataggccatatgttaggtcacaaaacaagtcttaaaatgttttaaaaagttgaaatcatatcaagcatcttctctgaccacaatggaataaaactgaaaatcaataacaacagaaattttggaaaccatacgagtacgtggaaactaaacaacatgctcctgaatgaccagtgggtcaataaagaaattataagaaggaaattgaaaatcttcttgaaacaaatgataaaggaaacacaaaataccaaaacctatgagatacagcaaaagcagtaccaagagagaagattacagctatacgtgctggcatcaaagaagaagaaaaacttcaaataaacaacctaatgaattaaattaaattaaagaatttgaaaagcaaaagcaaaccaagccctaaattagtagaagaaaaggaataataaagatcagagcagaaataaatgaaataaaaaagaaggaaacaatacaaaagatcaatgaaacaaagatggttttttgaaaagttaaacaaagtgacaaaacttctgccaaaataactgagaaaaaagagaagatccaaacaaataaaattgcagatgaagaggagacattacaactgatactgcagaaattcacaggatcattagatgccaataaagttgaaaacctagaagaaatggttaaattcctagatgcataaaacctaccaagattgaaccatgaagaaatccaaaactggaatagaccaataacaagtaatgaattcaaagctgtaataaaaactctgtcagtaaagaaaagcccaggacctaatggcttcactgctgaattctatcaaacatttaaagaagaactaataccaattctactcaaactattatgaaaaatagaagagaagggaatacttccaaactcattctgaggtcagtattactctgataccaaaatcagacagatacatcaataaaagaaaactaactacaggccaatatctctgatgaatattgatgcaaaaaccctcaacaaaatactagcaaattgaattcaacaaaacattggaaagatcattcatcatgactgagtagaatttatccttagtattcaaggatggttcaacatatgcaaaccaatcaatgtgatacatcatatcaacagaataaaggattaaaaaacccatatgatcatttcaacatcccttcattataaaaaatattcaaaaaactggatacagaaggaacataccttaacataataaaagccatatatggc

SEQ ID NO: 853 - DNA, 6029 bp, Homo sapiens
  source 1..6029: mol_type = other DNA
ggggaggagccaagatggccgaataggaacagctccggtctacagctcccagcgtgagcgacgcagaagacggtgatttctgcatttccatctgaggtaccgggttcatctcactagggagtgccagacagtgggcgcaggccagtgtgtgtgcgcaccgtgcgcgagccgaagcagggcgaggcattgcctcacctgggaagcgcaaggggtcagggagttccctttccgagtcaaagaaaggggtgacggacgcacctggaaaatcgggtcactcccacccgaatattgcgcttttcagaccggcttaagaaacggcgcaccacgagactatatcccacacctggctcggagggtcctacgcccacggaatctcgctgattgctagcacagcagtctgagatcaaactgcaaggcggcaacgaggctgggggaggggcgcccgccattgcccaggcttgcttaggtaaacaaagcagccgggaagctcgaactgggtggagcccaccacagctcaaggaggcctgcctgcctctgtaggctccacctctgggggcagggcacagacaaacaaaaagacagcagtaacctctgcagacttaagtgtccctgtctgacagctttgaagagagcagtggttctcccagcacgcagctggagatctgagaacgggcagactgcctcctcaagtgggtccctgactcctgacccccgagcagcctaactgggaggcaccccccagcaggggcacactgacacctcacacggcagggtattccaacagacctgcagctgagggtcctgtctgttagaaggaaaactaacaaccagaaaggacatctacaccgaaaacccatctgtacatcaccatcatcaaagaccaaaagtagataaaaccacaaagatggggaaaaaacagaacagaaaaactggaaactctaaaacgcagagcgcctctcctcctccaaaggaacgcagttcctcaccagcaacagaacaaagctggatggagaatgattttgacgagctgagagaagaaggcttcagacgatcaaattactctgagctacgggaggacattcaaaccaaaggcaaagaagttgaaaactttgaaaaaaatttagaagaatgtataactagaataaccaatacagagaagtgcttaaaggagctgatggagctgaaaaccaaggctcgagaactacgtgaagaatgcagaagcctcaggagccgatgcgatcaactggaagaaagggtatcagcaatggaagatgaaatgaatgaaatgaagcgagaagggaagtttagagaaaaaagaataaaaagaaatgagcaaagcctccaagaaatatgggactatgtgaaaagaccaaatctacgtctgattggtgtacctgaaagtgatgtggagaatggaaccaagttggaaaacactctgcaggatattatccaggagaacttccccaatctagcaaggcaggccaacgttcagattcaggaaatacagagaacgccacaaagatactcctcgagaagagcaactccaagacacataattgtcagattcaccaaagttgaaatgaaggaaaaaatgttaagggcagccagagagaaaggtcgggttaccctcaaaggaaagcccatcagactaacagcggatctctcggcagaaaccctacaagccagaagagagtgggggccaatattcaacattcttaaagaaaagaattttcaacccagaatttcatatccagccaaactaagcttcataagtgaaggagaaataaaatactttatagacaagcaaatgttgagagattttgtcaccaccaggcctgccctaaaagagctcctgaaggaagcgctaaacatggaaaggaacaaccggtaccagccgctgcaaaatcatgccaaaatgtaaagaccatcgagactaggaagaaactgcatcaactaatgagcaaaatcaccagctaacatcataatgacaggatcaaattcacacataacaatattaactttaaatataaatggactaaattctgcaattaaaagacacagactggcaagttggataaagagtcaagacccatcagtgtgctgtattcaggaaacccatctcacgtgcagagacacacataggctcaaaataaaaggatggaggaagatctaccaagccaatggaaaacaaaaaaaggcaggggttgcaatcctagtctctgataaaacagactttaaaccaacaaagatcaaaagagacaaagaaggccattacataatggtaaagggatcaattcaacaagaggagctaactatcctaaatatttatgcacccaatacaggagcacccagattcataaagcaagtcctcagtgacctacaaagagacttagactcccacacattaataatgggagactttaacaccccactgtcaacattagacagatcaacgagacagaaagtcaacaaggatacccaggaattgaactcagctctgcaccaagcagacctaatagacatctacagaactctccaccccaaatcaacagaatatacatttttttcagcaccacaccacacctattccaaaattgaccacatagttggaagtaaagctctcctcagcaaatgtaaaagaacagaaattataacaaactatctctcagaccacagtgcaatcaaactagaactcaggattaagaatctcactcaaagccgctcaactacatggaaactgaacaacctgctcctgaatgactactgggtacataacgaaatgaaggcagaaataaagatgttctttgaaaccaacgagaacaaagacaccacataccagaatctctgggacgcactcaaagcagtgtgtagagggaaatttatagcactaaatgcctacaagagaaagcaggaaagatccaaaattgacaccctaacatcacaattaaaagaactagaaaagcaagagcaaacacattcaaaagctagcagaaggcaagaaataactaaaatcagagcagaactgaaggaaatagagacacaaaaaacccttcaaaaaatcaatgaatccaggagctggttttttgaaaggatcaacaaaattgatagaccgctagcaagactaataaagaaaaaaagagagaagaatcaaatagacacaataaaaaatgataaaggggatatcaccaccgatcccacagaaatacaaactaccatcagagaatactacaaacacctctacgcaaataaactagaaaatctagaagaaatggatacattcctcgacacatacactctcccaagactaaaccaggaagaagttgaatctctgaatcgaccaataacaggctctgaaattgtggcaataatcaatagtttaccaaccaaaaagagtccaggaccagatggattcacagccgaattctaccagaggtacaaggaggaactggtaccattccttctgaaactattccaatcaatagaaaaagagggaatcctccctaactcattttatgaggccagcatcatactgataccaaagccgggcagagacacaaccaaaaaagagaattttagaccaatatccttgatgaacattgatgcaaaaatcctcaataaaatactggcaaaccgaatccagcagcacatcaaaaagcttatccaccatgatcaagtgggcttcatccctgggatgcaaggctggttcaatatacgcaaatcaataaatgtaatccagcatataaacagagccaaagacaaaaaccacatgattatctcaatagatgcagaaaaagcctttgacaaaattcaacaacccttcatgctaaaaactctcaataaattaggtattgatgggacgtatttcaaaataataagagctatctatgacaaacccacagccaatatcatactgaatgggcaaaaactggaagcattccctttgaaaaccggcacaagacagggatgccctctctcaccgctcctattcaacatagtgttggaagttctggccagggcaatcaggcaggagaaggaaataaagggtattcaattaggaaaagaggaagtcaaattgtctctgtttgcagacgacatgattgtttatctagaaaaccccatcgtctcagcccaaaatctccttaagctgataagcaacttcagcaaagtctcaggatacaaaatcaatgtacaaaaatcacaagcattcttatacaccaacaacagacaaacagagagccaaatcatgggtgaactcccattcacaattgcttcaaagagaataaaatacctaggaatccaacttacaagggatgtgaaggacctcttcaaggagaactacaaaccactgctcacggaaataaaagaggagacaaacaaatggaagaacattccatgctcatgggtaggaagaatcaatatcgtgaaaatggccatactgcccaaggtaatttacagattcaatgccatccccatcaagctaccaatgactttcttcacagaattggaaaaaactactttaaagttcatatggaaccaaaaaagagcctgcattgccaagtcaatcctaagccaaaagaacaaagctggaggcatcacactacctgacttcaaactatactacaaggctacagtaaccaaaacagcatggtactggtaccaaaacagagatatagatcaatggaacagaacagagccctcagaaataatgccgcatatctacaactatctgatctttgacaaacctgagaaaaacaagcaatggggaaaggattccctatttaataaatggtgctgggaaaactggctagccatatgtagaaagctgaaactggatcccttccttacaccttatacaaaaatcaattcaagatggattaaagatttaaacgttaaacctaaaaccataaaaaccctagaagaaaacctaggcattaccattcaggacataggcgtgggcaaggacttcatgtccaaaacaccaaaagcaatggcaacaaaagacaaaattgacaaatgggatctaattaaactaaagagcttctgcacagcaaaagaaactaccatcagagtgaacaggcaacctacaacatgggagaaaatttttgcaacctactcatctgacaaagggctaatatccagaatctacaatgaactcaaacaaatttacaagaaaaaaacaaacaaccccatcaaaaagtgggcgaaggacatgaacagacacttctcaaaagaagacatttatgcagccaaaaaacacatgaagaaatgctcatcatcactggccatcagagaaatgcaaatcaaaaccactatgagatatcatctcacaccagttagaatggcaatcatttaaaagtcaggaaacaacaggtgctggagaggatgcggagaaataggaacacttttacactgttggtgggactgtaaactagttcaaccattgtggaagtcagtgtggcgattcctcagggatctagaactagaaataccatttgacccagccatcccattactgggtatatacccaaatgagtataaatcatgctgctataaagacacatgcacacgtatgtttattgcagcactattcacaatagcaaagacttggaaccaacccaaatgcccaacaatgatagactggattaagaaaatgtggcacatatacaccatggaatactatgcagccataaaaaatgatgagttcatatcctttgtagggacatggatgaaattggaaaccatcattctcagtaaactatcgcaagaacaaaaaaccaaacactgcatattctcactcataggtgggaattgaacaatgagatcacatggacacaggaaggggaatatcacactctggggactgtggtggggtcgggggaggggggagggatagcattgggagatatacctaatgctagatgacacattagtgggtgcagtgcaccagcatggcacatgtatacatatgtaactaacctgcacaatgtgcacatgtaccctaaaacttagagtataataaaaaaaaaaaa

SEQ ID NO: 854 - DNA, 1388 bp, Homo sapiens
  source 1..1388: mol_type = other DNA
atgagaggtgacagcatgctggcagccctcacagccctcgctcgctctcagtgcctcctctgcctgggctcccactttgtcggcacttgaggagcccttcagcccgcggctgcatggtgggagcccctttctgggctggccaaggtcggagctggctccctcagcttgcagggaggtgtggagagagagacgtgagccggaaccggggctacgcgcgctgcttgcctgccggctggagttccaggtgggcgtgggtttggcagccccgcactaggagctgccggctggccttgccggccggggcagtgaggggcttagcacctgggccagcagctactgtgctcgacttctcgccgggccttagctgcctccccgcggggcagggctcgggacctgcagcccgccattccttagcctccccactccgtggtctcctgtgcggcccgagcctccccgacgaacaccgctccctgctccacggcacccagtcccatcgaccacccaagggatgaagagtgtgggcacacggagagggactggcaggcagctccacctgcagctcctgtgcgggatccactgggtgaagccagctgggctcctgagtctgatggggacttgtagaacctttatgtctagctaagggattgtaaatacaccactcgacactctgtatctagatcaaggtttgtaaacacaccaatcagcaccctgtgtctagctcagggtttgtgaatgcagcaatcgacactctgtatctagccattatggtggggacttggagaacctttgtgtggacactctgtatctagctaatctagtggggacgtggggagactttgtgtctagctcagggattgtaaaggcaccaatcagcaccctgtcaaaacacaccattcaggatctctgtaaaatggaccaatcagcaggatgtgggtggggccaggtaagagaataaaagcaggctgcccaagccagcagtggcaaccagctggagtccccttccacactgtggaagtttgttcttttgctctttgcaataaatcttgttgctgctcactgtttgggtccacactgcctttatgagctgtaacactcaccgagaaggtctgcagcttcactcctgaagccagcgagaccatgaacccaccaggagaaatgaacaactccagacgtgcagccttaagagctgtaacactcaccgtgaaggtctgcagcttcactcctgagccagcgagaccacgaaccccaccagaaggaagaagcttcgaacacatccgaacatcagaaggaaaaaactccagacacgccaactttaagaagtgtaacactcaccaggagggtccgcggcttcattcttgaagtcagtgagacccaccaattctggacac

SEQ ID NO: 855 - DNA, 6115 bp, Homo sapiens
  source 1..6115: mol_type = other DNA
aagatggccaaacaggaacagctccagtctacagctcccagcgtgagcaacacagaagacgaatgatttctgcatttccaactgaggtaccgggtgcatctcaatggggattgttggagagtgggtgcaggacagtgggtgcagtgcacccagcctgagccaaagcagggcgaggcatcacctcacctgggaagtgcaaggggtcagggaattccctttcctaggggtgacggacagcacctggaaaatcaggtcactcccaccctaatactgcgcttttctgatggtcttagcaaacggcacaccaggagattatatcccgcgcatggctcggagggtcctacgcccatggagcctcgctcattgctagcacagcagtctgagatcgaactgcaaggcagcagcaaggctgggggaggggcgcccgccattgctaaggcttgagtaggtaaacaaagctgccaggaagctcaaactgggtgaagcccaccgcagctcaaggaggtctgcctgcctctgtagactccacctctaggggcagagcatagccaaccaaaaggcagcagaaacctctgcagacttaaatgtccctgtctgacagctttgaagagagtagtggttctcccagcacacagctggagatctgagaacagacagactgcctcctcaagtgggtccctgacccccgagcagcctaactgggaggcaccccccagtaggggcagactgacacctcacacggccgggtactcctctgagacaaaacttccagaggaatgatcaggcagcagcatttgcgggtcaccaataccgctgttctgcagcctccactcctgatacccaggcaaacagggtctggagtggacctccggcaaactccaacagacctgcagctgaggatcctgactgtcagaaggaaaactaacaaacagaaaggacatccacaccaaaacccatctgtacatcaccatcatcaaagatcaaaggtagataaaaacacaaagatgggggaaaaacagcagaaaaactgaaaaatctaaaaatcagagcacctctcctcctccaaaggaacgcagctccgcaccagcaacggaaagctggatggagaatgactttgacgagttgagagaagaaggcttcagacgatcaaactactccgagctaaaggaggaagttcgaacccatggcaaagaagttaaaaaccttgaaaaaagattagacaaatggctaactagaataatcaatgcagagaagtccttaaaggacctgatggagctgaagaccatggcacgagaactacgtgatgaatgcacaagcctcagtagccaattcaatcaactggaagaaagggtatcagtgatggaagatcaaatgaatgaaatgaagaaagaagagaagtttagaagaaaaagaataaaaagaaaggaacaaagcctccaagaaatatgggactatgtgaaaagaccaaatctacgtctgattggtgtacctgaaagtgacggggagaatagaacgaagttggaaaacactctgcaggatattatccaggagaacttccccaatctagcaaggcaggccaacattcaaattcaggaaatacagagaacgccacaaagatactcctcgagaagagcaactccaagacacataattgtcagattcaccaaagttgaaatgaaggaaaaaatgttaagggcagccagagagaaaggtcgggttacccacaaacacaaacccatcagactaacagtggatctctcggcagaaactctacaagccagtagagagtgggggccaatattcaacattcttaaagaaaagaattttcaacccagaatttcatttccagccaaactaagcttcataagtgaaggagaaataaaatactttacagacaagcaaatgctgagagattttgtcaccaccaggcctgccctaaaagagctcttgaaggaagcactaaacatggaaaggaacaactggtaccagccactgcaaaaacatgccaaattgtaaagaccatcgaggctaaggagaaactgcatcaactaacgagcaaaataatcagctaacatcataatgacaggatcaaattcacatataaaaatattaaccttaaatgtaaacgggctaaatgctccaattaaaagacacagactggcaaactggatagagtcaagacccatcggtgtgctgtattcaggaaacccatctcacgtgcaaagtaacacataggctcaaaataaagggatggaggaagatctaccaagcaaatggacaacaaaaaaaggcaggggttgcaatcctactctctgataaaacaggctttaaaccaacaaagatcaaaagagacaaagaaggccattacataatggtaaagggatcaattcaacaagaagagctaactatcctaaatatatatgcacccaatacaggagcacccagattcatgaagcaagtctttagagacttacaaagagagttagactcccacacaataataatggaagactttaacaccacactgtcaacactagacagatcaacaggacagaaagttaagaaggatatccaggaattgaactcagctctgcacaaagtggacataatagacatctacagaactctccaccccaaatcaacagaatatacattcttttcagcaccacaccacacctattccaaaattaaccacatagttggaagtaaagcactcctcagcaaatgtaaaagaacagacattataacaaactgtctctcagaccacagtgcaatcaaactagaactcaggattcagaaactcactcaaaaccgctcaactacatggaaactgaacaacctgctcctgaatgactactgggtacataacgaaatgaaggcagaaataaagatgttctttgaaaccaacaagaacaaagacacaacataccagaatctctgggccacattcaaagcaatgtgtagagggaaatttatagcactaaatgcctacaagagaaagcaggaaagatctaacattgacaccctaacatcacaatgaaaagaactagagaagcaggagcaaacacattcaaaagatagcagaaggcaagaaataactaagatcagagcagaactgaaggaaacagagacacaaaaaaacccttcaaaaaaatcaatgaatccaggagctggttttttgaaaagatcaacaaaattgatagaatgctagcaagactaataaagaagaaaagagagaagaatcaaatagatgcaataaaaatgataaaggggatatcaccacccatcccacagaaatacaaactaccatcagagaatactataaacacctctatgcaaataaactagaaaatctagaagaaatggataaattcctcgacacatacactctcccaagactaaaccaggaagaagttgaaactctgaatagaccaataacaggttctgaaattgaggcaataattaatagcttaccaaccaaaaaaagtccaggaccagatggattcaccgccgaattctaccagaggtacaaggaggacctggtaccattctttctgaaactattccaatcaatagaaaaagagggaatcctccctaactcattttatgaggccagcatcatcctgataccaaagcctggcagagacacaaccaaaaaagagaattttagaccaatatccctgatgaacagtgatacaaaaatcctcaataaaatactggcaaaccgaatccagcagcacatcaaaaagcttatccaccatgatcaagtgggcttcatccctgggatgcaaggctggttcaacatacgcaaatcaataaacataatccagcatataaacagaaccaacgacaaaacccacatgattatctcaatagatgcagaaaaggcctttaacaaaattcaacagcccttcatgctaaaaactctgaataaattaggtattgatggaacctatctcaaaataataagagcaaatttatgacaaacccacagccaatatcatactgaatggacaaaaactggaatcattccctttgaaaactggcacaagacagggatgccctctctcaccactcctattcaacatagtgttggaagttctggccagggcaatcaggcaagagaaagaaataaagggtattcaattaggaaaagaggaagtcaaattgtccctgtttgcagatgacatgattgtatatctagaaaaccccatcgtctcagcccaaaatctccttaagctgataaacaacttcagcaaagtatcaggatacaaaatcaatgtgcaaaaatcacaaatattcttatacaccaataacagacaaacagagagccaaatcatgagtgaactcccattcacaattgcttcaaagacaataaaatacctaggaattcaacttacaagggatgtgaaggacctcttcaaggagaattacaaaccactgctcaatgaaataaaagaagatacaaacaaatggaacaacattccatgctcatgggtaggaagaatcaatatcatgaaaatggccatactgcccaaggtaatttatagattcagtgccatcgccatcaagctaccaatgactttcttcacagaactggaaaaaactactttaaagttcatatggaaccaaaaaagagcccgcattgccaagtcaatcctaagccaaaagaacaaagccggaggcatcatgctacctgacttcaaactatactacaaggctacagtaaccaaaacagcatggtactggtaccaaaacagagatattgatcaatggagcagaacagagccctgagaaagaatgccacatatctacaaccatctgatctttgacaaacctgacaaaaacaagcagtggggaaaggattccctatttaataaatggtgctgggaaaactggctagccatatatagaaagctgaaactggatcccttccttacaccttatacaaaaattaattcaagatggattaaagacttacatgttagacctaaaaccataaaaaccctagaagaaaacctaggcaatatcattcaatacagaggcatgggcaaggacttcatgtctaaaacaccaaaagcaatggcaacaaaagccaaaattgacaaatgggatctaatgaaactaaagagcttctgcacagcaaaagaaactaccatcagagtgaacaggcaaccgacagaatgggagaaaatttttgcaacctactcatctgacaaagggctaatatccagaatctacaatgatctcaaacaaatttacaagaaaaaaacacaaccccatcaacaagtgggggaaggatatgaacagacacttctcaaaagacatttatgcagccaatagacacatgaaaaaatgttcatcatcactggccatcaaagaaatgcaaatcaaaaccacaatgagataccatctcacgccagttagaatggcgatcattaaaaagtcaggaaacaacaggtgctggagaggatgtggagaaaacaggaacacttttacactgttggtgggactgtaaactagttcaaccattgtggaagtcagtgtggtgattcctcagggatctagaactagaaataccatttgacccagccatcccattactgggtatatacccaaaggattataaatcatcctgctataaacacacatgcacacttatgtttattgcagcactattcacaatagcaaagacttggaaccaacccaaatgtccaataatgatagactggattaagaaaatgtggcacatatacaccatggaatgctatgcagccataaaaaatgatgagttcatgtcctttgtagagacatggatgaagctggaaaccatcattctcagcaaactatggcaaggacaaaaaaccaaacactgtatgttctcactcgtaggtgggaattgaacaatgagaacacatggacacaggaaggggaatatcacacactggggcctgttttggggtgggaggagtggggagggatagcattaggagatataccgaatgttaaatgacgagttaatgggtgcagcacaccaacatggcataggtatacatatgtaacaaacctgcacgttgtgtacatgtaccctaaaacttaaagtataaaaaaaaaa

SEQ ID NO: 856 - DNA, 4210 bp, Homo sapiens
  source 1..4210: mol_type = other DNA
ttccctgggtggcaagtaccatctcccctctctccatgtctctaccttctcttttctctgggcttgcccccttcactatgggcaaccttccagcctccactccctcttcttctcccttagcctgtgttcttcaaaacctaaaaccccctttgactaacacctgacctaaaacctaaatgccttattttcttctgcaataccgcttggcctcaatacaaactggacaatggttccaaatagccagaaaatgacacttttgatttctcgatcttataagacctggatgatttttgttgaaaaatgggcaaatggtctgaggtgcctgacatccaggcattcttttatacatcagtctctccctagtctctgctcccagtgtgactcatcccaaatctttcttctttctctcctgtctctttcttcagtctccaccctaagctctgagtcctttgaatcctccttttctatgaacccatctgacctctcccctccccaccaggctgctcctcaccaggccaagccaggtcccaattcttcctcatcctctgctcccccaccctataatagaagtatcacctcccctcctcacacccactccaccttacagtttcattccgagactagccctcctccacctgcccaacaattttctcttagtcaggtggctggagctgaaggcatagtcaaggtacatgtgcctttttctctatcgacctctcccagatcagtcagcgtttaggctctttttcatcagaccccactaaatatatacaggaattccaatatttaactcagtcctgcgatttaacctggagtgactgaaatgtcatcctgacctcccccctctccccagatgagcaggaaagagttgataccctagcccaatctcacactgacacccaccagtgccatgagccagaccttcaagaaggcatcagggcagttccccaagagcatccccattggcagtacaagatggactccccaggtatagctaggtgagattacatggtctcctgcctagtcaaggggttcaaaaaagcagcatacaaggctgttaattatgacaagctaaaggaaactacccaaggtaaagatgaaaacccagcccagttcatggcccacttagcacctaccattagatgcttcacagccctggacccagaggggccagaaggccgccttatccttaatatgcattttatgacccaatcctctcctgacattagaaaaaatctccaaaaattggattccaggcctcaaaccccacaacaggacttaaatagcctcaccttcaaggtgtatcataatagagaagaggcggccaagtgacaatgcatctctgaattatagctacttgcctccagtgtaagacaacccaagaccatgtctccagcatacaaaaccttcagaacatccaagccacagctcccaggggctccttcaaaacctcctcatggaccttgcttcaaatgccaaaagcctggccactgggcctcagaaggcccacagcctgggattcctcctaagccgtgccctgtctgtgtgggctccaattagaggttggactgtctgactcacatcgccactgctcctaaagttcctggagctcaaacccaatgtttcttggctgactccttcccagatctccttggcttagtggctgaagactgatgctacccgatcacctcggaagccccccggagaatcacggatgccaaacttcaggtaactcttacagcagagggtaagtccatcccctgtgtaatcgataggggggatacccactccacactaccttcttttcaagggcctgcttcccttgcccccataactgttgtgggtattgacggccaggtttctaaacctcttaaaactccccaactttggtgccaaattgggcaacattcttttatgcactcctttttagttatccccacctgccagttcccttattaggctgagatattttaaccaaattatctgcttctctgactattcctggactacagctacatctcattgccatccttcttcccaacccaaagcctccttcgtgtcttcctcttgtatccccccaccttaacccacaggtatgggacacctctactccctccctggcaactgatcacatgcccattactatcccattaaagcctaatcacccttacccagcttaacgccagtatcccatcccacaagaggctttaaggagattgaagcctgttatcactcacctgctacagcatgggcttctaaagcctacaaactctccttataattcccccatcttacctgtctaaaaaccagacaagtcttacaggtttgttcaggatctgcgccttatcaacaaaattgttttcctatccaccctgtggtgcccaacccgtacactcttttgttctcaatatctccctccacaactcactattccattcttgatcttaaagatgcttttttcactattcccctgcaccacacatcccagcctctctttgcttttacctaaactgaccctgacacccatcagtcccagcagcttacctgggctgtactgccacaaggcttctgggacagccctcattacttcagccaagctctctctcatgatttactttcttcccatccctctgcttcccacattattcaatatattgatgaccttctactctgtagtccctcctttgagtcttttcaacaagataccctcctgctccttcaacatttactctccaaaggatatcgggtatccccctccaaagctcaaatttcttctccatccgttacgtacctcagcataattcttcatgaaaacacatggggtctccctgctgatcatgtctggctgatctctgaaaccccaaccccttctacaaaacaactcctttccttcctgggcatggttggatacttttgcctttggatacctggttttgccatcctaacaaaaccattatataaactcacaaagggaaacctagctgaccccataagtcctaaatcctttcctcactcctctttccattccttgaagacagctctagaggctgttcccatactagctcttcctgactcatcccaactcttttcattacacacagccaaagtgcagggctgtgcagctggaattcttacacaaggactgggaccgtgctctgtagcctttttgtccaaacaacttgaccttactgttttaggctggtcatcatgtctctgtgcagtggctgccaccaccctaatacttttagaagccctcaaaatcacaaactatgctcaactcactccatacagttctcataacttccaaaatatatttccttcctcacacctgatgcatatactttctgttccccagctcctttagcaatacccactctctgttgagtctcccacaattaccattgtacctggcctgggcttcagtctggcctcccacattattcctgataccacaccttatccccatgactgtatctctctgatccatctgacattcactctatttccccatatttccttctttcctgtttttcacctgaatcacagttagtttattgatggcagttccaccaggcctaatcaccactcaccagcaaaggcaggctgtgctatattatcttccacatctatcattgaggctactgctctgcccccctccactatctctcagcaagccaaactcattgccttaacttggggcctcactcttgcaaagggactacacatcaatatttatactgactctaaatgctgtccatatcctgcaccaccatgctgtaatatgggctgaaagaagtttcttcactatgcaagtgtcctccatcattaatgcctctttaataaaaattcttctcaaggccactttacttccaaaaaaagctggagtcattcactgcaaaggccatcaaagggcctcagaccccattgctcaaggcaacaattatgctgataagacagctaaagaagcaaccagtattcctacttctgtccctcatggccagtttttctccttctcatcagtcactcctatttactctcccactgaagtttccatctatcaatccctccccactcaaggaagatggttcttagaccaagaaaaatatctccttccagtctcacaggcccattctattctgttgtcatttcatgacctcttccatgtaggttacaagcaactagccccctcctagaacttctcatttccctt

SEQ ID NO: 857 - DNA, 1072 bp, Homo sapiens
  source 1..1072: mol_type = other DNA
atttttaaaataatatgaacagtggcaacaaaagccaaaattgacaaattggatctaattaaactaaagagcttctgcacagcaaaggaaactaccatcagagtgaacaggcaacccacaaaatgggagaaaattttcgcaacctactcatctgacaaagggctaatatccagaatctacaatgaactcaaacaaatttacaagaaaaaaacaaacaaccccatcaaaaagtggacgaaggacatgaacagacacttctcgaaagaagacaaaatggtttggtttatgcagccaaaaaacacatgaaaaaatgctcaccatcactggccatcagagaaatgcaaatcaaaaccacagtgagataccatctcacaccagttagaatggcaatcattaaaaagtcaggaaacaacaggtgctggagaggatgtggagaaataggaacacttttacactgttggtgggactgtaaactagttcaacccttgtggaagtcagtgtggcgattcctcagggatctagaactagaaataccatttgacccagccatcccattactgggtatatacccaaaggactataaatcatgctgctataaagacacatgcacacatatgtttattgcggcattattcacaatagcaaagacttggaaccaaccccaatgtccaacaatgatagcctggattaagaaaatgtggcacatatataccatggaatactatgcagccataaaaaatgatgagttcatatcctttgtagggacatggatgaaattggaaatcatcattctcagtaaactatcgcaagaacaaaaaaccaaacaccgcatattctcactcataggtgggaattgaacagtgagaacacatggacacaggaaggggaacatcacactctggggactgttgtggggtggggggaggggggagggatagcattgggagatatacctaatgctagatgacgagttagtgggtgcagcgcaccagcatggcacatgtatacatatgtaactaaactgcacattgtgcacctgtaccctaaaacttaaagtattaaaaaaaaaaaa

SEQ ID NO: 858 - DNA, 6002 bp, Homo sapiens
  source 1..6002: mol_type = other DNA
gcgtgagcgacgcagaagacggtgatttctgcatttccatctgaggtaccgggttcatctcactagggagtgccagacagtgggcgcaggccagtgtgtgtgcgcaccgtgcgcgagccgaagcagggcgaggcattgcctcacctgggaagcgcaaggggtcagggagttccctttccgagtcaaagaaaggggtgacggacgcacctggaaaatcgggtcactcccacccaaatattgcgcttttcagaccggcttaagaaacggcgcaccacgagactatatcccacacctggctcggagggtcctacgcccacggaatctcgctgattgctagcacagcagtctgagatcaaactgcaaggcggcaacgaggctgggggaggggcgcccgccattgcccaggcttgcttaggtaaacaaagcagccgggaagctcaaactgggtggagcccaccacagctcaaggaggcctgcctgcctctgtaggctccacctctgggggcagggcacagacaaacaaaaagacagcagtaacctctgcagacttaagtgtccctgtctgacagctttgaagagagcagtggttctcccagcacgcagctggagatctgagaacgggcagactgcctcctcaagtgggtccctgactcctgacccccgagcagcctaactgggaggcaccccccagcaggggcacactgacacctcacacggcagggtattccaacagacctgcagctgagggtcctgtctgttagaaggaaaactaacaaccagaaaggacatctacaccgaaaacccatctgtacatcaccatcatcaaagaccaaaagtagataaaaccacaaagatggggaaaaaacagaacagaaaaactggaaactctaaaacgcagagcgcctctcctcctccaaaggaacgcagttcctcaccagcaacagaacaaagctggatggagaatgattttgatgagctgagagaagaaggcttcagacgatcaaattactctgagctacgggaggacattcaaaccaaaggcaaagaagttgaaaactttgaaaaaaatttagaagaatgtataactagaataaccaatacagagaagtgcttaaaggagctgatggagctgaaaaccaaggctcgagaactacgtgaagaatgcagaagcctcaggagccgatgcgatcaactggaagaaagggtatcagcaatggaagatgaaatgaatgaaatgaagcgagaagggaagtttagagaaaaaagaataaaaagaaatgagcaaagcctccaagaaatatgggactatgtgaaaagaccaaatctacgtctgattggtgtacctgaaagtgatgtggagaatggaaccaagttggaaaacactctgcaggatattatccaggagaacttccccaatctagcaaggcaggccaacgttcagattcaggaaatacagagaacgccacaaagatactcctcgagaagagcaactccaagacacataattgtcagattcaccaaagttgaaatgaaggaaaaaatgttaagggcagccagagagaaaggtcgggttaccctcaaaggaaagcccatcagactaacagcggatctctcggcagaaaccctacaagccagaagagagtgggggccaatattcaacattcttaaagaaaagaattttcaacccagaatttcacatccagccaaactaagcttcataagtgaaggagaaataaaatactttatagacaagcaaatgttgagagattttgtcaccaccaggcctgccctaaaagagctcctgaaggaagcgctaaacatggaaaggaacaaccggtaccagccgctgcaaaaccatgccaaaatgtaaagaccatcgagactaggaagaaactgcatcaactaatgagcaaaatcaccagctaacatcataatgacaggatcaaattcacacataacaatattaactttaaatataaatggactaaattctgcaattaaaagacacagactggcaagttggataaagagtcaagacccatcagtgtgctgtattcaggaaacccatctcacgtgcagagacacacataggctcaaaataaaaggatggaggaagatctaccaagccaatggaaaacaaaaaaaggcaggggttgcaatcctagtctctgataaaacagactttaaaccaacaaagatcaaaagagacaaagaaggccattacataatggtaaagggatcaattcaacaagaggagctaactatcctaaatatttatgcacccaatacaggagcacccagattcataaagcaagtcctcagtgacctacaaagagacttagactcccacacattaataatgggagactttaacaccccactgtcaacattagacagatcaacgagacagaaagtcaacaaggatacccaggaattgaactcagctctgcaccaagcagacctaatagacatctacagaactctccaccccaaatcaacagaatatacatttttttcagcaccacaccacacctattccaaaattgaccacatagttggaagtaaagctctcctcagcaaatgtaaaagaacagaaattataacaaactatctctcagaccacagtgcaatcaaactagaactcaggattaagaatctcactcaaagccgctcaactacatggaaactgaacaacctgctcctgaatgactactgggtacataacgaaatgaaggcagaaataaagatgttctttgaaaccaacgagaacaaagacaccacataccagaatctctgggacgcattcaaagcagtgtgtagagggaaatttatagcactaaatgcctacaagagaaagcaggaaagatccaaaattgacaccctaacatcacaattaaaagaactagaaaagcaagagcaaacacattcaaaagctagcagaaggcaagaaataactaaaatcagagcagaactgaaggaaatagagacacaaaaaacccttcaaaaaatcaatgaatccaggagctggttttttgaaaggatcaacaaaattgatagaccgctagcaagactaataaagaaaaaaagagagaagaatcaaatagacacaataaaaaatgataaaggggatatcaccaccgatcccacagaaatacaaactaccatcagagaatactacaaacacctctacgcaaataaactagaaaatctagaagaaatggatacattcctcgacacatacactctcccaagactaaaccaggaagaagttgaatctctgaatcgaccaataacaggctctgaaattgtggcaataatcaatagtttaccaaccaaaaagagtccaggaccagatggattcacagccgaattctaccagaggtacaaggaggaactggtaccattccttctgaaactattccaatcaatagaaaaagagggaatcctccctaactcattttatgaggccagcatcattctgataccaaagccgggcagagacacaaccaaaaaagagaattttagaccaatatccttgatgaacattgatgcaaaaatcctcaataaaatactggcaaaccgaatccagcagcacatcaaaaagcttatccaccatgatcaagtgggcttcatccctgggatgcaaggctggttcaatatacgcaaatcaataaatgtaatccagcatataaacagagccaaagacaaaaaccacatgattatctcaatagatgcagaaaaagcctttgacaaaattcaacaacccttcatgctaaaaactctcaataaattaggtattgatgggacgtatttcaaaataataagagctatctatgacaaacccacagccaatatcatactgaatgggcaaaaactggaagcattccctttgaaaaccggcacaagacagggatgccctctctcaccgctcctattcaacatagtgttggaagttctggccagggcaatcaggcaggagaaggaaataaagggtattcaattaggaaaagaggaagtcaaattgtccctgtttgcagacgacatgattgtttatctagaaaaccccatcgtctcagcccaaaatctccttaagctgataagcaacttcagcaaagtctcaggatacaaaatcaatgtacaaaaatcacaagcattcttatacaccaacaacagacaaacagagagccaaatcatgggtgaactcccattcacaattgcttcaaagagaataaaatacctaggaatccaacttacaagggatgtgaaggacctcttcaaggagaactacaaaccactgctcaaggaaataaaagaggagacaaacaaatggaagaacattccatgctcatgggtaggaagaatcaatatcgtgaaaatggccatactgcccaaggtaatttacagattcaatgccatccccatcaagctaccaatgactttcttcacagaattggaaaaaactactttaaagttcatatggaaccaaaaaagagcccgcattgccaagtcaatcctaagccaaaagaacaaagctggaggcatcacactacctgacttcaaactatactacaaggctacagtaaccaaaacagcatggtactggtaccaaaacagagatatagatcaatggaacagaacagagccctcagaaataatgccgcatatctacaactatctgatctttgacaaacctgagaaaaacaagcaatggggaaaggattccctatttaataaatggtgctgggaaaactggctagccatatgtagaaagctgaaactggatcccttccttacaccttatacaaaaatcaattcaagatggattaaagatttaaacgttaaacctaaaaccataaaaaccctagaagaaaacctaggcattaccattcaggacataggcgtgggcaaggacttcatgtccaaaacaccaaaagcaatggcaacaaaagacaaaattgacaaatgggatctaattaaactaaagagcttctgcacagcaaaagaaactaccatcagagtgaacaggcaacctacaacatgggagaaaatttttgcaacctactcatctgacaaagggctaatatccagaatctacaatgaactcaaacaaatttacaagaaaaaaacaaacaaccccatcaaaaagtgggcgaaggacatgaacagacacttctcaaaagaagacatttatgcagccaaaaaacacatgaagaaatgctcatcatcactggccatcagagaaatgcaaatcaaaaccactatgagatatcatctcacaccagttagaatggcaatcattaaaaagtcaggaaacaacaggtgctggagaggatgtggagaaataggaacacttttacactgttggtgggactgtaaactagttcaaccattgtggaagtcagtgtggcgattcctcagggatctagaactagaaataccatttgacccagccatcccattactgggtatatacccaaatgagtttaaatcatgctgctataaagacacatgcacacgtatgtttattgcggcactattcacaatagcaaagacttggaaccaacccaaatgtccaacaatgatagactggattaagaaaatgtggcacatatacaccatggaatactatgcagccataaaaaatgatgagttcatatcctttgtagggacatggatgaaattggaaaccatcattctcagtaaactatcgcaagaacaaaaaaccaaacaccgcatattctcactcataggtgggaattgaacaatgagatcacatggacacaggaaggggaatatcacactctggggactgtggtggggtcgggggaggggggagggatagcattgggagatatacctaatgctagatgacacattagtgggtgcagcgcaccagcatggcacatgtatacatatgtaactaacctgcacaatgtgcacatgtaccctaaaacttagagtataataaaaaaaaaaaaaaaaaaaaaaaaaaaaaaaaaaaa

SEQ ID NO: 859 - DNA, 6030 bp, Homo sapiens
  source 1..6030: mol_type = other DNA
gagggaggagccaagatggccgaataggaacagctccggtctacagctcccagcgtgagcgacgcagaagacggtgatttctgcatttccatctgaggtaccgggttcatctcactagggagtgccagacagtgggcgcaggccagtgtgtgtgcgcaccgtgcgcgagccgaagcagggcgaggcattgcctcacctgggaagcgcaaggggtcagggagttccctttccgagtcaaagaaaggggtgacggacgcacctggaaaatcgggtcactcccacccgaatattgcgcttttcagaccggcttaagaaacggcgcaccatgagactatatcccacacctggctcggagggtcctacgcccacggaatctcgctgattgctagcacagcagtctgagatcaaactgcaaggcggcaacgaggctgggggaggggcgcccgccattgcccaggcttgcttaggtaaacaaagcagccgggaagctcgaactgggtggagcccaccacagctcaaggaggcctgcctgcctctgtaggctccacctctgggggcagggcacagacaaacaaaaagacagcagtaacctctgcagacttaagtgtccctgtctgacagctttgaagagagcagtggttctcccaggaggcagctggagatctgagaacgggcagactgcctcctcaagtgggtccctgactcctgacccccgagcagcctaactgggaggcaccccccagcaggggcacactgacacctcacacggcagggtattccaacagacctgcagctgagggtcctgtctgttagaaggaaaactaacaaccagaaaggacatctacaccgaaaacccatctgtacatcaccatcatcaaagaccaaaagtagataaaaccacaaagatggggaaaaaacagaacagaaaaactggaaactctaaaacgcagagcgcctctcctcctccaaaggaacgcagttcctcaccagcaacagaacaaagctggatggagaatgattttgacgagctgagagaagaaggcttcagacgatcaaattactctgagctacgggaggacattcaaaccaaaggcaaagaagttgaaaactttgaaaaaaatttagaagaatgtataactagaataaccaatacagagaagtgcttaaaggagctgatggagctgaaaaccaaggctcgagaactacgtgaagaatgcagaagcctcaggagccgatgcgatcaactggaagaaagggtatcagcaatggaagatgaaatgaatgaaatgaagcgagaagggaagtttagagaaaaaagaataaaaagaaatgagcaaagcctccaagaaatatgggactatgtgaaaagaccaaatctacgtctgattggtgtacctgaaagtgatgtggagaatggaaccaagttggaaaacactctgcaggatattatccaggagaacttccccaatctagcaaggcaggccaacgttcagattcaggaaatacagagaacgccacaaagatactcctcgagaagagcaactccaagacacataattgtcagattcaccaaagttgaaatgaaggaaaaaatgttaagggcagccagagagaaaggtcgggttaccctcaaaggaaagcccatcagactaacagcggatctctcggcagaaaccctacaagccagaagagagtgggggccaatattcaacattcttaaagaaaagaattttcaacccagaatttcatatccagccaaactaagcttcataagtgaaggagaaataaaatactttatagacaagcaaatgttgagagattttgtcaccaccaggcctgccctaaaagagctcctgaaggaagcgctaaacatggaaaggaacaactggtaccagccgctgcaaaatcatgccaaaatgtaaagaccatcgagactaggaagaaactgcatcaactaatgagcaaaatcaccagctaacatcataatgacaggatcaaattcacacataacaatattaactttaaatataaatggactaaattctgcaattaaaagacacagactggcaagttggataaagagtcaagacccatcagtgtgctgtattcaggaaacccatctcacgtgcagagacacacataggctcaaaataaaaggatggaggaagatctaccaagccaatggaaaacaaaaaaaggcaggggttgcaatcctagtctctgataaaacagactttaaaccaacaaagatcaaaagagacaaagaaggccattacataatggtaaagggatcaattcaacaagaggagctaactatcctaaatatttatgcacccaatacaggagcacccagattcataaagcaagtcctcagtgacctacaaagagacttagactcccacacattaataatgggagactttaacaccccactgtcaacattagacagatcaacgagacagaaagtcaacaaggatacccaggaattgaactcagctctgcaccaagcagacctaatagacatctacagaactctccaccccaaatcaacagaatatacatttttttcagcaccacaccacacctattccaaaattgaccacatagttggaagtaaagctctcctcagcaaatgtaaaagaacagaaattataacaaactatctctcagaccacagtgcaatcaaactagaactcaggattaagaatctcactcaaagccgctcaactacatggaaactgaacaacctgctcctgaatgactactgggtacataacgaaatgaaggcagaaataaagatgttctttgaaaccaacgagaacaaagacaccacataccagaatctctgggacgcattcaaagcagtgtgtagagggaaatttatagcactaaatgcctacaagagaaagcaggaaagatccaaaattgacaccctaacatcacaattaaaagaactagaaaagcaagagcaaacacattcaaaagctagcagaaggcaagaaataactaaaatcagagcagaactgaaggaaatagagacacaaaaaacccttcaaaaaatcaatgaatccaggagctggttttttgaaaggatcaacaaaattgatagaccgctagcaagactaataaagaaaaagagagagaagaatcaaatagacacaataaaaaatgataaaggggatatcaccaccgatcccacagaaatacaaactaccatcagagaatactacaaacacctctacgcaaataaactagaaaatctagaagaaatggatacattcctcgacacatacactctcccaagactaaaccaggaagaagttgaatctctgaatagaccaataacaggctctgaaattgtggcaataatcaatagtttaccaaccaaaaagagtccaggaccagatggattcacagccgaattctaccagaggtacatggaggaactggtaccattccttctgaaactattccaatcaatagaaaaagagggaatcctccctaactcattttatgaggccagcatcattctgataccaaagccgggcagagacacaaccaaaaaagagaattttagaccaatatccttgatgaacattgatgcaaaaatcctcaataaaatactggcaaaccgaatccagcagcacatcaaaaagcttatccaccatgatcaagtgggcttcatccctgggatgcaaggctggttcaatatacgcaaatcaataaatgtaatccagcatataaacagagccaaagacaaaaaccacatgattatctcaatagatgcagaaaaagcctttgacaaaattcaacaacccttcatgctaaaaactctcaataaattaggtattgatgggacgtatttcaaaataataagagctatctatgacaaacccacagccaatatcatactgaatgggcaaaaactggaagcattccctttgaaaaccggcacaagacagggatgccctctctcaccgctcctattcaacatagtgttggaagttctggccagggcaatcaggcaggagaaggaaataaagggtattcaattaggaaaagaggaagtcaaattgtccctgtttgcagatgacatgattgtttatctagaaaaccccatcgtctcagcccaaaatctccttaagctgataagcaacttcagcaaagtctcaggatacaaaatcaatgtacaaaaatcacaagcattcttatacaccaacaacagacaaacagagagccagatcatgggtgaactcccattcacaattgcttcaaagagaataaaatacctaggaatccaacttacaagggatgtgaaggacctcttcaaggagaactacaaaccactgctcaaggaaataaaagaggagacaaacaaatggaagaacattccatgctcatgggtaggaagaatcaatatcgtgaaaatggccatactgcccaaggtaatttacagattcaatgccatccccatcaagctaccaatgactttcttcacagaattggaaaaaactactttaaagttcatatggaaccaaaaaagagcccgcattgccaagtcaatcctaagccaaaagaacaaagctggaggcatcacactacctgacttcaaactatactacaaggctacagtaacccaaacagcatggtactggtaccaaaacagagatatagatcaatggaacagaacagagccctcagaaataatgccgcatatctacaactatctgatctttgacaaacctgagaaaaacaagcaatggggaaaggattccctatttaataaatggtgctgggaaaactggctagccatatgtagaaagctgaaactggatcccttccttacaccttatacaaaaatcaattcaagatggattaaagatttaaacgttaaacctaaaaccataaaaaccctagaagaaaacctaggcattaccattcaggacataggcgtgggcaaggacttcatgtccaaaacaccaaaagcaatggcaacaaaagacaaaattgacaaatgggatctaattaaactaaagagcttctgcacagcaaaagaaactaccatcagagtcaacaggcaacctacaacatgggagaaaatttttgcaacctactcatctgacaaagggctaatatccagaatctacaatgaactcaaacaaatttacaagaaaaaaacaaacaaccccatcaaaaagtgggcgaaggacatgaacagacacttctcaaaagaagacatttatgcagccaaaaaacacatgaagaaatgctcatcatcactggccatcagagaaatgcaaatcaaaaccactatgagatatcatctcacaccagttagaatggcaatcattaaaaagtcaggaaacaacaggtgctggagaggatgcggagaaataggaacacttttacactgttggtgggactgtaaactagttcaaccattgtggaagtcagtgtggcgattcctcagggatctagaactagaaataccatttgacccagccatcccattactgggtatatacccaaatgagtataaatcatgctgctataaagacacatgcacacgtatgtttattgcggcactattcacaatagcaaagacttggaaccaacccaaatgtccaacaatgatagactggattaagaaaatgtggcacatatacaccatggaatactatgcagccataaaaaatgatgagttcatatcctttgtagggacatggatgaaattggaaaccatcattctcagtaaactatcgcaagaacaaaaaaccaaacaccgcatattctcactcataggtgggaattgaacaatgagatcacatggacacaggaaggggaatatcacactctggggactgtggtggggtcgggggaggggggagggatagcattgggagatatacctaatgctagatgacacattagtgggtgcagcgcaccagcatggcacatgtatacatatgtaactaacctgcacaatgtgcacatgtaccctaaaacttagagtataataaaaaaaaaaaa

SEQ ID NO: 860 - DNA, 6029 bp, Homo sapiens
  source 1..6029: mol_type = other DNA
ggggaggagccaagatggccgaataggaacagctccggtctacagctcccagcgtgagcgacgcagaagacggtgatttctgcatttccatctgaggtaccgggttcatctcactagggagtgccagacagtgggcgcaggccagtgtgtgtgcgcaccgtgcgcgagccgaagcagggcgaggcattgcctcacctgggaagcgcaaggggtcagggagttccctttccgagtcaaagaaaggggtgacggacgcacctggaaaatcgggtcactcccacccgaatattgcgcttttcagaccggcttaagaaacggcgcaccacgagaccatatcccacacctggctcggagggtcctacgcccacggaatctcgctgattgctagcacagcagtctgagatcaaactgcaaggcggcaacgaggctgggggaggggcgcccgccattgcccaggcttgcttaggtaaacaaagcagccgggaagctcgaactgggtggagcccaccacagctcaaggaggcctgcctgcctctgtaggctccacctctgggggcagggcacagacaaacaaaaagacagcagtaacctctgcagacttaagtgtccctgtctgacagctttgaagagagcagtggttctcccagcacgcagctggagatctgagaacgggcagactgcctcctcaagtgggtccctgactcctgacccccgagcagcctaactgggaggcaccccccagcaggggcacactgacacctcacacggcagggtattccaacagacctgcagctgagggtcctgtctgttagaaggaaaactaacaaccagaaaggacatctacaccgaaaacccatctgtacatcaccatcatcaaagaccaaaagtagataaaaccacaaagatggggaaaaaacagaacagaaaaactggaaactctaaaacgcagagcgcctctcctcctccaaaggaacgcagttcctcaccagcaacagaacaaagctggatggagaatgattttgacgagctgagagaagaaggcttcagacgatcaaattactctgagctacaggaggacattcaaaccaaaggcaaagaagttgaaaactttgaaaaaaatttagaagaatgtataactagaataaccaatacagagaagtgcttaaaggagctgatggagctgaaaaccaaggctcgagaactacgtgaagaatgcagaagcctcaggagccgatgcgatcaactggaagaaagggtatcagcaatggaagatgaaatgaatgaaatgaagcgagaagggaagtttagagaaaaaagaataaaaagaaatgagcaaagcctccaagaaatatgggactatgtgaaaagaccaaatctacgtctgattggtgtacctgaaagtgatgtggagaatggaaccaagttggaaaacactctgcaggatattatccaggagaacttccccaatctagcaaggcaggccaacgttcagattcaggaaatacagagaacgccacaaagatactcctcgagaagagcaactccaagacacataattgtcagattcaccaaagttgaaatgaaggaaaaaatgttaagggcagccagagagaaaggtcgggttaccctcaaagggaagcccatcagactaacagcggatctctcggcagaaaccctacaagccagaagagagtgggggccaatattcaacattcttaaagaaaagaattttcaacccagaatttcatatccagccaaactaagcttcataagtgaaggagaaataaaatactttatagacaagcaaatgttgagagattttgtcaccaccaggcctgccctaaaagagctcctgaaggaagcgctaaacatggaaaggaacaaccggtaccagccgctgcaaaatcatgccaaaatgtaaagaccatcgagactaggaagaaactgcatcaactaatgagcaaaatcaccagctaacatcataatgacaggatcaaattcacacataacaatattaactttaaatataaatggactaaattctgcaattaaaagacacagactggcaagttggataaagagtcaagacccatcagtgtgctgtattcaggaaacccatctcacgtgcagagacacacataggctcaaaataaaaggatggaggaagatctaccaagccaatggaaaacaaaaaaaggcaggggttgcaatcctagtctctgataaaacagactttaaaccaacaaagatcaaaagagacaaagaaggccattacataatggtaaagggatcaattcaacaagaggagctaactatcctaaatatttatgcacccaatacaggagcacccagattcataaagcaagtcctcagtgacctacaaagagacttagactcccacacattaataatgggagactttaacaccccactgtcaacattagacagatcaacgagacagaaagtcaacaaggatacccaggaattgaactcagctctgcaccaagcagacctaatagacatctacagaactctccaccccaaatcaacagaatatacatttttttcagcaccacaccacacctattccaaaattgaccacatagttggaagtaaagctctcctcagcaaatgtaaaagaacagaaattataacaaactatctctcagaccacagtgcaatcaaactagaactcaggattaagaatctcactcaaagccgctcaactacatggaaactgaacaacctgctcctgaatgactactgggtacataacgaaatgaaggcagaaataaagatgttctttgaaaccaacgagaacaaagacacaacataccagaatctctgggacgcattcaaagcagtgtgtagagggaaatttatagcactaaatgcctacaagagaaagcaggaaagatccaaaattgacaccctaacatcacaattaaaagaactagaaaagcaagagcaaacacattcaaaagctagcagaaggcaagaaataactaaaatcagagcagaactgaaggaaatagagacacaaaaaacccttcaaaaaatcaatgaatccaggagctggttttttgaaaggatcaacaaaattgatagaccgctagcaagactaataaagaaaaaaagagagaagaatcaaatagacacaataaaaaatgataaaggggatatcaccactgatcccacagaaatacaaactaccatcagagaatactacaaacacctctacgcaaataaactagaaaatctagaagaaatggatacattcctcgacacatacactctcccaagactaaaccaggaagaagttgaatctctgaatcgaccaataacaggctctgaaattgtggcaataatcaatagtttaccaaccaaaaagagtccaggaccagatggattcacagccgaattctaccagaggtacaaggaggaactggtaccattccttctgaaagtattccaatcaatagaaaaagagggaatcctccctaactcattttatgaggccagcatcattctgataccaaagccgggcagagacacaaccaaaaaagagaattttagaccaatatccttgatgaacattgatgcaaaaatcctcaataaaatactggcaaaccgaatccagcagcacatcaaaaagcttatccaccatgatcaagtgggcttcatccctgggatgcaaggctggttcaatatacgcaaatcaataaatgtaatccagcatataaacagagccaaagacaaaaaccacatgattatctcaatagatgcagaaaaagcctttgacaaaattcaacaacccttcatgctaaaaactctcaataaattaggtattgatgggacgtatttcaaaataataagagctatctatgacaaacccacagccaatatcatactgaatgggcaaaaactggaagcattccctttgaaaaccggcacaagacagggatgccctctctcaccgctcctattcaacatagtgttggaagttctggccagggcaatcaggcaggagaaggaaataaagggtattcaattaggaaaagaggaagtcaaattgtccctgtttgcagacgacatgattgtttatctagaaaaccccatcgtctcagcccaaaatctccttaagctgataagcaacttcagcaaagtctcaggatacaaaatcaatgtacaaaaatcacaagcattcttatacaccaacaacagacaaacagagagccaaatcatgggtgaactcccattcacaattgcttcaaagagcataaaatacctaggaatccaacttacaagggatgtgaaggacctcttcaaggagaactacaaaccactgctcaaggaaataaaagaggagacaaacaaatggaagaacattccatgctcatgggtaggaagaatcaatatcgtgaaaatggccatactgcccaaggtaatttacagattcaatgccatccccatcaagctaccaatgactttcttcacagaattggaaaaaactactttaaagttcatatggaaccaaaaaagagcccacattgccaagtcaatcctaagccaaaagaacaaagctggaggcatcacactacctgacttcaaactatactacaaggctacagtaaccaaaacagcatggtactggtaccaaaacagagatatagatcaatggaacagaacagagccctcagaaataatgccgcatatctacaactatctgatctttgacaaacctgagaaaaacaagcaatggggaaaggattccctatttaataaatggtgctgggaaaactggctagccatatgtagaaagctgaaactggatcccttccttacaccttatacaaaaatcaattcaagatggattaaagatttaaacgttaaacctaaaaccataaaaaccctagaagaaaacctaggcattaccattcaggacataggcgtgggcaaggacttcatgtccaaaacaccaaaagcaatggcaacaaaagacaaaattgacaaatgggatctaattaaactaaagagcttctgcacagcaaaagaaactaccatcagagtgaacaggcaacctacaacatgggagaaaatttttgcaacctactcatctgacaaagggctaatatccagaatctacaatgaactcaaacaaatttacaagaaaaaaacaaacaaccccatcaaaaagtgggcgaaggacatgaacagacacttctcaaaagaagacatttatgcagccaaaaaacacatgaagaaatgctcatcatcactggccatcagagaaatgcaaatcaaaaccactatgagatatcatctcacaccatttagaatggcaatcattaaaaagtcaggaaacaacaggtgctggagaggatgcggagaaataggaacacttttacactgttggtgggactgtaaactagttcaaccattgtggaagtcagtgtggcgattcctcagggatctagaactagaaataccatttgacccagccatcccattactgggtatatacccaaaggactataaatcatgctgctataaagacacttgcacacgtatgtttattgcggcactattcacaatagcaaagacttggaaccaacccaaatgtccaacaatgatagactggattaagaaaatgtggcacatatacaccatggaatactatgcagccataaaaaatgatgagttcatatcctttgtagggacatggatgaaattggaaaccatcattctcagtaaactatcgcaagaacaaaaaaccaaacaccgcatattctcactcataggtgggaattgaacaatgagatcacatggacacaggaaggggaatatcacactctggggactgtggtggggtcgggggaggggggagggatagcattgggagatatacctaatgctagatgacacattagtgggtgcagcgcaccagcatggcacatgtatacatatgtaactaacctgcacaatgtgcacatgtaccctaaaacttagagtataataaaaaaaaaaaa

SEQ ID NO: 861 - DNA, 4708 bp, Homo sapiens
  source 1..4708: mol_type = other DNA
ggggcagctccaagatagctgaataggaacagctccagtctacagctcccagcatgagcgacacagaagacgactgatttatggatttccaactgaggtaccgggttcatgtcactggggctcgtcggatagtggagacaggacagtaggtgcagcccactgagtgtgagccgaagcagggcgaggcatcacctcacccgggaagtaaggggtcagggaattcactttcctagccaagggaaggggtgacagacagcacctggaaaatcgggtcactcccaccctaatactgcacttttccaacagtcttagcaaacagcacaccaggagattatatcccgcgcatggctccgtgggtcccatgcccacagagcctcactcattgctagcacggcagtctgagatcgaactgcaaggcggcactgaggctggggaaggggtgcccgccattgctgaggcttgagtaggtaaacatagcagccaggaaactcgaactgggtggagcccaccacagctcaaggaggcctgcctgcctctgcagactccacctctgggggcaggacatagccgaacaaaagcagcagaaacctctgcagacttaaaaatgtccctgtctgacagctttgaagacagtagtggttctctcagcatggagtttgagatctgagaacggacagaccctcaagtgggtccctgacccctgagtagcctaactgggaggcacccccaagtaggggcagactgacacctcacatagctgggtactcctctgagacaaaacttccagaggaatgatcaggcagcaacatttgccattcaccaatatccgctgttctgcagcttccgctgctaatacccaggcaaacagggtctggagtggacctccagcaaactccaacagacctgcagctgagggtcctgactgctagaaggaaaactaacaaacagaaaggacatccacaccaaaaccccatctgtacgtcaccatcatcaaagaccaaaggtagataaaaccacaaagatggggaaaaaacagagcagaaaagctgaaaattctaaaaatcagagcacttctcccccttcaaaggaacacagctcctcactagcaagggaacaaagctggacggagaatgactttgacgagttgagagaaggaggcttcagacgattgaacttctccaagctaaaggaggaagttcaaacccatcacaaagaagctaaaaaccttgaaaaaagattagacgaatgcctaactagaataatgagtgtagagaagtccttaaatacctgatggaggtgaaaaccatggcaggagaactacatgacaaatgcacaagtttcagtagccgattcgatcaactggaagaaagagtatcagtgattgaagatcaaatgaatgaaatgaagtgagaagagaaatttagagaaaaaagaggaaaaagaaatgaacaaagcctccaagaaatatgggactatgtgaaaagaccaaatctacgtctgatcgctgtacctgaaagtgacggggagaatggaaccaaggtggaaaacactctgcaggatattatccaggagaacttccccagcctaacaaggtaggccaacattcaaattcaggaaatacagagaatgccacaaagatactcctcaagaagagcagctccaagacaaacaattgtcagattcaccaaagttgaaatgaaggaaaaaatgttaagggcacccagacagaaaagtcgggttacccacaaagggaagcccatctgactaacaacggatctctcggcggaaactccacaagccagaagagagtggaagccaatattcaacattcttgaagaaaagaaatttcaacccagaatttcaaatcctgccaaactaagcttcataagtgaaggagaaataaaatcctttacagacaagcaaatgctgagagattttgtcaccactaggcctgccctacaagacctcctgaaggaagcactaaacatagaaaggaacaaccggtaccagccactgcaaaaacatgacaaattgtaaagaccatcgctgctaggaagaaactgcatcaactaacgagcaaaataaccagctaacatcattatgacaggatcaaattcacacataacaatattaaccttaaatataaatgggctaaatgctccaattaaaagacacaaactggcaaactggataaagagtcaagacccatcagtgtgctgtattcaggagacccatctcacgtgcagagacacacataggctcaaaataaagggatggagaaagatctaccaagcaaatggacaacaaaaaaggcagaggttgcaatcctagtctctgataaaacagactttaaaccaacaaagatcaaaagagacaaagaaggccagtacataatggtaaagggaccaattcaacaagaagagctaactatcctaaatatatatgcacccaatacaggagtacccagattcataaagcaagtccttagagatctacaaagagacttagactcccacacaataataatgggagactgtaacaccccactgtcaacattagacagatcaacgagacagaaagttaacaaggatatccgggaattgaactcagctctgcaccaagtggacctagtagacatctacagaactctccaccccaaatcaacagaatatacattcttctcagcaccacatcacacttaatccaaaattgaccacatagttggaagtaaagcactcctcagcaaatgtaaaagaacagaaattataacaaactgtctctcagaccacagtgcaatcaaactagaactcaggattaagaaactcaatcaaaatcgctcaactacatggaaactgaacaacctgctcctgaatgactactgagtacataactaaatgaaagcagaaataaagatgttctttgaaaccaatgagaacaaagacacaacataccagaatctctgggacacatttaaagcagtgtgtacagggaaatttatagcactaaatgcccacaagagaaagcagggaagaactaaaattgacaccctaacgtcacaattaaaagaactaaagaagcaagagcaaacacattcaaaagccagcagaaggcaagaaataactaagatcagagaagaactgaaggagatagaaacacaaaaaaaccttcaaaaactcaatgaatccaggagctggttttttgaaaagatcaacaaaattgatagactactagccacactaataaagaagaaaacagagaagaatcaaatagacacaataaaaaatgataaaggggatatcaccaccgatcccacagaaatacaaactaccatcagagaatactataaacacctctatgtaaataaactagaaaatctagaagaaatggataaattcctggacacatacaccctcccaagagtaaaccaggaagaagttcaatctctgaatagaccaataacaggctctgaaattgaggcaataattaatagcataccaaccaaaaaaagtccaggaccagatggattcacagccagattctaccagaggtacaaggaggagctggtaccattcattctgaaactgttccaatcaatagaaaaagagggaatcctccctaactcattttatgaggccagcatcgtcctgataccaaagcctggcagagacacaacaaaaaaagagaattttagaccaatatccctgatgaacatcgatgcaaaaatcctcaataaaatactggcaaaccgaatccggcagcacatcaaaaagcttatccaccatgatcaagtgggcttcatccctgggatgcaaggctggttcaacatacacaaatcaataaatgtaatccagcatataaacagaaacaaagacaaaaaccacatgattatctcaatagatgcagaaaaggccttcaacaaaattcaacagcccttcatgttaaaaactctcaataaattaggtattgatgggacgtatctcaaaataataagagctatttatgactaacccacagccaatatcatactgaatgggcaaaaactggaagcattccctttaaaaactggcacaagacagggatgccctctctcaccactgctattcaacccagtgttggaagttctggccagggcaatcaggcaggacaaagaaataaagtgtattcaattaggaaaagaggaagtcaaattgtccctgtttgcagatgacatgattgtatatttagaaaaccccattgtctcagcccaaaatctccttaagctgataagcaacttcagcaaagtctcaggatacaaaatcaatgtgcaaagatcacaagcattcttatacaccaataacggacaaacagagagccaaatcatgagtgaactcccattcacaattgcttcaaagagaataaaatacctaggaatacaacttacaagggatgtgaaggacctcttcaaggagaactacaaaccactgctcaaggaaataaaagaggatacaaacaaatggaagaacattccatgttcatggataggaagaatcaatattgtgaaaatggccatactgcccaaggtaatttatagattcaatgccatccccatcaagctaccaatgactttcttcacagaattggaaaaaactactttaaagttcatatggaaccaaaaaagagcccacattgccaagacaatcctaagccaaaagaacaaagctggaggcat

SEQ ID NO: 862 - DNA, 1315 bp, Homo sapiens
  source 1..1315: mol_type = other DNA
tctacaactatctgatctttgacaaacctgagaaaaacaaacaatggggaaaggattccctgtttaataaatggtgctgggaaaactggctagccatatgtagaaagctgaaactggatcccttccttacaccttatacaaaaatcaattcaagatggattaaagatttaaacgttaaacctaaaaccataaaaaccctagaagaaaacctaggcattaccattcaggacataggcgtgggcaaggacttcatgtccaaaacaccaaaagcaatggcaacaaaagacaaaattgacaaatgggatctaattaaactaaagagcttctgcacagcaaaagaaactaccatcagagtgaacaggcaacctacaacatgggagaaaatttttgcaacctactcatctgacaaagggctaatatccagaatctacaatgaactcaaacaaatttacaagaaaaaaacaaacaaccccatcaaaaagtgggcgaaggacatgaacagacacttctcaaaagaagacatttatgcagccaaaaaacacatgaagaaatgctcatcatcactggccatcagagaaatgcaaatcaaaaccactatgagatatcatctcacaccagttagaatggcaatcattaaaaagtcaggaaacaacaggtgctggagaggatgcggagaaataggaacacttttacactgttggtgggactgtaaactagttcaaccattgtggaagtcagtgtggcgattcctcagggatctagaactagaaataccatttgacccagccatcccattactgggtatatacccaaatgagtataaatcatgctgctataaagacacatgcacacgtatgtttattgcggcactattcacaatagcaaagacttggaaccaacccaaatgtccaacaatgatagactggattaagaaaatgtggcacatatacaccatggaatactatgcagccataaaaaatgatgagttcatatcctttgtagggacatggatgaaattggaaaccatcattctcagtaaactatcgcaagaacaaaaaaccaaacaccgcatattctcactcataggtgggaattgaacaatgagatcacatggacacaggaaggggaatatcacactctggggactgtggtggggtcgggggaggggggagggatagcattgggagatatacctaatgctagatgacacattattgggtgcagcgcaccagcatggcacatgtatacatatgtaactaacctgcacaatgtgcacatgtaccctaaaacttagagtataataaaaaaaaaaaaa

SEQ ID NO: 863 - DNA, 284 bp, Homo sapiens
  source 1..284: mol_type = other DNA
ggctgggagcggtggctcatgcctgtaatcccggcatttagggaggccaaggtgggttgatcacctgaggtcaggagttcgagaccagcctgaccaatatggtgaaacccccatctctactaaaaatacaaaaattagcagcggcgggtgcctgtaatcccagctactcaggaggctgaggcgggagaatcgcttgaacccgggaggcggaggatgcagtgagattgcgccactgcactccagcctgggtgacacagcgagactttctcagaaaaaaaaaaaaa

SEQ ID NO: 864 - DNA, 1388 bp, Homo sapiens
  source 1..1388: mol_type = other DNA
gtaaggtataacagttctgataccactgcacatctatcttggaaatgaacaattaagtaaatatgtggtgaatggaaacatctaggcttctcattactggggtgagagtttacaggtaagcaaggggaagaggccagattagaactaaaagcattctaatagattagaattgaaaacacctttataaactcacgttcagcataacatacagttacatatagaaatatttataaatatgtttatatacacatagatttccttgctctctcaactgaaagggtctggaagcaacaacaccccaggaataacaagcacatctagcacccatattcaggttttaatacctttctcgaataaatggagttagggttccttggaaaatgggctgattctaagactggggcagaatatatctgtgatgatcctggaacatcctttagtaccaaaaaaataaggcagtgctcaaataaaatacaacaactccacatgcatgagggcatatcaaacaaacatgagaatcaactgaaagagcccccagtggccaaagccacagcaatttgagcaacaaaataagtaaagtggtattagattataacccaaagtataaaataaatatccatgagtccatacggatataaatagttgaatgaattagtaaattggtgagagtagacaaatcttccatgcagaagaatccaaataatttatggagatgttctgtcctcaaataaatagatcataacctccccaccccttaagtatgaactgtggttggcgatttcttttgaaggagtacaatatagaatggaggtaaaaacagtacctttacagagaaatctggcaaacactacctcagccaggtgatcaagttcaatattcagcaataagtcatgttgtttgttagtgtgtgctcttgatatgacatgatgagaattgcacttcacttctgtgatattccccctgaaaacacacaaccacagtctagttagaacataaaaaaaaaaaatcagataaatcccaagggaggaaaattctacaaaatacccgttcagtacttctcaaaactttcaagatcatcaaaaacaagggaagtctgagaaactgtcacagccaagaggaacctaaggagatattatgattaaatgcaacgtcgtattgtagttgggatcctggaatagaaaaaggatattttgtttaaaaaaaaactaaataaataggcattaggtataaactttagttaataatttatcagcattaatttattaattataactaatacaccatactaatgtaagatgccaataatagagaaaattggctgtaggatatgtgggaactctatcaactgcaattttttcctgtaaatttcaaactgctctaaaataaaa

SEQ ID NO: 865 - DNA, 6093 bp, Homo sapiens
  source 1..6093: mol_type = other DNA
ttccaagatggccgaataggaacagctccagtatacagctcccagtgtgagcgacgcagaagacagatgatttctgcatttccaactgaggtaccgggttcatctcactggggcttgtcagacagtgggtacagcccacggagcagggtggagcatcaccccaagtgcaagaggtcggataattccctttcctagccaagggaagccatgacagatggtacctggaaaatcgggacactcctacactaatactgcacttttccaatggtcttaacaaacggcacaccaggagattatatcttgcatctggctcggagggtcccacgcccacagaaccttactcattgctagcacagcagtctgagatcaaactgcaaggtggcagcgaggctggggggaagggcatccgccattgctgaggcttgagaaggtaaacaaagcaggtggggagcttgaactgagtggagcccaccgcagctcaagaaggcctgcctgcctctgtagactccacctctgggggcagggcatagctgaataaaaggcagcagaaacttctgcaaacttaaacgtccctgtctgacagctttgaagagagtagtggttctcccagcacagagtttgagatctgagaacggacagactgcctcctcaagtgggtccctgacccccaagtagcctaaatgggagacacctcccagtagggaccgactgacaccccatacagctgggtgcccctctgagacgaagcttccaggggaaggatcaggcagcaacatttgccattctgcagcctccactggtgatacccaggcaaacagggtctggagtggacctccagcaaactccaacagacctgcagctgagggtcctgactgttagaaggaaaactaacaaacaaaaaggacatccacaccaaaaccccatctgtacatcaccatcatcaaagaccaaaggtagataaaaccacaaagatggggagaaaacagagcagaaaagctgaaaattctaaaaatcagagcgcctcttctcctccaaaggaacgcagcacctcgccagcaatggaacaaacctggttggagaatgactttgatgagttgagagaagaaggcttcagatgaatggtaataacaaacttctccgagctaaaggaggatgtttgaacccatctcaaagaagctaaaaaccttgagaaaagattagacaaatgggtaactagaatcaacagtgtagaaaagaccttaaatgacctgatggagctgaaaactgtggcacaagaactacgtgatgcatgcacaagcttcagtagccaattcagtcaagtggaagaaagggtatcagtgattgaagatcaaatgaatgaaatgaagcgagaaaagaagtttggagaaaaaagagtaaaaagaaatgaacaaagctccaagaaatatgggactatgtgaaaagatcaaatctgtgtctgattggtgtacctgaaagtgacggggagaacagaaccaagtcggaaaaaactcttcaggatattatctaggagaacttccgcaacccagcaaggcaggccaacattcaaattcaggaaatacagagaacaccacaaagatactcctcaagaagagcaactccaagacacataattgtcagattcaccaaagttgaaatgaaggaaaaaatgttaagggcagccagagagaaaggtcaggttacccataaagggaagtccatcagactaacagcagatctctcagcagaaactctacaagccacaagacagtgggggccaatatccaacattcttaaagaaaaggattttcagtctagaatttcatatccagccaaactaagcttcataagtgaaagagaaataaaatactttacagacaaacaaatactgaaagattttgtcaccagcaggcctaccttacaagagctcctcaaggaagcactaaacatggaaaggaacaaccggtaccagacactgcaaaaacatgccaaattgtaaagaccatcaatgctaggaagaaactgcatcaactaaagtgcaaaataaccagctaacgtcataatgacaggatcaaattcacacataacgatattaaccttaaatataaatgggctaaatgctccaattaaaagacacagactggcaaattggataaagagtcaagacccatcagtgtgctgtattcaggagacccatctcacgtgcaaagacacacataggctcaaaataaagggatggaggaagatctaccaggtaaacggaaaacaaaaaaaggcaggagttgcaatccaagtctctgattaaacagactttaaaccaacaaagatcaaaagagacaaagaaggccattacataatggtaaagggatcaattcaacaagaagagctaactatcctaaatatatatgcacccaatacaggagcacccagatttataaagcaagtccttagagacctacaaagagacttacactcccacatgataataatgggagactttaacaacccactgtcaacattagacagatcaatgagacagaaagttaacaaggatatccaggaattgaactcagctctgcaccacacagacctgatagacatctacagaactctccacctcaaatcaacagaatatacattcttctcagcaccacattgcacttattccaaaattgaccacatagttggaagtaaagcactcctcagcaaatgtaaaagaacagaaattataacaaactgtctctcagaccacagtgcaatcaaattagaactcaggattaagaaactctctcaaaactgctcaactacatggaaactgaacaacccactcctgaatgactactgggtacataacgaaatgaaggcagaaataaagatgttctttgaaatcaatgataacaaagacacaacataccagaatctccaggacacatttagagcagtgtgtagaaggaaatttatagcactaaatgcccacaagagaaagcaggaaaagatctaaaattgacaccctaacatcacaattaaaagaactagagaagcaagagcaaacacattcaaaagctagcagaaggcaagaagtaactaagatcagagcagaactgaaggagatagaaacacaaaaaacccttcaaaaaaatcaatgaatccaggagctggtttttttaaaagatcaacaaaattgataaactgctagcaagactaataaagaagaaaagggagaagaatcaaatagacacaataaaaaatgataagggtgatatcaccaccgattccacagaaatacaaactacaatcagagaatactataaacacttctactcaaaaaaactagaaaatctagaagaaattgataaattcctggacacatacacaccctcccaagactaaaccaggaagaagttgaatccctgaatagaacaataacaggctctgaaattgaagcaataattaatagcctaccaacaaaaaaactccagcaccagatggattcacaaccaaattctaccagaggtacaaagaggagctggtaccattccttctgaaactattccaatcaatagaaaaagagggaatcaaccctaactcattttatgaggccagcatcatcctgataccaaagcctggcagagacacaacaaaaaaagagaattttagaccaatatccctgatgaacatcgatgcaaaaatcctcaataaaatactgggaaaccgaatccagcagcacatcaaaaagcttatccaccatgatcaagtcggcttcattcctgggatgcaaggctggttcaacatatgcaaatcaataaatgtaatccatcatataaacagaaccaaaaacaaaaaccacatgattatctcaatagatgcagaaaaggccttcgacaaaattcaacagcccttcatgctaaaaactttcaataaactaggtatcgatgggacctgtctcaaaataataagagctacttatgacaaacccacagccaatatcatactgaatggacaaaaactggaagcattccctttgaaaactggcacaagacagggatgccctctctcaccactcctgttcaacataggattggaagttctggccagggcaatcaggcaggagaaagaaataaaaggtattcaattaggaaaggaggaagtcaaattgtccctgtttgcagatgacatgattgtatatttagaaaaccccatcatctcagcccaaaatttccttaagctgataagcaacttcagcaaagtctcaggatacaaaatcaatgtacaaaaatcacaagcattcctatacaccaataacagacaaacagagagccaaatcatgagtgaagtcccattcacaattgcttcaaagagaataaaatacctaggaatccaacttacaagggatgtgaaggacctcctcaaggagaactacaaaccactgctcaacaaaataaaagaggacacaaacaaatggaagaacattccatgcttatggataggaagaatcaatatcatgaaaatggcgatactgcccaaggtaatttatagattcaatgccatccccatcaagctaccaatgactttcttcacagaattggaaaaaactactttaaagttcatatggaaccaaaaaagagcctgcattgccaagacaatcctaagccacaagaacaaagctggaggtatcatgccacctggcttcaaactatactacaaggctacagtaaccaaaacagcatggtactggtagtaaaacagagatatagaccaatggaacagaacagagccctcagaaataataccacacatctacaaccatctgatctctgacaaacctgacaaaaacaagaaatggggaaaggattccttatttaataaatggtgctgggaaaactagctagccatatgtagaaagctgaaactgaatcgcttccttacaccttatacaaaaattaattcacaatggattaaagacttaaatgttagacctaaaaccataaaaaccctagaagaaaacctaggcaataccattcaggacacaggcatgggcaaggacttcacgtctaaaacaccaaaagcaatggcaacaaaagccagaattgacaaatgggatctaactaaactaaagagcttctgcacagcaaaagaaactaccatcagagtgaacaggcaacctacagaatgggagaaaagttttacaacctacccatctgacaaagggctaatatccagaatctacaaagaacttaaacaaatttacaagaagaaatcaaacaaccccatcaaaaagtgggcaaaggatatgaacagacacttctcaaaagaagacatttatgcagccaacagacacatgaaaaaatgctcatcatcactggccatcagagaaatgcaaatcaaaaccacaatgagataccatctcacaccagttagaatggcaatcattaaaaagtcaggaaacaacaggtgctggagaggatgtggagaaataggaacacttttacactgttggtgggaccgtaaactagttcaaccattgtggaagtcagtatggcgattcctcagggatctagaactagaaataccattggacccagccatcccattactgggtatatacccaaaggattataaatcatgctgctataaagacacatgcacacgtatgtttattgcagcactattcacaatagcaaagacttggaaccaacccaaatgcccaacaatgatagactggattaagaaaatgtggcacatatacaccatggaatactatgcagccataaaaaaggatgaattcatgtcctttgtagggacatggatgaagctggaaaccatcattctcagcaaactatcacaaagacagaaaaccaaacactacatgttctcactcataggtgggaattaaacaatgagaacacttggtcacagggtggggaacatcacacaccggggcctgttgtggggcagggggaaaggggaggtatagcattaggggatatacctaatgtaaatgacgagttaacgggtgcagcataccaacatggcacatgtatacctatgtaacaaacctgcacgttgtgcacatataccctagaacttaaaggataa

SEQ ID NO: 866 - DNA, 4774 bp, Homo sapiens
  source 1..4774: mol_type = other DNA
tttggtattttaggtagagtatataatatatatttcgtgtactttgatattttatgtacagtatataatatgtaattggtgtaatttgatattttatgttcagtatataatatgtatttggtgtactttttgatattttatgtacagtatataatatgtattttgggtactttgatattttatgtacagtatataataagtatttggtgtactttgatattttatgtacagtatataacatgtatttggtgtactttgatattttatgtacagtatataatatgtatttggtgtactttaatattttacatacagtatataatatgtattttgtgtattttgatattttgtgtacagtatataatatatattttgtgtactttgatattttatgtacagtatattatatgtgttttctgtactttgatattttatgtacagtatataaaatgtatttggtgtactttgatattttatgcacagtatataatatgtatttggtgtactttgatattatatgtacagtatataatatatatttggtgtactttttgatattttatgtacagtatataataagtagttggtgtaatttttgataatttaagtacagtaaataataagtatttggtgtactttttgatattttatgtacagtatgtaatatgtatttggtgtactttttgatattttatgtacagtacataatatgtatttggtgtactttgatattttatgtacagtatatagtatatatttggtgtactttttgatattttatgtacagtatataatacgtatttagtgtactatttgatattatatgtacagtatataagatacatttggtgtactttttgatattttatttacagtatatgacatgcatgtggtgtactttttgatattttatgtacagtatataacatgtgtttgctgtactttgatattttatgtagagtatataatatgtatttggtgcactatgaaattttatgtacagtatataatatgaatttggcgtactttgatattttatggacagtatataataggtattttgtgtagtttgatattttatgtacagtataaaatatgtatttggtgtactttgatattttatgtacagtatataatatgcatttgatgtagtttgatattttatgtactctatataatatgtatttggtgtattttgatattttatgcacagtgtataatacaccaaatacaatttatatactgtacataaaatatcaaagtacaccaaatgcattttatatactgtatataaaacaccaacgtacaccaaatacatactatatactgtacatagtttgaaagtacaccaaatacatattatatactgtacataaaatgtcaaaaagtacaccaaatacatattatatactgtacctaaaatgtcaaaaagtacacgaaatacatattatattctgtacatatattatcaaaaagtacaccaaatacatattatatactgtagataaaatatacgaaagtacaccaaatacatattatatactgtacataaaatatcaaaaactacagcaaatacatattatatactgtaaataaaatatcaaaaattacaccaaatacatattatatgctgtacacaaaatatcaaagtacccaaaatacatatgatatactgtacataaaaaatcaaagtacaaaaaatacatatgatatacagtacataaaatatcaaagttcaccaaatacatattatataatgtacataaaacatcaaactacagcaaatacatattatatactgtacataaaatatcaaatagtacaccaaatacatactatatactgtacatcaattatcaaagtacaccaaatacgtattatatactgtacataagatatcaaagtacacttaatacatattatatactatacataatatatcaaagtacacaaaatatatattatatgctgtacatataatatcaaagtatacataatatatattatacactgtacttaaaataccaaagtacacaaaatatatattatatactgtacataaaatatcaaagtacaccaaatacatattatatactgtacataaaatatcaaagtacaccaaatacatattatatactgttcataaaatatcaaagtacacaaattacatgttatatactgtacataaaatatcaatgtgcaccaaatacatattatatactgtacataaaatatcaaagtacacaaaatacatattatacactgtacataaaatatcaaagtatgcaaaacatatatactgcacataaaatatcaacttacacgaagtatatattatatactgtacataaaatatcaaagtacaccgaatatatattatatactgaacataaaatatcaaatcacacatattatatattatatactgtacataaaatatcaaagtacaccaaatacatattatatactgtacatgaaatatcaaagtacaccaaatacatattatatactgtacataaaaagcaacgtacacaaaatatatattatatactgtacataaaatatcaaagtccaccaaatacatattttatactgtacataaaatgtaaaaaggtacaccaaatacatattttatactgtacataaaatatcaaaacgtaccccaaatacatattatatattgtacataaaatatcaaaaggtacaccaaagatatattatatattgtacataaaatatgaaaaagtacacctaatatatattatatcctgtacatcaagtatcaaaaagtacatcatatatattatatactgtacatcaaatatcaaaaagtacattatatattatatactgtacatcaaatatcaaaatgtacaacaaatatatattatataatgtacatcaaatattaaaaattaaccaaatacatattatatactgtatatcaaacatgaaatagtacaccaagtacttattatatactgtacatcaaatatcaaagtacacaaaatacttattatatactgtacacaaaatatgaaagtacaccagatacatattatatactgtatataaaatagaaaagtaccccaaatacatattatatactgtacacaaaatataaaattacagaaaatacatattatatactgtatataaaatatcaaagtacacaaaatatgtattgtatactgtacataaaatatcaaagtacaccaaatatatattatttactgtacataaaatatcaaacataccaaatacatactatatactataactaaaatatcaaagtacaccaaatacataatatatactgtacataaaatacctaagtacaccaaatacatattatatactctacataaaatatcaaagtacacaaaatacatattatatactgtacataaaatatcaaagtacaccaaattcatattacatactgtacataaaatttcaaagtacaccatatacatattatatgctgtgcataaaatatcaaagtacacaaagtacatattatataccatacataaaatatcaaagtacactaaatacatattatgtactgcaaataaaatatcaaaatacacaaaatacatattatatactgtacacaaaacatcaaagtacagaaaatacatattatatactgtatgtaaaatattaaagtacaccaaatacatattatatactgtacataaaatatcaaattacaccaaatacatataatatactatacataaaacatgaaagtacaccagatacatattacatactgtacattaatcatcaaagtacaccagatacatattatatactgtacataaaatatcaatgtacacaaaatacatattatatactgtacataaaatatcaaagtacaccaaatacatattatatactctatataaaatatcaaagtacaccaaatacatattatatactgtgcataaaatatcaaagtacacaaagtacatattatatagtgtacataaaatatcaaagtactctaaatacatattatatactgtattcaaaatatcaaagtacacaaaatacatattatatactgtatgctaaatattaaactacaccaaatacatattatatactgtacataaaatatcaaagtacaccaaatacacattatatactgtacataaaatatcaaactacaccaaatacatattatatactgtacataaaaaatcaaactacaccaaatacatattataaactgtacataaaatatcaaagtacacaaaatacatattatatactgtacataaaatatcaaagtacacgaaatatatattacatactgtacctaaaatatcaaagtacacgaaatacacattaaatactgtacctaaaatatcaaaatacacgaaatacatattatatactgtacctaaaatatcaaagtacacgaaatacatattacatactgtacccaaaatatcaaactagacgaaatacatattatatactgtacctaaaatatcaaagtacacataatacatattacatactgtacctaaaatatcaaagtacaccaaatacatattacatactgtacctaaaatatcaaagttcaccaaatacacattttatactgtacctaaaatatcaaagtacaacaaatacatattacatactgtacctaaaatatcaaatacaccaaatacatattacatactgtacctaaaatatcaaagtataccaaatacatattatatactgtacataaaatatcaaagtacacaaaata

SEQ ID NO: 867 - DNA, 1045 bp, Homo sapiens
  source 1..1045: mol_type = other DNA
gcaatggcaacaaaagacaaaattgacaaatgggatctaattaaactaaagagcttctgcacagcaaaagaaactaccatcagagtgaacaggcaacctacaacatgggagaaaatttttgcaacctactcatctgacaaagggctaatatccagaatctacaatgaactcaaacaaatttacaagaaaaaaacaaacaaccccatcaaaaagtgggcgaaggacatgaacagacacttctcaaaagaagacatttatgcagccaaaaaacacatgaagaaatgctcatcatcactggccatcagagaaatgcaaatcaaaaccactatgagatatcatctcacaccatttagaatggcaatcattaaaaagtcaggaaacaacaggtgctggagaggatgcggagaaataggaacacttttacactgttggtgggactgtaaactagttcaaccattgtggaagtcagtgtggcgattcctcagggatctagaactagaaataccatttgacccagccatcccattactgggtatatacccaaatgagtataaatcatgctgctataaagacacatgcacacgtatgtttattgcggcactattcacaatagcaaagacttggaaccaacccaaatgtccaacaatgatagactggattaagaaaatgtggcacatatacaccatggaatactatgcagccataaaaaatgatgagttcatatcctttgtagggacatggatgaaattggaaaccatcattctcagtaaactatcgcaagaacaaaaaaccaaacaccgcatattctcactcataggtgggaattgaacaatgagatcacatggacacaggaaggggaatatcacactctggggactgtggtggggtcgggggaggggggagggatagcattgggagatatacctaatgctagatgacacattagtgggtgcagcgcaccagcatggcacatgtatacatatgtaactaacctgcacaatgtgcacatgtaccctaaaacttagagtataataaaaaaaaaaaa

SEQ ID NO: 868 - DNA, 6026 bp, Homo sapiens
  source 1..6026: mol_type = other DNA
ggaggagccaagatggccgaataggaacagctctggtctacagctcccagcgtgagcgacgcagaagacgggtgatttctgcatttccatctgaggtaccgggttcatctcactagggagtgccagacagtgggcgcaggccagtgtgtgcgcgcaccgtgcgcgagccgaagcagggcgaggcattgcctcacctgggaagcgcaaggggtcagggagttccctttccgagtcaaagaaaggggtgatggacgcacctggaaaattgggtcactcccacccgaatattgcgcttttcagaccggcttaaaaaacggcgcaccacgagactatatcccacacctggctcagagggtcctacgcccacggaatctcgctgattgctagcacagcagtctgagatcaaactgcaaggcggcaacgaggctgggggaggggcgcccaccattgcccaggcttgcttaggtaaacaaagcagcggggaagctccaactgggtggagcccaccacagctcaaggaggcctgcctgcctctgtaggctccacctctgggggcagggcacagacaaacaaaaagacagcagtaacctctgcagacttaagtgtccctgtctgacagctttgaagagagcagtggttctcccagcacgcagctggagatctgagaacgggcagactgcctcctcaagtgggtccctgacccctgacccccgagcagcctaactgggaggcaccccccagcaggggcacactgacacctcacacggcagggtattccaacagacctgcagctgagggtcctgtctgttagaaggaaaactaacaaccagaaaggacatctacaccgaaaacctatctgtacatcaccatcatcaaagaccaaaagtagataaaaccacaaagatggggaaaaaacagaacagaaaaactggaaactctaaaacgcagagcgcctctcctcctccaaaggaacgcagttcctcaccagcaatggaacaaagctggatggagaatgattttcacgagctgagagaagaaggcttcagacgatcaaattactctgaactacgggaggacattcaaaccaaaggcaaagaagttggaaactttgaaaaaaatttagaagaatgtataactagaataaccaatacagagaagtgcttaaaggagctgatggagctgaaaaccaaggctcgagaactacgtgaagaatgcagaagcctcaggagccgatgcgatcaactggaagaaagggtatcagcaatggaagatgaaatgaatgaaatgaagcgagaagggaagtttagagaaaaaagaataaaaagaaatgagcaaagcctccaagaaatatgggactatgtgaaaagaccaaatctacgtctgattggtgtacctgaaagtgatgtggagaatggaaccaagttggaaaacactctgcaggatattatccaggagaacttccccaatctagcaaggcaggccaacgttcagattcaggaaatacagagaacgccacaaagatactcctcgagaagagcaactccaagacacataattgtcagattcaccaaagttgaaatgaaggaaaaaatgttaagggcagccagagagaaaggtcgggttaccctcaaagggaagcccatcagactaacagcggatctctcggcagaaaccctacaagccagaagagagtgggggccaatattcaacattcttaaagaaaaggattttcaacccagaatttcatatccagccaaactaagcttcataagtgaaggagaaataaaatactttatagacaagcaaatgctgagagattttgtcaccaccaggcctgccctaaaagagctcctgaaggaagcgctaaacatggaaaggaacaaccggtaccagccgctgcaaaatcatgccaaaatgtaaagaccatcgagactaggaagaaactgcatcaactaatgagcaaaatcaccagctaacatcataatgacaggatcaaattcacacataacaatattaactttaaatataaatggactaaattctgcaattaaaagacacagactggcaagttggataaagagtcaagacccatcagtgtgctgtattcaggaaacccatctcacgtgctgagacacacataggctcaaaataaaaggatggaggaagatctaccaagcaaatggaaaacaaaaaaaggcaggggttgcaatcctagtctctgataaaacagactttaaaccaacaaagatcaaaagagacaaagaaggccattacataatggtaaagggatcaattcaacaagaggagctaactatcctaaatatttatgcacccaatacaggagcacccagattcataaagcaagtcctgagtgacctacaaagagacttagactcccacacattaataatgggagactttaacaccccactgtcaacattagacagatcaacgagacagaaagtcaacaaggatacccaggaattgaactcagctctgcaccaagcggacctaatagacatctacagaactctccaccccaaatcaacagaatatacatttttttcagcaccacaccacacctattccaaaattgaccacatagttggaagtaaagctctcctcagcaaatgtaaaagaacagaaattataacaaactatctctcagaccacagtgcaatcaaactagaactcaggattaagaatctcactcaaagccgctcaactacatggaaactgaacaacctgctcctgaatgactactgggtacataacgaaatgaaggcagaaataaagatgttctttgaaaccaacgagaacaaagacaccacataccagaatctctgggacgcattcaaagcagtgtgtagagggaaatttatagcactaaatgcctacaagagaaagcaggaaagatccaaaattgacaccctaacatcacaattaaaagaactagaaaagcaagagcaaacacattcaaaagctagcagaaggcaagaaataactaaaatcagagcagaactgaaggaaatagagacacaaaaaacccttcaaaaaatcaatgaatccaggagctggttttttgaaaggatcaacaaaattgatagaccgctagcaagactaataaagaaaaaaagagagaagaatcaaatagacacaataaaaaatgataaaggggatatcaccaccaatcccacagaaatacaaactaccatcagagaatactacaaacacctctacgcaaataaactagaaaatctagaagaaatggatacattcctcgacacatacactctcccaagactaaaccaggaagaagttgaatctctgaatagaccaataacaggctctgaaattgtggcaataatcaatagtttaccaaccaaaaagagtccaggaccagatggattcacagccgaattctaccagaggtacaaggaggaactggtaccattccttctgaaactattccaatcaatagaaaaagagggaatcctccctaactcattttatgaggccagcatcattctgataccaaagccgggcagagacacaaccaaaaaagagaattttagaccaatatccttgatgaacattgatgcaaaaatcctcaataaaatactggcaaaccaaatccagcagcacatcaaaaagcttatccaccatgatcaagtgggcttcatccctgggatgcaaggctggttcaatatacgcaaatcaataaatgtaatccagcatataaacagagccaaagacaaaaaccacatgattatctcaatagatgcagaaaaagcctttgacaaaattcaacaacccttcatgctaaaaactctcaataaattaggtattgatgggacgtatttcaaaataataagagctatctatgacaaacccacagccaatatcatactgaatgggcaaaaactggaagcattccctttgaaaactggcacaagacagggatgtcctctctcaccgctcctattcaacatagtgttggaagttctggccagggcaatcaggcaggagaaggaaataaagggtattcaattaggaaaagaggaagtcaaattgtccctgtttgcagacgacatgattgtttatctagaaaaccccattgtctcagcccaaaatctccttaagctgataagcaacttcagcaaagtctcaggatacaaaatcaatgtacaaaaatcacaagcattcttatacaccaacaaccggcaaacagagagccaaatcataagtgaactcccattcacaattgcttcaaagagaataaaatacctaggaatccaacttacaagggatgtgaaggacctcttcaaggagaactacaaaccactgctcaaggaaataaaagaggacacaaacaaatggaagaacattccatgctcatgggtaggaagaatcaatattgtgaaaatggccatgctgcccaaggtaatttacagattcaatgccatccccatcaagctgccaatgactttcttcacagaattggaaaaaactactttaaagttcatatggaaccaaaaaagagcccgcatcgccaagtcaatcctaagccaaaagaacaaagctggaggcatcacactacctgacttcaaactatactacaaggctacagtaaccaaaacagcatggtactggtaccaaaacagagatatagatcaatggaacagaacagagccctcagaaataatgccgcatatctacaactatctgatctttgacaaacctgagaaagacaagcaatggggaaaggattccctatttaataaatggtgctgggaaaactggctagccatatgtagaaagctgaaactggatcccttccttacaccttatacaaaaatcaattcaagatggattaaagatttaaacgttagacctaaaaccataaaaaccctagaagaaaacctaggcattaccattcaggacataggcgtgggcaaggacttcatgtccaaaacaccaaaagcaatggcaacaaaagccaaaattgacaaatgggatctaattaaactaaagagcttctgcacagcaaaagaaactaccatcagagtgaacaggcaacctacaacatgggagaaaatttttgcaacctactcatctgacaaagggctaatatccagaatctacaatgaactccaacaaatttacaagaaaaaaacaaacaaccccatcaaaaagtgggcgaaggacatgaagagacacttctcaaaagaagacatttatgcagccaaaaaacacatgaaaaaatgctcatcatcactggccatcagagaaatgcaaatcaaaaccactatgagatatcatctcacaccagttagaatggcaatcattaaaaagtcaggaaacaacaggtgctggagaggatgtggagaaataggaacacttttacactgttggtgggactgtaaactagttcaaccattgtggaagtcagtgtggcgattcctcagggatctagaactagaaataccatttgacccagccatcccattactgggtatatacccaaatgactataaatcatgctgctataaagacacatgcacatgtatgtttattgcggcattattcacaatagcaaagacttggaaccaacccaaatgtccaacaatgatagactggattaagaaaatgtggcacatatacaccatggaatactatgcagccataaaaaatgatgagttcatgtcctttgtagggacatgtatgaaattggaaaccatcattctcagtaaactatcgcaagaacaaaaaaccaaacaccgcatattctcactcataggtgggaattgaacaatgagatcacatggacacaggaaggggaatatcacactctggggactgtggtggggtcgggggaggggggagggatagcattgggagatatacctaatgctagatgacacgttagtgggtgcagtgcaccagcatggcacatgtatacatatgtaactaacctgcacaatgtgcacatgtaccctaaaacttaaagtataataaaaaaaaaa

SEQ ID NO: 869 - DNA, 6182 bp, Homo sapiens
  source 1..6182: mol_type = other DNA
gccaagatggccaaataggaagagctccggtctacagctcccagcgtgagtgacgcagaagacgggtgatttctgcatttccatctgaggtaccgggttcatctcactagggagtgccagacagtgggtgcaggtcagtaggtgcagtgcaccatgcgcaagctgaagcagggcgaggcattgcctcactcgggaagtgcaaggggtcagggagttccctttcctagtcaaagaaaggggtgacagacggcacctggaaaatcgggtcactcccaccctaatactgcgcttttccaacgggcttaaaaaacggtgcaccaagagattatatcctgcacctggctcggagggtcctacacccacggagtctcactgattgctagcacagcagtctgagatcaaactgcaaggcagcagcaaggctgggggaggggctcccaccattgcccaggcttgcttaggtaaacaaagaagccgggaagctccaactgggtggagcccaccacagctcaaggaggcctgcctgcctctgtaggctccacctctgggggcagggcacagaaaaacaaaaagacagcagtaacctctgcagacttacatgtccctgtctgacagctttgaagagagcagtggttctcccagcacgcagctggagatctgagaacgggcagactgcttcctcaagtgggtccctgacccctgacccccaagcagcctaactgggaggcaccccccgataggggcagactgacacctcacacagccaggtactcttctgagacaaaacttccagaggaatgatcagacagcagcattcgcagttcatgaaaacccgctgttctgcagccaccgctgctgatacccaggcaaacagggtctggagtggacctctagcaaactccaacagacctgcagctgagggtcctctctgttagaaggaaaactaacaaacagaaaggacatccacaccaaaaacccatctgtacatcaccatcatcaaagaccaaaagtagataaaaccacaaagatggggaaaaaacagagcagaaaaactgggaactctaaagagcagagcgcctctcctcctccaaaggaacgcagttcctcaccagcaatggaacaaagctggacggagaatgactttgacgagttgagagaagaaggcttcagacaatcaaactactccgagttacaggaggaaattcaaaccaaaggcaaagaagttaaaaactttgaaaaaaatttagacgaatgtataactagaataaccaatacagagaagtgcttaaaggagctgatggagctgaaagccaaggctcgagaactatgtgaagaatgtagaagcctcaggagctgatgtgatcaactggaagaaagggtatcagtgatggaagatgaaatgattgaaatgaagcgagaagggaagtttagagaaaaaagaataaaaggaaatgaacaaagcctccaagaaatatggaactatgtgaaaagaccaaatctacgtctgattggtgtacctgaaagtgacagggagaatggaaacaagttggaaaacacagtgcaggatattatccaggagaaattccccaatctagcaaggcaggccaacattcagattcaggaaatacagagaacgccacaaagatactcctcgagaagagcaactccaagacacgtagttgtcagattcaccaaagttgaaatgaaggaaaaaatgttaagggcagccagagagaaaggttgggttacccacaaagggaagcccgtcagactaacagtggatctcttggcagaaactctacaagccagaagagagtgggggccaatattcaacattcttatagaattttcaacccagaatttcatatccagccaaactaagcttcataagtgaaggagaaataaaatactttacagacaagcaaatgtggagagattttgtcaccaccaggcctgccctaaaagagctcctgaaagaagcactaaacatggaaaggaacaaccggtaccagccactgcaaaatcatgccaaattgtaaagaccatcgaggctaggaagaaattgcatcaattaatgagcaaaataaccagctaacatcataatgacaggatcaaattcacacataacaatattaactttaaatgtaaatggacttaatgctccatttaaaagacacacactggcaaactggataaagagtcaagacccatcagtgtgctgtattcaggaaacccatctcacgtgcagagacacacataggctcaaaataaaagtatggaggaagatctaccaagtaaatggaaaacaaaaaaaggcaggggttgcaatcctagtctctgataaaacagactttaaaccaacaagatcaaaagagacaaagaaggccattatataatggtaaagggatcaattcaacaagaagagctaactatcctaaatatatatgcacccaatatgagagcacccagattcataaagcaagtcctgagtgacctacaaagagacttagactcccacacaataataatgggagactttaacaccccactgtcaacattagacagatcaatgagacagaaagttagcaaggatacccaggaattgaacccagctctgcaccaaggggacctaatagacatctacagaactctccaccccaaatcaacagaatatacatttttttcagcaccacaccacacctattccaaaattgaccacatagttggaagtaaagctctcctcagcaaatgtaaaaaaacagatattataacaaactgtctctcagaccacagtgcaatcaaactagaactcaggattcagaaactcactcaaaaccgctcaactacatggaaactgaaaaacctgctcctgaatgactactgggtacataaagaaatgaaggcagaaataaagatgttctttgaaaccaacgagaacaaagacacaacataccagaatctctgggacacattcaaagcagtgtgtagagggaaatttatagcactaaatgcctgcaagagaaagcaggaaagatccaaaattgacaccctaacatcagaattaaaagaactagaaaagcaagagcaaacacattcaaaagctagcagaaggcaagaaataactaaaatcagagcagaactgaaggaaatagcaacacaaaaaccctttaaaaaattaatgaatccaggagctggttttttgaaaggatcaacaaaattgatagactgctagcaagactaataaagaagaaaagaaagaagaatcaaatagacgcaataaaaaatgataaaggggatatcaccactgatcccacagaaatacaaactaccatgagagaatactacaaacacctctacacaaataaactagaaaatctagcagaaatggataaattccttgacacatacaccctcccaagattaaccaggaagaagttgaatctctgaatagaccaataacaggctctgaaattgtggcaataatcaatagcttaccaaccaaaaagagtccaggaccagatggattcacagcagaattctaccagaggtacaaggaggaactggtaccattctgtctgaaactattccaatcaataggaaaagagggaatcctccctaactcattttatgaggccagcatcatcctgataccaaagccaggcagagacacaaccaaaaaagagaataccaaagcctggcagagacacaaccaaaaaagagaattttagaccaatatccttgatgaacattgatgcaaaaatcctcaataaaatactggcaaaccaaatccagcagcacatcaaaaagtttatccaccacgatcaagtggacttcatccctaggatgcaaggctggttcaatatacgcaaatcaataaatgtaatccagcatataaacagaaccaaagacaaaaaccacacgattatctcaatagatgcagaaaaggcctttgacaaaattcaacaatgcttcatgctaaaaactctcaataaattaggtattgatgggatgtacctcaaaataataagagctatctatgacaaacccacagccaatatcatactgaatgggcaaaaactggaagcattccctttgaaaactggcaaaagacagggatgccctctctcaccacacctattcaacatagtgttggaagttctggccagggcaattaggcaggagaaggaaataaagggtattcaattaggaaaagaggaagtcaaattgtccctgtttgcagaggacatgattgtatatccagaaaaccccattgtctcagcccaaaatctccttaaactgataagcagcttcagcaaagtctcaggatacaaaataaatgtacaaaaatcacaatcattcttatacaccaataacagacaaacatagagccaaatcatgagtgaactcccattcacaattgcttcaaagagaataaaatacctaggaatccaacctacaagggacgtgaaggacctcttcaaggagaactacaaaccactgctcaatgaaataaaagaggatacaaacaaatggaagaacattccatgctcatgggtaggaagaatcaatatcgtgaaaatggccatactgcccaaggtaatttagagattcaatgccatccccatcaagctaccaatgcctttcttcacagaattggaaaaaactactttaaagttcatatggaaccaaaaaagagcccgcattgccaagtcaatcctaagccaaaagaacaaagctggaggcatcacactacctgacttcaaactatactacaaggctacagtaaccaaaacagcatggtactggtaccaaaacagagatatagatcaatggaacagaatagagcccttggaaataatgccacatatctacaactatctgatctttgacaaacctgagaaaaacaagaaatggggaaaggattccctatttaataaatggtgctgggaaaactggctagccatatgtagaaagctgaaactggatcccttccttacaccttatacaaaaattaattcacgatggattaaagacttacatgttagacctaaaaccataaaatccctagaagaaaacctaggcattaccattcaggacataggcctgggcaaggacttcatgtctaaaacaccaaaagcaatggcaacaaaagccaaaatggacaaatgggatctaattaaactaaagagcttctgcacagcaaaagaaactaccatcagagtatacaggcaacctacaaaatgggagaaaatttttgcaacctactcatctgacaaagggctaatatccagaatctacaatgaactcaaacaaatttacaaggaaaaaacaaacaaccccatcgaaaagtgggtgaaggacatgaacagacacttctaaaaagaagtcgtttatgcagccaaaaaaacacatgaaaaaatgctcaccatcactggccatcagagaaatgcaaatcaaaaccacaatgagatatcatctcacaccagttagaatggcaatcattaaaaagttaggaaacaacaggtgctggagaagatgtggagaaataggaacacttttacactgttggtgggactgtaaactagttcaaccattgtggaagtcagtgtggcgattcctcagggatctagaactagaaataccatttgacccagccatcccattactgggtatataccgaaaggactataatccatgctgctataaagacacatgcatacgtatgtttattgtggcactattcacaatagcaaggactttgaaccaacccaaatgtgcaacaatcatagactggattaagaaaatgtggcacatatacaccatggaatactatgtagccataaaaaatgatgagttcatgtcctttgtagggacatggatgaaattggatatcatcattctcagtaaactatcagaaggacaaaaaaccaaacaccgcatgttctcactcataggtgggaattgaacaatgagaacacatggacactggaatgagaacatcacactctgggtactgttgtggggtcgcgggagtggggagggatagcattaggagatatacctaatgctaaatgatgagttaatgggtgcagcacaccagcatggcacatgtatacatatgtaactaaccttcactttgtgcacatgtaccctaaaagttaaagtataataataataaaaaa

SEQ ID NO: 870 - DNA, 967 bp, Homo sapiens
  source 1..967: mol_type = other DNA
tgtggggaaaagcaagagagatcagattgttactgtgtctgtgtagaaagaagtagacatgggagactccattttgttatgtgctaagaaaaattcttctgccttgagattctgttaatctatgaccttacccccaaccccgtgctctctgaaacgtgtgctgtgtcaactcagggttgaatggattaagggcggtgcaggatgtgctttgttaaacagatgcttgaaggcagcatgctccttaagagtcatcaccactccctaatctcaagtacccagggacacaaaaactgcggaaggccgcagggacctctgcctaggaaagccaggtattgtccaaggtttctccccatgtgatagtctgaaatatggcctcgtgggaagggaaagacctgaccgtcccccagcccgacacccgtaaagggtctgtgctgaggaggattagtaaaagaggaaggaatgcctcttgcagttgagacaagaggaaggcatctgtctcctgcctgtccctgggcaatggaatgtctcggtataaaacctgattgtatgctccatctactgagatagggaaaaaccgccttagggctggaggtgggacctgcgggcagcaatactgctttgtaaagcactgagatgtttatgtgtatgcatatccaaaagcacagcacttaatcctttacattgtctatgatgcaaagacctttgttcacgtgtttgtctgctgaccctctccccacaattgtcttgtgaccctgacacatccccctctttgagaaacacccacagatgatcaataaatactaagggaactcagaggctggcgggatcctccatatgctgaatgctggttccccgggtccccttatttctttctctatactttgtctctgtgtctttttcttttccaaatctctcgtcccaccttacgagaaacacccacaggtgggtaggggcaacccacccctac

SEQ ID NO: 871 - DNA, 7534 bp, Homo sapiens
  source 1..7534: mol_type = other DNA
tctggtgcccaaagtggaggcttttctctagggtgaaggtacgctcgagcgtggtcattgaggacaagtcgacgagagatcccgagtacgtctacagtcagccttacggtaagcttgtgcgctcggaagaagctagggtgataatggggcaaactaaaagtaaaattaaaagtaaatatgcctcttatctcagctttattaaaattcttttaaaaagagggggagttaaagtatctacaaaaaatctaatcaagctatttcaaataatagaacaattttgcccatggtttccagaacaaggaactttagatctaaaagattggaaaagaattggtaaggaactaaaacaagcaggtaggaagggtaatatcattccacttacagtatggaatgattgggccattattaaagcagctttagaaccatttcaaacagaagaagatagcatttcagtttctgatgcccctggaagctgtttaatagattgtaatgaaaacacaaggaaaaaatcccagaaagaaacggaaagtttacattgcgaatatgtagcagagccggtaatggctcagtcaacgcaaaatgttgactataatcaattacaggaggtgatatatcctgaaacgttaaaattagaaggaaaaggtccagaattagtggggccatcagagtctaaaccacgaggcacaagtcctcttccagcaggtcaggtgcccgtaacattacaacctcaaaagcaggttaaagaaaataagacccaaccgccagtagcctatcaatactggcctccggctgaacttcagtatcggccacccccagaaagtcagtatggatatccaggaatgcccccagcaccacagggcagggagccataccctcagccgcccactaggagacttaatcctacggcaccacctagtagacagggtagtgaattacatgaaattattgataaatcaagaaaggaaggagatactgaggcatggcaattcccagtaacgttagaaccgatgccacctggagaaggagcccaagagggagagcctcccacagttgaggccagatacaagtctttttcgataaaaatgctaaaagatatgaaagagggagtaaaacagtatggacccaactccccttatatgaggacattattagattccattgctcatggacatagactcattccttatgattgggagattctggcaaaatcgtctctctcaccctctcaatttttacaatttaagacttggtggattgatggggtacaagaacaggtccgaagaaatagggctgccaatcctccagttaacatagatgcagatcaactattaggaataggtcaaaattggagtactattagtcaacaagcattaatgcaaaatgaggccattgagcaagttagagctatctgccttagagcctgggaaaaaatccaagacccaggaagtacctgcccctcatttaatacagtaagacaaggttcaaaagagccctatcctgattttgtggcaaggctccaagatgttgctcaaaagtcaattgccgatgaaaaagcccgtaaggtcatagtggagttgatggcatatgaaaacgccaatcctgagtgtcaatcagccattaagccattaaaaggaaaggttcctgcaggatcagatgtaatctcagaatatgtaaaagcctgtgatggaatcggaggagctatgcataaagctatgcttatggctcaagcaataacaggagttgttttaggaggacaagttagaacatttggaggaaaatgttataattgtggtcaaattggtcacttaaaaaagaattgcccagtcttaaacaaacagaatataactattcaagcaactacaacaggtagagagccacctgacttatgtccaagatgtaaaaaaggaaaacattgggctagtcaatgtcgttctaaatttgataaaaatgggcaaccattgtcgggaaacgagcaaaggggccagcctcaggccccacaacaaactggggcattcccaattcagccatttgttcctcagggttttcaggacaacaacccccactgtcccaagtgtttcagggaataagccagttaccacaatacaacaattgtcccccgccacaagcggcagtgcagcagtagatttatgtactatacaagcagtctctctgcttccaggggagcccccacaaaaaatccctacaggggtatatggcccactgcctgaggggactgtaggactaatcttgggaagatcaagtctaaatctaaaaggagttcaaattcatactagtgtggttgattcagactataaaggcgaaattcaattggttattagctcttcaattccttggagtgccagtccaagagacaggattgctcaattattactcctgccatatattaagggtggaaatagtgaaataaaaagaataggagggcttggaagcactgatccaacaggaaaggctgcatattgggcaagtcaggtctcagagaacagacctgtgtgtaaggccattattcaaggaaaacagtttgaaggattggtagacactggagcagatgtctctatcattgctttaaatcagtggccaaaaaattggcctaaacaaaaggctgttataggacttgtcggcataggcacagcctcagaagtgtatcaaagtatggagattttacattgcttagggccagataatcaagaaagtactgttcagccaatgattacttcaattcctcttaatctgtggggtcgagatttattacaacaatggggtgcggaaatcaccatgcccgctccattatatagccccacgagtcaaaaaatcatgaccaagaggggatatataccaggaaagggactagggaaaaatgaagatggcattaaaattccatttgaggctaaaataaatcaaaaaagagaaggaatagggtatcctttttaggggtggccactatagagcctccgaaacccataccattaacttggaaaacagaaaaactggtgtgggtaaatcagtggccgctaccaaaacaaaaactggaggctttacatttattagcaaatgaacagttagaaaagggtcatattgagccttcgttctcaccttggaattctcctgtgtttgtaattcagaagaaatcaggcaaatggcgtatgttaactgacttaagggctgtaaacgccgtaattcaacccatggggcctctccaacccgggttgccctctccagccatgatcccaaaagattggcctttaattataattgatctaaaggattgcttttttaccatccctctggcagagcaggattgcgaaaaatttgcctttactataccagccataaataataaagaaccagccaccaggtttcagtggaaagtgttacctcagggaatgcttaatagtccaactatttgtcagacttttgtaggtcgagctcttcaaccagttagaaaaaagttttcagactgttatattattcattatattgatgatattttatgtgctgcagaaacgaaagataaattaattgactgttatacatttctgcaagcagaggttgccagtgctggactggcaatagcatctgataagatccaaacctctactccttttcattatttagggatgcagatagaaaatagaaaaattaagccacaaaaaatagaaataagaaaagacacattaaaaacactaaatgattttcaaaaattactaggagatattaattggattcagccaactctaggcattcctacttatgccatgtcaaatttgttctctatcttaagaggagactcagacttaaatagtaaaagaatattaaccccagaggcaacaaaagaaattaaattagtggaagaaaaaattcagtcagcacaaataaatagaatagatcccttagccccactccaacttttgatttttgccactgcacattctccaacaggtatcattattcaaaatactgatcttgtggagtggtcattccttcctcacagtacagttaagacttttacactgtacttggatcaaatagctacattaatcggtcagacaagattacgaataataaaattatgtggaaatgacccagacaaaatagttgtccctttaaccaaggaacaagttagacaagcctttatcaattctggtgcatggcagattggtcttgctaattttgtgggaattattgataatcattacccaaaaacaaagatcttccagttcttaaaactgactacttggattctacctaaaattaccagacgtgaacctttagaaaatgctctaacagtatttactgatggttccagcaatggaaaagcagcttacacagggccgaaagaacgagtaatcaaaactccatatcaatcagctcaaagagcagagttggttgcagtcattacagtgttacaagattttgaccaacctatcaatattatatcagattctgcatatgtagtacaggctacaagggttgttgagacagctctaattaaatatagcatggatgatcagttaaaccagctattcaatttattacaacaaactgtaagaaaaagaaatttcccattttatattactcatattcgagcacacactaatttaccagggcctttgactaaagcaaatgaacaagctgacttactggtatcatctgcactcataaaagcacaagaacttcatgctttgactcatgtaaatgcagcaggattaaaaaacaaatttgatgtcacatggaaacaggcaaaagatattgtacaacattgcacccagtgtcaagtcttacacctgcccactcaagaggcaggagttaatcccagaggtctgtgtcctaatgcattatggcaaatggatgtcacgcatgtaccttcatttggaagattatcatatgttcatgtaacagttgatacttattcacatttcatatgggcaacttgccaaacaggagaaagtacttcccatgttaaaaaacatttattgtcttgttttgctgtaatgggagttccagaaaaaatcaaaactgacaatggaccaggatattgtagtaaagctttccaaaaattcttaagtcagtggaaaatttcacatacaacaggaattccttataattcccaaggacaggccatagttgaaagaactaatagaacactcaaaactcaattagttaaacaaaaagaagggggagacagtaaggagtgtaccactcctcagatgcaacttaatctagcactctatactttaaattttttaaacatttatagaaatcagactactacttctgcagaacaacatcttactggtaaaaagaacagcccacatgaaggaaaactaatttggtggaaagataataaaaataagacatgggaaatagggaaggtgataacgtgggggagaggttttgcttgtgtttcaccaggagaaaatcagcttcctgtttggatacccactagacatttgaagttctacaatgaacccatcagagatgcaaagaaaagcacctccgcggagacggagacaccgcaatcgagcaccgttgactcacaagatgaacaaaatggtgacgtcagaagaacagatgaagttgccatccaccaagaaggcagagccgccgacttgggcacaactaaagaagctgacgcagttagctacaaaatatctagagaacacaaaggtgacacaaaccccagagagtatgctgcttgcagccttgatgattgtatcaatggtggtaagtctccctatgcctgcaggagcagctgtagctaactataccaactgggcctatgtgcctttcccgcccttaattcgggcagtcacatggatggataatcctatagaagtatatgttaatgatagtgtatgggtacctggccccatagatgatcgctgccctgccaaacctgaggaagaagggatgatgataaatatttccattgggtatcgttatcctcctatttgcctagggagagcaccaggatgtttaatgcctgcagtccaaaattggttggtagaagtacctactgtcagtcccatcagtagattcacttatcacatggtaagcgggatgtcactcaggccacgggtaaattatttacaagacttttcttatcaaagatcattaaaatttagacctaaagggaaaccttgccccaaggaaattcccaaagaatcaaaaaatacagaagttttagtttgggaagaatgtgtggccaatagtgcggtgatattacaaaacaatgaatttggaactattatagattgggcacctcgaggtcaattctaccacaattgctcaggacaaactcagtcgtgtccaagtgcacaagtgagtccagctgttgatagcgacttaacagaaagtttagacaaacataagcataaaaaattgcagtctttctacccttgggaatggggagaaaaaagaatctctaccccaagaccaaaaatagtaagtcctgtttctggtcctgaacatccagaattatggaggcttactgtggcctcacaccacattagaatttggtctggaaatcaaactttagaaacaagagatcgtaagccattttatactgtcgacctaaattccagtctaacacttcctttacaaagttgcgtaaagcccccttatatgctagttgtaggaaatatagttattaaaccagactcccagactataacctgtgaaaattgtagattgcttacttgcattgattcaacttttaattggcaacaccgtattctgctggtgagagcaagagagggcgtgtggatccctgtgtccatggaccgaccatgggaggcctcaccatccgtccatattttgactgaagtattaaaaggtgttttaaatagatccaaaagattcatttttactttaattgcagtgattatgggattaattgcagtcacagctacggctgctgtagcaggagttgcattgcactcttctgttcagtcagtaaactttgttaatgatgggcaaaagaattctacaagattgtggaattcacaatctagtattgatcaaaaattggcaaatcaaattaatgatcttagacaaactgtcatttggatgggagacagactcatgagcttagaacatcgtttccagttacagtgtgactggaatacgtcagatttttgtattacaccccaaatttataatgactctgagcatcactgggacatggttagacgccatctacagggaagagaagataatctcactttagacatttccaaattaaaagaacaaattttcgaagcatcaaaagcccatttaaatttggtgccaggaactgaggcaattgcaggagttgctgatggcctcgcaaatcttaaccctgtcacttgggttaagaccattggaagtactacaattataaatctcatattaatccttgtgtgcctgttttgtctgttgttagtctgcaggtgtactcaacagctccgaagagacagcgaccatcgagaacgggccatgatgacgatggcggttttgtcgaaaagaaaagggggaa

SEQ ID NO: 872 - DNA, 6030 bp, Homo sapiens
  source 1..6030: mol_type = other DNA
ggaggagccaagatggccgaataggaacagctccggtctacagctcccagcgtgagcgacgcagaagacggtgatttctgcatttccatctgaggtaccgggttcatctcactagggagtgccagacagtgggcgcaggccagtgtgtgtgcgcaccgtgcgcgagccgaagcagggcgaggcattgcctcacctgggaagcgcaaggggtcagggagttccctttctgagtcaaagaaaggggtgacggtcgcacctggaaaatcgggtcactcccacccgaatattgcgcttttcagaccggcttaagaaacggcgcaccacgagactatatcccacacctggctcggagggtcctacgcccacggaatctcgctgattgctagcacagcagtctgagatcaaactgcaaggcggcaacgaggctgggggaggggcgcccgccattgcccaggcttgcttaggtaaacaaagcagccgggaagcttgaactgggtggagcccaccacagctcaaggaggcctgcctgcctctgtaggctccacctctgggggcagggcacagacaaacaaaaagacagcagtaacctctgcagacttaagtgtccctgtctgacagctttgaagagagcagtggttctcccagcacgcagctggagatctgagaacgggcagacagactgcctcctcaagtgggtccctgactcctgacccccgagcagcctaactgggaggcaccccccagcaggggcacactgacacctcacacggcagggtattccaacagacctgcagctgagggtcctgtctgttagaaggaaaactaacaaccagaaaggacatctacaccgaaaacccatctgtacatcaccatcatcaaagaccaaaagtagataaaaccacaaagatggggaaaaaacagaacagaaaaactggaaactctaaaacgcagagcgcctctcctcctccaaaggaacgcagttcctcaccagcaacagaacaaagctggatggagaatgattttgacgagctgagagaagaaggcttcagacgatcaaattactctgagctacgggaggacattcaaaccaaaggcaaagaagttgaaaactttgaaaaaaatttagaagaatgtataactagaataaccaatacagagaagtgcttaaaggagctgatggagctgaaaaccaaggctcgagaactacgtgaagaatgcagaagcctcaggagccgatgcgatcaactggaagaaagggtatcagcaatggaagatgaaatgaatgaaatgaagcgagaagggaagtttagagaaaaaagaataaaaagaaatgagcaaagcctccaagaaatatgggactatgtgaaaagaccaaatctacgtctgattggtgtacctgaaagtgatgtggagaatggaaccaagttggaaaacactctgcaggatattatccaggagaacttccccaatctagcaaggcaggccaacgttcagattcaggaaatacagagaacgccacaaagatactcctcgagaagagcaactccaagacacataattgtcagattcaccaaagttgaaatgaaggaaaaaatgttaagggcagccagagagaaaggtcgggttaccctcaaaggaaagcccatcagactaacagtggatctctcggcagaaaccctacaagccagaagagagtgggggccaatattcaacattcttaaagaaaagaattttcaacccagaatttcatatccagccaaactaagcttcataagtgaaggagaaataaaatactttatagacaagcaaatgttgagagattttgtcaccaccaggcctgccctaaaagagctcctgaaggaagcgctaaacatggaaaggaacaaccggtaccagccgctgcaaaatcatgccaaaatgtaaagaccatcgagactaggaagaaactgcatcaactaatgagcaaaatcaccagctaacatcataatgacaggatcaaattcacacataacaatattaactttaaatataaatggactaaattctgcaattaaaagacacagactggcaagttggataaagagtcaagacccatcagtgtgctgtattcaggaaacccatctcacgtgcagagacacacataggctcaaaataaaaggatggaggaagatctaccaagccaatggaaaacaaaaaaaggcaggggttgcaatcctagtctctgataaaacagactttaaaccaacaaagatcaaaagagacaaagaaggccattacataatggtaaagggatcaattcaacaagaggagctaactatcctaaatatttatgcacccaatacaggagcacccagattcataaagcaagtcctcagtgacctacaaagagacttagactcccacacattaataatgggagactttaacaccccactgtcaacattagacagatcaacgagacagaaagtcaacaaggatacccaggaattgaactcagctctgcaccaagcagacctaatagacatctacagaactctccaccccaaatcaacagaatatacctttttttcagcaccacaccacacctattccaaaattgaccacatagttggaagtaaagctctcctcagcaaatgtaaaagaacagaaattataacaaactatctctcagaccacagtgcaatcaaactagaactcaggattaagaatctcactcaaagccgctcaactacatggaaactgaacaacctgctcctgaatgactactgggtacataacgaaatgaaggcagaaataaagatgttctttgaaaccaacgagaacaaagacaccacataccagaatctctgggacgcattcaaagcagtgtgtagagggaaatttatagcactaaatgcctacaagagaaagcaggaaagatccaaaattgacaccctaacatcacaattaaaagaactagaaaagcaagagcaaacacattcaaaagctagcagaaggcaagaaataactaaaatcagagcagaactgaaggaaatagagacacaaaaaacccttcaaaaaatcaatgaatccaggagctggttttttgaaaggatcaacaaaattgatagaccgctagcaagactaataaagaaaaaaagagagaagaatcaaatagacacaataaaaaatgataaaggggatatcaccaccgatcccacagaaatacaaactaccatcagagaatactacaaacacctctacgcaaataaactagaaaatctagaagaaatggatacattcctcgacacatacactctcccaagactaaaccaggaagaagttgaatctctgaatagaccaataacaggctctgaaattgtggcaataatcaatagtttaccaaccaaaaagagtccaggaccagatggattcacagccgaattctaccagaggtacatggaggaactggtaccattccttctgaaactattccaatcaatagaaaaagagggaatcctccctaactcattttatgaggccagcatcattctgataccaaagccgggcagagacacaaccaaaaaagagaattttagaccaatatccttgatgaacattgatgcaaaaatcctcaataaaatactggcaaaccgaatccagcagcacatcaaaaagcttatccaccatgatcaagtgggcttcatccctgggatgcaaggctggttcaatatacgcaaatcaataaatgtaatccagcatataaacagagccaaagacaaaaaccacatgattatctcaatagatgcagaaaaagcctttgacaaaattcaacaacccttcatgctaaaaactctcaataaattaggtattgatgggacgtatttcaaaataataagagctatctatgacaaacccacagccaatatcatactgaatgggcaaaaactggaagcattccctttgaaaaccggcacaagacagggatgccctctctcaccgctcctattcaacatagtgttggaagttctggccagggcaatcaggcaggagaaggaaataaagggtattcaattaggaaaagaggaagtcaaattgtccctgtttgcagacgacatgattgtatatctagaaaaccccatcgtctcagcccaaaatctccttaagctgataagcaacttcagcaaagtctcaggatacaaaatcaatgtacaaaaatcacaagcattcttatacaccaacaacagacaaacagagagccaaatcatgggtgaactcccattcgtaattgcttcaaagagaataaaatacctaggaatccaacttacaagggatgtgaaggacctcttcaaggagaactacaaaccactgctcaaggaaataaaagaggacacaaacaaatggaagaacattccatgctcatgggtaggaagaatcaatatcgtgaaaatggccatactgcccaaggtaatttacagattcaatgccatccccatcaagctaccaatgactttcttcacagaattggaaaaaactactttaaagttcatatggaaccaaaaaagagcccgcattgccaagtcaatcctaagccaaaagaacaaagctggaggcatcacactacctgacttcaaactatactacaaggctacagtaaccaaaacagcatggtactggtaccaaaacagagacatagatcaatggaacagaacagagccctcagaaataatgccgcatatctacaactatctgatctttgacaaacctgagaaaaacaagcaatggggaaaggattccctatttaataaatggtgctgggaaaactggctagccatatgtagaaagctgaaactggatcccttccttacaccttatacaaaaatcaattcaagatggattaaagatttaaacgttaaacctaaaaccataaaaaccctagaagaaaacctaggcattaccattcaggacataggcgtgggcaaggacttcatgtccaaaacaccaaaagcaatggcaacaaaagacaaaattgacaaatgggatctaattaaactaaagagcttctgcacagcaaaagaaactaccatcagagtgaacaggcaacctacaacatgggagaaaattttcgcaacctactcatctgacaaagggctaatatccagaatctacaatgaactcaaacaaatttacaagaaaaaaacaaacaaccccatcaaaaagtgggcgaaggacatgaacagacacttctcaaaagaagacatttatgcagccaaaaaacacatgaagaaatgctcatcatcactggccatcagagaaatgcaaatcaaaaccactatgagatatcatctcacaccagttagaatggcaatcattaaaaagtcaggaaacaacaggtgctggagaggatgcggagaaataggaacacttttacactgttggtgggactgtaaactagttcaaccattgtggaagtcagtgtggcgattcctcagggatctagaactagaaataccatttgacccagccatcccattactgggtatatacccaaatgagtataaatcatgctgctataaagacacatgcacacgtatgtttattgcggcactattcacaatagcaaagacttggaaccaacccaaatgtccaacaatgatagactggattaagaaaatgtggcacatatacaccatggaatactatgcagccataaaaaatgatgagttcatatcctttgtagggacatggatgaaattggaaaccatcattctcagtaaactatcgcaagaacaaaaaaccaaacaccgcatattctcactcataggtgggaattgaacaatgagatcacatggacacaggaaggggaatatcacactctggggactgtggtggggtcgggggaggggggagggatagcattgggagatatactaatgctagatgacacattagtgggtgcagcgcaccagcatggcacatgtatacatatgtaactaacctgcacaatgtgcacatgtaccctaaaacttagagtataataaaaaaaaaaaa

SEQ ID NO: 873 - DNA, 5556 bp, Homo sapiens
  source 1..5556: mol_type = other DNA
aacctctgcagtcttaaacgtccttgtctgacagctctgaagagaccagtggttctcccaacatggtgtttgagctctgagaactggacagactgcctcctcaagtgggtccctgacccctttgtagcctaactgggagacacctcccagtagaggcctactgacacctcatacaggcgggtgcctctctgggacgaagcttccagaggaaggatcaggcagcaatatttgctgttcagcagcctccgctggtaatacccaggcaaacaggatctggagtggacctccagcaaactccaatagacctgcagctgagggacctgactgttagaagaaaaactaacaaacagaaaggaatagcatcaacatcaacaaaaaggacatccataccaaaaccccatctgtaggtcaccatcatcaaagaccaaaggtagataaaaccacaaagatggggagagaccagagcagaaaagctgaaaattctaaaaaccagagcgtctcttctcctccaaaggatcacagctcctcaccagcaacggaacaaagctggacggagaatgactttgacaagttgacagaagtaggcttcagaagtttggtaataacaaactcatctgagctaaaggaggatgtttgaacccattgcaaggaagctaaaaactttgaagaaagattagacgagtggcaaactagaataaacagtgtagagaagaccttaaatgacctgatggagctgaaagccatggcacaagaactacgtgatgcatgcacaagcttcaatagccgattcgatcaagtggaagaaagggtatcagtgattaaagattaatgaaataaagcgagaagtttagagaaaaaaagagtaaaaataaatgaacaaagcctccaagaaatataggactatgtgaaaagaccaaatctacgtttgattggtgtacatgaaagtgacaaggagaatggaaccaagctggaaaacacttttcaggatattatccaggagaacttccccaacctagcaaggcaggccaacattcaaattgggaattacagagaacacgaaaagataactcctcgagaagagcaaccctgagacacataattgtcagattcaccaaggttgaaatgaaggaaaaactgttaagggcagccagagagaaatgtagggttaaccacaaagggaagcccatcagactaacagcagatctctcggcagaaactctgcaagccagaagagagtgggggccaatattcaacattcttaaagaaaagaattttcaacccagaatttcatatccagccaaaccaagcttcataagtgaaggagaaataaaatcctttacagacaagcaaatgctgagagattttgtcaccaccaggcctgccttacaagagctcctgaagaaagcactaaacatgggaagaaacaaccagtaccagccactgcaaaaacatgccaaattgtaaaaaccatcgatgctaggaagaaactgcatcaactaatgggcaaaataaccagctaacatcataataacaggatcaaattcacaaataacaatactaaacttaaatgtaaatgggctaaatgccccaattaaaagacacagactggcaaattggatagagtcaagagctgtcagtgtgctgtattcaggagacccatctcacgtgcagagacacacataggctcaaaataaagggatggaggaagatctaccaagcaaatggaaaggcaaaaaaagcaggggttgcaatcctagtctctgataaaacactttaaaccaacaaagatcaaaagagacaaggccattacataatggtaaagggatcaattcaacaagaagagctaactatcctaaatatatatgcacccaatacaggagcacccagattcataaagcaagttctcagagacctacagagagacttagactcccacacaataataatgagagactttaacaccccactgtcaatattagacagatcaatgagacagaaggttaacaaggatatccaggacttgaactcagctctgcaacaagcagacctaatagacatctacagaactctccaccccaaatcaacagaatatacattcttctcagcaccacatcgcacttattccaaaattgaccacatagttggaagtaaagcactcctcagcaaatgtaaaagaacagaaatcacaacaaactgtctctcagaccacagtgcaatcaaattagaactcaggattcagaaactcactcaaaactgcacaactacatggaaactgaacaacctgctcctgaatgactgctgggtaaataactaaatgaaggtagaaataaagatgttctttgaaaccaatgagaacaaagacacaacataccagaatctctgggacacgtttaaagcagtgtgtagaggaaaatttatagcactaaatgcccaccaagagaaagcagggagagatctaaaattgacaccctaacatcacaattaaaagaattagagaagcaagagcaaacaaattcaaaagctagaagaaggcaagacataactaagatcagagcagagttgaaggagatagggacacaaaaaacccttaaaaaaataaatgaatccaggagctggttttttgaaaaaaacaacaaaattgatagaccgctagcaagactaataaagaagaaaagagagaagaatcaaatagatgcaataaaaaatgataaaggggatatcaccaccgatcccacagaactacaaactaccatcagagaatactataaacacctctacacaaatgaactagaaaatctagaagaaatggataaattcctggacagatacaccctcccaagactaaaccaggaaaaagttgaatccctgaatagaccaataacaggctctgaaattgaggcaataattaatagcctaccaactaaaaaaagcccaggaccagatggattcacagccaaattctaccagaggtacaaagatgggctggtaccattccttctgaaactattccaatcaatagaaaaagagggaatcctccctaactcattttttgaggccagtatcatcctgataccaaagccgggcagagacacaacaaaaaaagagaattttagaccaatatccctgatgaacatcgatgcaaaaaccctcaataaaatactggcacaccaaatccaacagcacatctaaaagcttatccaccacgatcaagttggcttcatccctgggatgcaaggctggttcaacatatgcaaatcaataaacgtaatccatcacataaacagaaccaaagacaaaaaccacttgattatctcaatagatgcagaaaagacctttgacaaaatttaacagtgcttcatgctaaaaactctcaataaactaggcattgatggaatgtatctcaaaataataagatctatttatgacaaacccacaaccaatatcatactgaatgggcaaaaactggaagcattccatttgaaaactggcccaagacagggatgccctctctcaccacacctattcaatagtgttggaagttctggccagggcaatcaggcaagagaaagaaataaagggtattcaattaggacaagaagaagtcaaattgtccctgtttgcagatgacatgattgtatatttagaaaaccccattgtctcagcccaaaatctccttaagctgataagcaacttcagcaaagtctcaggatacaaaatcaatgtgcaaaaatcataagcatccctatacaccaataacagacaaacagccaaatcatgagtgaactcccattcacaattgctacaaagagaataaaatacttaggaatacaacttacaagggatgtgaaggacctcttcaaggggaacctcaaaccactgctcaatgaaataaaagaggatacaaacaaacggaaggacattccatgctcatggataggaagaatcagtatcgtgaaaatggccatactgcccaaggtaatttatagattcaataccatccccatcaagctaccaatggctttcttcacagaattggaaaaaactactttaaagtttatatggaaccaaaaaaaagcccacattgtcaagacaatcctaagcaaaaagaacaaagctggaggcatcatgctacctgacttcaaactatagtacaaggccacagtaaccaaaacaacatggtactggtaccaaaacagagatacagaccaatggaacagaacagaggcctcagaaataacaccacacatctacaaccatctgatctttgacaaacctgacaaaaagaagcaatggggaaaggattccctatttaataaatggtgctgggaaaactggctagccatatgtagaaagctaaaactggatcccttccttacaccgtatataaaaattaattcaagatggattaaagaattaaatgttagatctaaaaccataaaaaccctagaagaaaacttaggcaataccattcaggacataggcatgggcaaggacttcatgactaaaacaccaaaagcaatggcaactaaagccaaactagacaaatgggatctaattaaactaaagagcttccacacagcaaaagaaactaccatcagagtgaacaggcaacctacagaatgggagaaaatttttgccatctacccatctgacaaagggctaatatccagaatctacaaagaacttaaacaaattaaaaaaaaaaaattcaaccccatcaaaaagtgggcaaaggacatgaacagacacttctcaaaggaagacatttatgcagccaacagacacatgaaaaaatactcatcatcactggccatcagacaaatgcaaatcaaaaccacaatgaggtatcatctcacaccagttagaatggcgatcattaaaaagtcaggaaacaacagatgctggagaggatgtggagaaagaggaacacttttacactgttggtgggactgtaaactagttcaaccattgtggaggacagtgtggtgattcctcagggatctagaactagaaataccatttgacccagccatcccattactgggtatatacccaaaggattgcaaattatgctactataaagacacatgcacgtgtatgtttattgtggcactattcacaataacaaagacttggaaccaacccaaatgtccatcaatgatagactggattaagaaatgtggcacatatacaccatggaatactatgcagccataaaaaaggatgagttcatgtcctttgtagggacatggatgaagctggaaaccatcattctgagcaaactatcccaaggacagaaaaccaaacaccgcatgttctcactcataggtgggaattgaacaatgagaacacctggacctaggtcggggaacatcacacaccggggcctttcgtggggtagggggaggagggagggatagcattaggagaaatatctaatgtaaatgacgagttaatgggtgcagcaaaccaacatggcacatgtatacatatgtaacaaacctgcacgttgtgcacgtgtaccctagaacttaaagtataataaaaagaaaaaaa

SEQ ID NO: 874 - DNA, 1034 bp, Homo sapiens
  source 1..1034: mol_type = other DNA
aaaagacaaaattgacaaatgggatctaattaaactaaagagcttctgcacagcaaaagaaactaccatcagagtgaacaggcaacctacaacatgggagaaaatttttgcaacctactcatctgacaaagggctaatatccagaatctacaatgaactcaaacaaatttacaagaaaaaaacaaacaaccccatcaaaaagtgggcgaaggacatgaacagacacttctcaaaagaagacatttatgcagccaaaaaacacatgaagaaatgctcatcatcactggccatcagagaaatgcaaatcaaaaccactatgagatatcatctcacaccatttagaatggcaatcattaaaaagtcaggaaacaacaggtgctggagaggatgcggagaaataggaacacttttacactgttggtgggactgtaaactagttcaaccattgtggaagtcagtgtggcgattcctcagggatctagaactagaaataccatttgacccagccatcccattactgggtatatacccaaatgagtataaatcatgctgctataaagacacatgcacacgtatgtttattgcggcactattcacaatagcaaagacttggaaccaacccaaatgtccaacaatgatagactggattaagaaaatgtggcacatatacaccatggaatactatgcagccataaaaaatgatgagttcatatcctttgtagggacatggatgaaattggaaaccatcattctcagtaaactatcgcaagaacaaaaaaccaaacaccgcatattctcactcataggtgggaattgaacaatgagatcacatggacacaggaaggggaatatcacactctggggactgtggtggggtcgggggagggggaagggatagcattgggagatatacctaatgctagatgacacattagtgggtgcagcgcaccagcatggcacatgtatacatatgtaactaacctgcacaatgtgcacatgtaccctaaaacttagagtataataaaaaaaaaaaa

SEQ ID NO: 875 - DNA, 7471 bp, Homo sapiens
  source 1..7471: mol_type = other DNA
ctggagcccagcgtggggcccttctctagggtgaaggtacgctaagaacgtgagcattgagtacagccgatgagagattcccgagtacgtccacagtcagccttgcggttagcttgtgtgctgggaggaatccaggataacaatggggcaaactgaaagtaaatatgcttcttatctcagcttcattaaaattctcttaagaagagggggagttaaagcttctacagaaaatctagttacgctatttcaaacaatagaacaattccgcccatggtttccagaaaagggaactttagatttaaaagattgggaaaaaattggcaaagaactaaaacaagcaattagggaaggtaaaatcatcccacttacagtatggagtgattgggccactattaaagcaactttagaacaacttcaaatagaagaagatagggtttcagtctttgatgcccctgaaagctgtgtaatagattgtgaagaagaggcaggaacagagtttaagaaaggaatggaaagttcacattgtaaaaatgcagtagagcctgtactgacttggtcaatgcagaatgttgactataatcaattacaggaggtaatatatcctgaatcatcaaaattgggggaaggaggtccagaattatttggaccatcagagtttagaccacgatggccaccaactccttctcccgcggttcagatgcctgtgatgtcacaatctcaaatgccaatccaggcacagtatccgcaataccagccagtagaaaataaaacccaaccatcggtagtttatcaacaccagccgccagccgcatttcagtatccgccgtctccagaggttcagtatggatctcaggcggtgcgtcctgtgccaaatagcaaggcactatatcaacccacggcgatggcgtttgatcttacggtaccacctagtggacaagatagtgcactgcatgagaccattgctacagccagaaaacagggagatcttgaggcatggcaatatccggtaatgttacaaccgatgccggccgggaaagggagtcaagcaggagttaaacaatatggacctaactctccttatacgagaatattattaaattccattgctcatggaaatagacttatttcttatgattgggaaattctggctatatcttccctttcaccctctcagtatctccagtttaaaacctggtggattgatggggtacaagaacaggtacgaaaaaatcaggctactaatcctgttgcttatatagatgaagaccaattgctaggaagaggtccaaactgggacactattaaccaacaatcagtaatgaaaatgaggctattgaacaactgtaagggctatttgcctcagggcctgggaaaacattcaggacccaggaacctcatgcccttcttttagttcaatcagacaaggctctaaagagccatatccagactttgtggcaaggttgcaagatgcagctcaaaaatccattgcaggtaacgcccgaaaagttattgtagaaataatggcttatcaaaacgcaaattcagagtgtcaatcagccataaagccattaagaggaaatgtttcagcaggagttgatgtaattacagaatatgtgaaggcttgtgatgggattggaggagctatgcataaggcaatgccattggctcaagcaattacaggggttgctataggaggacaagttaaaacatttgggggaaaatgttataattgtggtcaaatcggtcatctaaaaaagaattgcccgagcttaaataaacagcaaaaaaaaaaaaaaaaaaaaaaaaaaaaagagccacctggcctgtgtccaagatgtggaaaaggaaaacattgggctaaggcatgtcgttctaaatttgataaaaatggacaaccattgtcgggaaacggcaagaggggccagccccaggccccgcaacaaagtggggcattcccgattcagccatttgttcctcagggttttcagggacaacaacccccacagtaaataccaccatttcaggaaatcagccaattacaatacgacaattatcctctgtcacagcaggcagtgctgcagtagatttatgttctactcaaatgatttctttactccgtggagagcccctgcaaaagattcctacaggggtatatggcccgctgccacaagggatggtaggccttattttaggaagatctagtctaaatttgaaaggagttcaaattcatactggggtaattgactcagattataaaggggaaattcagttagtgatcagctgtactgttccctggagtgccaatccaggtgatagaattgctcaattactgctcttgccttatattaaaattggggatagcaaaacagaaagaacaggagggtttgcaagtaccaacactgctggaaaagctgtttattgggctagtcagctctcagagaatagatctgtgtgtacagttactattcatggaaaacaatttgaaggattagtggatactgggtctgatgtttctatcattgccttaaatcaatggccaaaaaattggcctaaacaaaagcctgttacaggacttgttggtgtgggcactgcctcagaagtgtatcaaagtgccaggattttacattgtctaggacctgataatcaagagagtacagttcagcctatgattacttctattccaattaatttatggggccgagacttattagaacagtggcatgcagagattactattccagtctctctgtacagccccacgagtcaaaaaatcatgactaaaatgggatagctccctggcaaaggactagggaaaaatggagaaggcattaaagttccaattgaggctaagggaaatccagaaagaaaaggactagggtatcctttttaggggtggccactgtagagcctccaaaacccatttcattaacttggaaaacagaaaagcctgtatgggtaaatcagtggccactaccaaaacaaaagctggaggccttacacttattggcaaaataacaattagaaaagggacatactgagcattcattttcgccttggaattctcctgtgtttgtaattcagaaaaaatcaggcagatggcgcatgctaactgatttaagagccgttaatgcagtaattcaacccatggggcctctccaacctgggctgccctctccagccatgatccccgaagactggcctttaattataattgatctgaagtattgcttttttaccattcctctggcaaaacaggattttgaaaaattggctttcactataccagccataaataataaagaaccagccactagatttcagtggaaagtgttgcctcagggaatgcttaatagtccaactatttgtcagacttttgtagctcaagttcttcaaccagttagagacaagttttcagactgttatatcattcattatgttgatgatattttgtgtgctgcagaaacaagagacaaattaattgactgttacacatttctgcagacagaggttgcaaacgcaggcctgacaatagcatctgataagattcagatctccactccttttcattatttgggaatgcaggtagaggagagaaaaattaaaccacaaaaagtagaaataagaaaagacacattaagaacattaaatgacttcaaaaattgctaggagatattaattggattcggccaactctaggcatccctacttatgccatgtcaaatttgttctctatcttgagaggggatccagacttaaatagtaaaagaatattaactccagaggcaactaaagaaatagaattagttgaagaaaaatttcagtcagcaaaagtaaatagaatagatcacttagccccactccaacttttaatttttgctactgcacattctccaacaggcattattgttcaaaatacagatcttgtggagtggtcattccttcctcacagtacagttaagacttttacattgtacttagatcaaatggctacattaattggtcaggcaagactatgaatagtaaaattgtgtggaaatgacccagataaaatcattgtttctttaaacaaggaacaggatagacaagtctttatcaattctggtgcagggcagattggtcttgctgattttgtgggaattattgataatcattacccaaaagcaaaaatcttccagtttttgaaattgactacttggattttacctaaaattaccagacaaaaacctctagaaaatgctctgacggtgtttactgatggttccagcaacggaaaagtggcttacactgggccaaaagaacaagtcattgaaactcaatatcactcagctcaaagagcagaattggttgctgtcatttcagtgttacaagattttaatcagcctattaacattgtttcagattttgcatatttagtacaggctacaaaagatgttgagacagccctaatcaaatatagtatggatgatcagttaaatcagctgtttaaattgttacaacaaactgtaagaaaaagaaatttcccattttatattgctcatatccgagcacatactaatttaccagggcctttaactaaggcaaatgaacaagctgacttgctagtatcatctgccttcatggaagcacaagaacttcaggccctcactcatgtaaatgcaacaggattaaaaaacaaatttgatatcacatggaaacaagcaaaaaatgttgtacaacattgtgctcagtgtcaagtcttacacctgcccgctcaagaggcaggagttaatcctagaggtttatgtcctgatgcattatggcaaatggacgtcacacatgtaccttcatttgcaaaattgtcatttgtccatgtgacagttgatacttattcacatttcatatgggcaacctgccagacaggagaaagtacttcccatgttaaaagacatttattatcttgttttgcagtcatgggatttccagaaaaaattgaaacaggtaatgggccaggatactgtagtaaagcatttcaaaaatccttaaatcagtggaaaattacacatacaacaggaatccttaatttccaaggacaggccataattgaaagaactaatagaacactctaagctcaattggttaaacaaaagaaggaaaaagtaaggagtacaatactccccagatgcaacttaatctagcactctatactttaaattttttaaatatatatagaaatcagaccactacttctgcagaacaacattttactggtaaaaagaacagcccacatgagggaaaactgatttggtggaaagacaacaaaaataaaacatgggaaataggtaaggtgataacatgggggtgaggttttgcttgtgttccagcagcagaaaatcagcttcctctttgggtacccactagacatttgaagttctacaatgaacccatcagaggtgcaagggaaggcacctccgcagagacagagaacccgcaatcgaacatcatcgactcgcagggtgaacgaaatggtgatatcagaagaacagatgaagttgccatccaccaagaaagtggggccgccgacctgggcccagctaaagaagctgacacagttagctgaaaaaagcctggaaaacacaagggtaacacaaactccagagaatatgctacttgcagatttaatgattgtatcagcggtggtaagtctccctatgtcttcaggagccgctacagctaactatacttactgggcctatgtgattttcccacccttaattcgagcagtcacttggatagataatcctattgaagtatatgttaataacagtgcatgggtaccaggccccacagatgaccgtggccctgcccaacctgaagaaaaaggaatgatgataaacatttccattgggtatcattatcctcctatttgcctgggaaaagcaccaggatgcttaatgcctacaatccaaacttggttgatagaagtacctactgtcagtgccaccagtaaatttacttatcatatgataagaggaatgtcgctcaggtcacaaatgaataatttacagaattcttcctatcaaagatcattaaaatttaggcctaaagggaaaccatgccccaaggaaattccaaaagaatcaaaagacccagtagtcttagtttgggaagaatgtgtggctgatactgcagtggtactacaaaacaataaatttgaaactattatagactaggcccctcaaggccaattatattatgactgtatgggccagacccactcatgttcacaggccccatgtgtctggcccactaatccggcctgtgatagtgatttaactaaaaggctagaccaggtttatagaaggctagaatcaccctatccatggaaatggggtgaaaagaggatttcatcaccccgaccaaagttagttagtcctgtttttggtcctgaacacccagaattatggaagctcactgtggcctcgtaccacattagaatttggtctggaaatcaagttatgggaacaagaaatcataagccatattaactattaacctaaattccaatctgaaaattcctttgcaaagttgtgtaaaacccccttatatgctagttgtagaaaacatagctattaaaccagattcccaaactacaaccagtgaaaattgtagattgtttacttgcattgattcaactttcgattggcagaatgctattctgttagtaagggcaagagaaggcgtgtggatccctgtgtccatggatcgaccatgggaggcttctccatccgtacataccttaagtattaaaaggagttctaattagatttaaaagattcatttttactttgattgcagtgattatgggtcttattgcagtcacagctactgctgcggctgctggaattgctttacactcctctgttcaaactgcagaatatgtgaataattggcaaaagaattcctcaaaattgaggaattcttagactcaaacaggtcaaaaattggcaaatcaaattaatgatcttagacaaactgttatttggatgggagataggctcatgagcttagaatatctttttcagttacagtgtgactggaatatgtcagatttttctattacacctcgagcctgtaatgaatctgaacagcactgggacatggttagaagccatctacaaggaagagaagataatcttaccttagatatttctaaattgaaagaacaaatttttgaaacatcaaaagcccagttaaatctggtgtcagaaacggaggcaatggtaaaagctgttgatagcctcacaaatcttaaccctgtcacttgggttaaaaccattggaaattccactattgcaaattttgtattaattcttgtatgtctgtcctctctattgttagtctacaggtgtatccagcagctccggagagacagcgaccagggagaaggggccatgatgaccatggcggttttgtcaaaaagaaaagcgggaaa

SEQ ID NO: 876 - DNA, 436 bp, Homo sapiens
  source 1..436: mol_type = other DNA
tagttatttatttaaaataaagggactcctatgtttacaaaaagtcttgtacaaaaatatttgtagcagctttattcatagcagccgaaaattagaaatagctcaattgtcttaatagtagaatggataaactgtgatatattcatacaatgaaatagtacttggtaataaaaagaaacaaactacagctgcatgcaacaatgtggatgtatcacaaaaacatgatgctgaatttaaaaaaggcaaacagaaaagaatgcatgatgtacaattcccttcatatgagcaggtaaaattaatctatatgatagaaaccaaaccactacttgcttttggtaggggtggaacagaaaaggacactgattgggaagggacagaaaaaaatgtactaggattaagaaaatgttttgtgtcttgagtgggatgtgagttatat

SEQ ID NO: 877 - DNA, 186 bp, Homo sapiens
  source 1..186: mol_type = other DNA
gtgcaggtgactcaggggctgctgtggagctggttaaggagaaggaggatatgcccagtgactgggaccctgccacagcatcaaacagataagctcacttctgtctgttttactgtacattgagaatatgtgtaagtcattttttaaaaggcttcttgtgattaaaagagaaaattctgaaaacca

SEQ ID NO: 878 - DNA, 2202 bp, Homo sapiens
  source 1..2202: mol_type = other DNA
gatgggtcttacctgcaagtgtcacctacttactggcctagagggtggagtgcacagtccattacagcatttgcttacacaactatagagcacttgggaacaagataagcttcttacaatcattgcctataccaccctggctactcaggaggttgctgctactaaaactggcatttgagaaagccaccgcactaagactatttatgtccaaggaaacaatactgtctttagcactgaacacacctagaagaaaagccaaaagacgctacccaacatatactacagttacattctaaaaaaaagaaaaggcctgccccaataaaagtaaatgtaaaaatacgaagtggcaactatatctccagatgcacagaaatcagcaaaatagtacaggaagcattaaaaggcaaggaattatgacacccccaaatgagtacagtaattttctgttaatgaatccaaaccaaaaataaatcagagtgccaggtaaagcatttagaatattggttttaaagaagctcaatgagatccaagagagttctgaaaactaacacaatgaaatcagaaaatcaattcaggatataaacaagaaatttactgagaagataaacatcttaaaaaataacagaacttccggaaatgaaaaattcattgaagaaaatacagaataaatttgaaggcattaaaagtagactggactaagcagaagaatgaatctcagaacttgaacacaagtcttttgcattaagccagacaaaaacaaaaaggacaaaaaagaatgcacaagccctttgagatatatgagaccacataaatcaatcacacttgtattcctgaggaagaagaaaaagtaaaaagttgagaaaacctatataagggaataattgacaaaacttccctagtctagcaagagatttagacgttcagatatcaaaagccccagtgattgtcaagaaaatcaattgcagaacagacttcatgccatataatcagactgtgaaaaggcaccatgaaagaaataattataaaatcagaaagagaaaagcatctagtcacctataaaggaatccccatcagactaatagacttatcagcagaaaccttaaaacccaaaagagaatgagatgctattttcaaagagctaaaagaaaatgtcagccaagaattttatatcctgtcagaataaactttataaatggagaagaaataaagccttttacaggcaagcaaacactgagggaatttgtcaccactagccagccaaacaagaattgctcaaaggagtcctaaacatggaaatgaaagtataaaactcacagactttataaaacaatcacacaagggagcaggagaaaggaatcaaatagcaacacaacagaactccaccaaaccagaaagacaaacagagaaaaagatagaaacaaagaatttataaaagaactagataacagttaacaatatgacagaaacaaaacctcacatatcaatattaaccttgagtgtaaatggaataaatactccatttaaaagatttagattggcaggatggattaaaaacatgatttaattatatgctgcttacaagaaactcaccttacccataaagacaaatatagactgaaagtaaagggatggaaaaagatattccataccaaaagaaaccaaaagtaagcaggaataagtatatttaaatcagacaaaatagacatcagatcaaaaacagtaaaaaaaacaagtcaaagaaggccagtatatagtgataaagtgatcagttcaggaagagaatgtaacaatcatgtagatagatagatataaatcatatatatacatatataaatatatatctcaatccttgagcaaccaaattcataaaataattactgttaggtctaaggaaagatatggacagcaatacaataatagtgggagatttcaacaccccactcacagcactagacagatcatctggacagaaaatcaacaaagaaacattagacttaaactatactctagaacaaccggactcaccaaacatacagaacattctactgaacaactgcagaatatacatacttctcatcagcacatcgaacattctccaagatagaccatatgttaggccacagtacaagtctcaataaattttaaaaaattggaatcatatcaagtatcttctcaaatcacagcagaataaaactacaaatc

SEQ ID NO: 879 - DNA, 745 bp, Homo sapiens
  source 1..745: mol_type = other DNA
gctggattggccacaaaatcgaattactgaagtaagtgcaaaacgacaaattgtcacagaatacagagaaaaggggaaaagaaattaagaggagaaaaagagagatctagagggccggtccaggagatacaatctatgcataataggaatacctgaaactgaggacagagcaagtggagctgaaacaataaaggatctacttgaaaaaattttccagaattgaagaacgaactagatctacaaatggaaaaggctcataggatacctttaaagtttaatgaaaagaaagcagcatctagacatatccgggtgacgtttttgaatttcaaagacgaaacattttacaagcatccagtcagagaaagcaggttacttacaaaggggcaaaagtcaggctgacctcagatttttctcctgcaattctaaatgccagaagacagtggaacaatatctagagtgttaagggaaaataattttgagccaagaattatatactctgccaagttatcatttctttacaaaggaaactggaagacattcttagatatacaggggttaggaaagtatatcaaccaagaactttccctgaaaattttgctgaaggatttactgcagctaacagagaacctgaattaaaataagaatagggaggcaattgtatgaaagaactgatggtatgcattaaaactagttaaggagcattaagtttaaattgttatgtatagggcattaaaactaaatacaa

SEQ ID NO: 880 - DNA, 6024 bp, Homo sapiens
  source 1..6024: mol_type = other DNA
ggaggagccaagatggccgaataggaacagctccggtctacagctcccagcatgagcgccgcagaagacaggtgatttctgcatttccatctgaggtacccggttcatctcactagggagtgccagacagtgggcgcaggtcagtgggtgcgtgcaccgtgtgcgagccgaagcagggcgaggcattgcctcactcgggaagtgcaaggggtcagggggttccctttcctagtcaaagaaaggagtgacggacggcacctggaaaatcaggccactcccaccctaatactgcacttttccgacgggcttaaaaaatggtgcaccacgagattatatcccgcacctggctcagagggtcctatgcccacggagtctcgctgattgctagcacagcagtctgagatcaaactgcaaggcagcagctaggctgggggaggggcgcccgccattgcccaggcttgcttaagtagacaaagcagccaggaagctcgaactgggtggagcccaccacagctcaagaaggcctgcctgcatctgtaggctccacctctgggggcagggcacagacaaacaaaaagacagcagtaacctctgcagacttaaatgtccctgtctgacagctttgaagagagcagtggttctcccagtatgcagctggagatctgagaaggggcagactgcctccttaagtgggtgcatgacccctgacccccgggcagcctaactgggaggcaccctccaacaggggcacactgacacctcacacggcaggttactccaacagacctgcaactgagggtcctgtctgttagaaggaaaactaacaaacagaaaggacatccacaccaaaaacccatctgttcatcaccatcatcaaagaccaaaagtagataaaaccacaaagatggggaaaaaacagaacagaaaaactggaaactctaaaaagcagagtgcctctcctcctccaaaggaatgcagttcctcaccagcaacggaacaaagctggatggagaatgactttgacgagctgagagaagaaggcttcagacgatcaaattactctgagctatgggaggacattcaaaccaaaggcaaagaagttgaaaactttgaaaaaaatttagaagaatgtataactagaataaccaatacagagaagtgcttaaaggagctgatggagctgaaaaccaaggctcgagaactacgtgaagaatgcagaagcctcaggagccgatgcgatcaactggaagaaagggtatcagcaatggaagatgaaatgagtgaaatgaagcgagaagggaagtttagagaaaaaagaataaaaggaaatgagcaaagcctccaagaaatatgggactatgtgaaaagaccaaatctacgtctaattggtgtacctgaaagtgatggggagaatggaaccaagttggaaaacactctgcaggatattatccaggagaacttccccaatctagcaaggcaggccaacgttcagattcaggaaatacagagaacgccataaagatactcctcgagaaagcaactccaagacacataattgtcagattcaccaaagttgaaatgaaggaaaaaatgttaagggcagccagagagaaaggtcgggttaccctcaaagggaagcccatcagactaacagcggatctctcagcagaaaccctacaagccagaagagagtgggggccaatattcaacattcttaaagaaaagaattttcaacccagaatttcatatccagccaaactaagcttcataagtgaaggagaaataaaatcctttacagacaagcaaatgctgagagattttgtcaccaccaggcctgccctaaaagagctcctgaaggaagcgctaaaaatggaaaggaacaaccggcaccagccgctgcaaaatcatgccaaagtgtaaagaccatcgagactaggaagaaactgcatcaactaacgagcaaaataaccagctaacatcatcatgacaggatcaaattcacacataacaatattaactttaaatgtaaatggaccaaatgctccaattaaaacacacagactggcaaattggataaagagtcaagacccatcagtgtgctgtattgaggaaacccatctcacgtgcagagacacacataggctaaaaatacaaggatggaggaaaatctaccaagcaaatggaaaacaaaaaaaggcaggggttgcaatcctagtctctgataaaacagactttaaaccaacaaagatcaaaagagacaaagaaggccattacataatggtaaagggatcaattcaacaagaagagctaactatactaaatatatatgcacccaacacaggagcacccagattcataaagcaagtccttagagacctacaaagagacttagactcccacacattaataatgggagactttaacaccccactgtcaacattagacagatcaacgagacagaaagtcaacaaggatacccaggaattgaactcagctctgcaccaagcggaactaatagacatctacagaactctccatcccaaatcaacagaatatacatttttttcagcaccacaccactcctattccaaaattgaccacatactttgaagtaaatctctcctcagcaaatgtaaaagaacagaaattataacaaactatctctcagaccacaatgcaatcaaactagaactcaggattaagaatctcactcaaaaccactcaactacatggaaactgaacaacctgctcctgaatgactactgggtacataacgaaatgaaggcagaaataaagatgttctttgaaaccaatgagaacaaagacacaacataccagaatctctgggacgcattcaaagcagtgtgtagagggaaatttatagcgctaaatgcccacaagagaaagcaggaaagatccaaaattgacaccctaacatcacaattaaaagaactagaaaagccagagcaaacacattcaaaagctagcagaaggcaagaaataactaaaatcagagcagaactgaaggaaacagagacacaaaaaacccttcaaaaaattaacgaatccaggagctggttttttgaaaggatcaacaaaattgatagaccgctagcaagactaataaagaaaaaaagagagaagaatcaaatagatgcaataaaaaatgataaaggggatatcaacaccgatcccacagaaatacaaactaccatccgagaatactacaaacacctctacgcaaataaactagaaaatctagaagaaatggataaattcctcgacacatacactctcccaggactaaaccaggaagaagttgaatctctgaatagaccaataacaggatctgaaattgtggcaataatcaatagcttaccaaccaaaaagagtccaggaccagacagattcacagcctaattctaccagaggtacaaggaggaactggtaccattccttctgaaactattccaatcaatagaaaaagagggaatcctccctaactcattttatgaggccagcatcattctgataccaaagccgggcagagacacaaccaaaaaagagaattttagaccaatatccttgatgaacattgatgcaaaaatcctcaataaaatactggcaaaccgaatccagcagcacatcaaaaagcttatccaccatgatcaagtgggcttcatccctgggatgcaaggctggttcaatatatgcaaatcaataaatgtaatccagcatataaacagagccaaagacaaaaaccacatgattatctcattagatgcagaaaaggcctttgacaaaattcaaccacccttcatgctaaaaactctcaataaattaggtattgatgggatatatttcaaaataataagagctatctatgacaaacccacagccaatatcatactgaatgggcaaaaactggaagcattccctttgaaaactggcacaagacagggatgccctctctcaccactcctattcaacatagtgttggaagttctggccagggcaatcaggcaggagaagtaaatcaagggtattcaattagaaaaagaggaagtcaaattgtccctgtctgctgatgacatgattgtatatctagaaaaccccattgtcttagcccaaaatctccttaagctgataagcaacttcagcaaagtttcaggatacaaaatcaatgtgcaaaaatcacaagcattcttatacaccaacaacagacaaacagagagccaaatcatgagtgaactcccattcacaattgcttcaaagagaataaaatacctaggaatccaacttacaagggatgtgaaggacctcttcaaggagaactacaaacccctgctcaagaaaatagaagaggatacaaacaaatggaagaacattccatgctcatgggtaggaagaatcaatatcgtgaaaaaggccatactgcccaaggtaatttacagattcaatgccatccccatcaagctaccaatgactttcttcacagaattggaaaaaactactttaaagttcatatggaaccaaaaaagagcccgcatcgccaagtcaatcctaagccaaaagaacaaagctggaggcatcacactacctgacttcaaactatactacaaggctacagtaaccaaaacagcatggtactggtaccaaaacagagatatagatcaatggaacagaacagagcccttagaaataatgccgcatatctacaactatctgatctttgacaaacctgagaaaaacaagcaatggggaaaggattccctatttaataaatggtgctgggaaaattggctagtcatatgtagaaggctgaaactggatcccttccttacaccttatacaaaaattaattcaagatggattaaagacttaaacgttagacctaaaaccataaaaaccctagaagaaaacctaggcattaccattcaggacataggcatgggcaaggccttcatgtctaaaacaccaaaagcaatggcaacaaaagccaaaattgacaaatgggatctaattaaactaaagagcttctgcacagcaaaagaaactaccatcagagtgaacaggcaacctacagaatgggagaaaattttcgcaacctactcatctgacaaagggctaatatccagaatctacaatgaactcaaacaaatttacaagaaaaaaacaaccccatcaaaaagtgggcgaaggacatgaacagacacttctcaaaagaagacatttatgcagctaaaaaacacatgaaaaaatgctcatcatcactggccatcagagaaatgcaaatcaaaaccacaatgagataccatctcacaccagttagaatggcaatcattaaaaagtcaggaaacaacaggtgctggagaggatgtggagaaataggaacacttttacactgttggtgggactgtgaactagttcaaccattgtggaagtcagtgtggcgattcctcagggatctagaactagaaataccatttgacccagccatcccattactgggtatatacccaaaggactataaatcatgctgctataaagacacatgcacacgtatgtttattgcggcattattcacaatagcaaagacttggaaccaacccacatgtccaaaaatgatagactggattaagaaaatgtggcacatatatgccatggaatactatgcagccataaaaaatgatgagttcatgtcctttgtaggaacatggatgaaattggaaatcatcattctcagtaaactatcgcaagaacaaaaaaccaaacaccgtatattctcactcataggtgggaattgaacaatgagatcacatggacacaggaaggggaacatcacactctggggactgttgtggggtggggggaagggggagggatagcattaggagatatacctaatgctagatgacaagttagtgggtgcagcgcaccagcatggcacatgtatagatatgtaactaacctgcacaatgtgcacatgtaccctaaaacttaaagtataataataaaagaaaa

SEQ ID NO: 881 - DNA, 2085 bp, Homo sapiens
  source 1..2085: mol_type = other DNA
ttgaaaactggcacaagacagggataccctctctcaccactcctattcaacatagtgttggaagttctggccagggcaattaggcaggagaaggaaataaagggtattcaattaggaaaagaggaagtcaaattgtccctctttgcagatgacatgattgtatatcgagaaaaccccattgtctcagcccaaaatctccttaagctgataagcaacttcagcaaagtctcaggatacaaaatcaatgtacaaaaatcacaagaattcttatacaccaataacagacaaacagagagcccaatcatgagtgaactcccattcacaattgcttcaaagagaataaaatacttaggaatccaacttacaagggacgtgaaggacttcttcaaggagaactacaaagcactactcaatgaaataaaagaggatacaaacaaatggaagaccattccatgctcatgggtaggaagaatcaatatcgtggaaatggccattctgcccaaggtaatttatagattcaatgccatccccatcaagctaccaatgactttcttcacagaattggaaaaaactactttaaagttcatatggaaccaaaaaagagcccgcatcaccaagtcaatcctaagccaaaagaacaaagctggaggcatcacactacctgacttcaaactatactacaaggctacagtaaccaaaacagcatggtactggtaccaaaacagagatatagtcaatggaacagaacagagccctcagaaataacgccgcgtatctacaactatctgatctttgacaaacctgagaaaaacaagcaatggggaaaggattccctatttaataaatggtgctgggaaaactggctagccatatgtagaaagctgaaactgaatcccttccttacaccttatacaaaaattaattcaagatggattaaagacttacatgttagacctaaaaccataaaaaccctagaagaaaacctaggcattaccattcaggacataggcatgggcaaggacttcatgtctaaaacaccaaaagcaatggcaataaaagacaaaattgacaaatgggatctaattaaactaaagagcttctgcacagcaaaagaaactaccatcagagtgaacaggcatcctacaaaatgggagaagattttcacaacctactcatctgataaagggctaatatccagaatctacaatgaactcaaacaaatttacaagaaaaaaacaaacaaccccatcaaaaagtgggcaaaggacatgaacagacacttctcaaaagaagacatttatgcagccaaaagacacatgaaaaaatgctcatcatcactggccatcagagaaatgtaaatcaaaaccacaatgagataccatctcacaccagttagaatggcaatcattaaaaagtcaggaaacaacaggtgctggagaggatgtggagaaataggaacacttttacactgttggtgggactgtaaactagttcaaccattgtggaagtcagtgtggccattcctgagggatctagaactagaaatatcatttgacccagccatcccattactgggtatatacccaaaggactataaatcatgctgctgtaaaaacacatgcacacgtatgtttattgcggcactattcacaatagcaaagacttggaaccaacccaaatgtccaacaacgatagactggattaagaaaatgtggcacatatacaccatggaatactatgcagccataaaaaatgatgagttcatgtcctttgtagggacatggatgaaattggaaatcatcattctcagtaaactatcgcaagaacaaaaaaccaaacaccgcatattctcactcatacgtgggaattgaacaatgagatcacatggacacaggaaggggaacatcacactctggggactgttgtggggtggagggaggggggagggatagcattaggagatatgcctaatgctaaatgacgagttaatgggtgcagcacaccagcatggcacatgtatacatatgtaacaaacctgcatattgtgcacatgtaccctaaaacttaaagtataataataataaa

SEQ ID NO: 882 - DNA, 111 bp, Homo sapiens
  source 1..111: mol_type = other DNA
ttacttctggattatgggatgatgggtaaattatttttacttggctacttaaaactcttctgtattttctaaatcttcttcaaagagctttgtttgtttttaatcagaaaa

SEQ ID NO: 883 - DNA, 6492 bp, Homo sapiens
  source 1..6492: mol_type = other DNA
ggaaaaagccaagatggctgaataggaacagctccagtctacagctcccagcatgagcgacacagaagacgggtgatttctgcatttccatctgaggtactaggttcatctcactggggagtgtcggacagtgggtgcaggacagtgggtgcagcataccgagtgtgacctgaagcagggcaaggcattgcctcacccgggaagcgcaaggggtcagggaattccctttcctagtcaaagaaaggggtgacagagggcacctggaaaatcgggtcactcccaccctaataccgtgcttttccaatggtcttagcaaacggcacaccaggagattatatcccgtgcgtggctcagagggtcctacgcccacggagcctcactcattgctagcacagcaatctgaggtcaaactgcaaggcagcagcgaggctggaggaggcgcgcctgccattgccgaggcttgagtaggtaaacaaagcggccaggaagctcgaactggctggagcccactgcagctcaaggaggcctgcctgcctctgcagactccacctctgggggcagggcatagccaaacaaaaggcagcagaaacctctgcagacttaaatgtccctgtctgacagctttgaagacagtagtggttctcccagcacgcaacttgagatctgagaacggacagactgcctcctcaagtggatccctgacccccgagtagcctaactgggaggcaccccccagtaggggcagactgacacctcacatggccgggtattcctctgagacaaaacttccagaggaatgatcaggcagcaacatttgctgttcaccaatatccactgttctgcaccctctgctgctgatacccaggcaaacagggtctggagtggacttccagcaaactccaacagacctgcagctgagggttctgactgttagaaggaaaactaacaaacagataggacatgcacaccaaaaccccaactgtacgtcaccatcatcaaagaccaaaggtagataaaaccacaaagatgtggaaaaaacagagcagaaaaactggaaactctaaaaatcagagcacctctccttctccaaaggaacgcagctcctcaccagcaacggaacaaagctggacggggaatgactttgacgagttgagagaagaaggcttcagaccatgaaactactccgagctaaaggaggaagttcgaacccatggcaaagaagttaaaaaccttgaaaaaaaattagatgagtggctaacgagaataaccgatgcagagaagtccttaaaggacaagatggagctgaaaaccaaggcacgagaactacgtgatgaatgcacaagcctcagtagcccatgcgatcaactggaagaaagggtatcagtgatggaagatcaaatgaatgaaatgaagcaagagaagtttagagaaaaaagaataaaaagaaatgaacaaagcctccaagaaatatcggactatgtgaaaagaccaaatctatatctgattgatgtacctgaaagtgacggggagaatggaaccaagttggaaaacactctgcaggatattatcctggagaacttccccaatctagcaaggcaggccaacattcaaattcaggaaatacagagaatgccaaaaagatactcttcgagcagagcaactccaggacacataattgtcagattcaccaaagttgaaatgaaggaaaaaatgttaagggcagccagagagaaaagtcgggttacccacaaagggaagcccagcacactaacagctgatctctcagcagaaactctacaagccagaagagagtgggggccaatattcgacattcttaaagaaaagaattttcaatccagaatttcatatccagccaaactaagcttcataagtgaaggagaaataaaatcctttacagacaagcaaatgctgagagattttgtcaccaccaggcctgccctaaaagagctcctgaaggaagcactaaacatggaaaggaacaaccagtaccagctactgcaaaaacatgccaaattgtaaagaccatcaaggctagaaagaaactgcatcaactaacaagcaaaataaccagctaacatcataatgacaggatcaaattcacacataacgatattaaccttaaatgtaaatgggttaaatgctccaattaaaagacacagactggcaaattggataaagagtcaagacccaccagtgtgctgtattcaggaaacccatctcacgtgcagagacacacataggctcaaaataaagggatggaggaagatctaccaagcaaatggaaaacaaaaaaggcaggggttgcaatcctagtctctgataaaacagactttaaaccaacaaagatcaaaagggacaaggccattacataatggtaaagggatcaattcaacaaggagagctaactatcttaaatatatatgcacccaatacaggagcacccagattcataaagcaagtccttagtgacctacaaagagacttagactcccacacaataatagtgggagactttaacaccccactgtcaacattagacagatcaacgagacagaaagttaacaaggatacccaggaattgaactcagctctgcaccaagcggacctaatagacatctacagaactctccaccccaaatcaacagaatatacattcttttcagcaccacaccacacctattccaaaactgaccacacagttggaaataaagcactcctcagcaaatgtaaaagaacagaaattataacaaactgtctctcagaccacagtgcaatcaaactagaactcaggattaagaaactcactcaaaaccgctcaactacatggaaactgaacaacctgctcctgaatgactactgggtacataatgaaatacacctggcaatgatagagctgacccagcatgtgcccaggtgagtcctgttgaggaagtgcacggtaaaaattcacaaattgaggggtaagatggtcattttgctcaggagggctgagcaagtaactcttgaattctgattcatgctttttctttgatcaacgtcatttgtcattactgaatgccttccaaaaactcatttggatgtcgtatgtgctaaacttttctcaggcgccctctgaaccaacccagtcttcaaggtaactgctcattttatctttcagtgtttttctgtctttgactttagaaaggcaaatgatgaaaacagaattgaaaacttaggttgttttcctctgtgaaaaaatgtatagatgttctttgaaaccaacgagaacaaagacacaacataccagaatctctgggacacattcaaagcagtgtgtaaagggaaatttatagcactaaatgcccacaagagaaagcagaaaagatctaaaattgacaccctaacatcacaattaaaagaactagagaagcaagagcaaacacactcaaaagctagcagaaggcaagaaataactaagatcagagcagaactgaagaaatcagaaacacaaaaaacccttcaaaaaatcaatgaatccaggagctggttttttgaaaagatcaacaaaattgatagaccgctagcaagactaataaagaagaaaagagagaagaatcagatagatgcaataaaacatgatagaggggatatcaccaccgatcccacagaaatacaaactaccatcagagaatactataaacacctctatgcaaataaactagaaaatctagaagaaatggataaattcctcgacacatacaccctcccaagactaaaccaggaagaagttgaatctctgaatagaccaataacaggctctgaaattgaggcaataattaatagctcaccaaccaaaaaaagtccaggaccagatggattcacagccgaattctaccagaggtacaagttggagctggtaccattccttctgaaactattccaatcaatagaaaaaaagggaatcctctctaactcattttatgaggccagcatcatcctgataccaaagcctggcagagacacaacaaaaagagagaattttagaccaatatccctgatgaacatcgatgcaaaaatcctcaataaaatactagcaaaccgaatccagcagcacaacaaaaagcttatccaccatgatcaagtgggcttcatccctgggatgcaaggctggttcaacatatgcaaatcaataaatgtaatccagcatataaacagaaccagcaacaaaaaccacatgattatctcaatagatgcagaaaaggcctttgacaaaattcaacaaccttcatgctaaaaactctcaataaattgggtattgatgggacgtatctcaaaataataagagctatctgtgacaaacccacagccaatatcatactgaatgggcaaaaactggaagcattccctttgaaaactgtcacaagacagagatgccctctctcaccgctcctactcaacataatgttggaacttctggccagggcaatcaggcaggagaagaaaataaagggtattcaattaggaaaagaggaagtcaaattctccctgtttgcggatgacatgattgtatatctagaaaaccccattgtctcagcccaaaatctccttaagctgataggcaacttcagcaaagtctcaggatacaaaatcaatgtgcaaaaatcacaagcattcttatataccaataacagacaaacagagagccaaatcatgagtgaactcccattcacaattgcttcaaagagaataaaatacctaggaatccaacttacaagggatgtgaaggacctcttcaaggagaactacaaaccactgctcagtgaaataaaagaggacacaaacaaatggaagaacattccatgctcatgggtaggaagaatcaatatcgtgaaaatggccatactgcccaaggtaatttagagattcaatgccatccccatcaagctaccaatgactttcttcacagaattggaaaaaactgctttaaagttcatatggaaccaaaaaagagcccacattgccaagtcaatcctaagccaaaagaacaaagctgaaggcatcatgctacctgacttcaaactctactgcaaggctacagtaaccaaaacagcatggtactggtaccaaaacagagatatagaccaatggaacagaacagagccctcagaaatcatgctgcatatctacaagcgtctgatctttgacaaacctgactaaaacaagaaatggggaaatgattccctatttaataaatggtgctgggaaaactggctagccatatgtagaaagctgaaactggatcccttccttacaccttatacaaaaattaattcaaggtggattaaagacttaaacgttagaactaaaaccataaaaaccctagaagaaaacctaggcaataccattcaggacataggcatgggcaaggacttcatgtctaaaacaccaaaagcaatggcaacaaaagccaaaattgacacatgggatctaattaaactaaagagcttctgcacagcaaaagaaactatcatcagagtgaacaggcaacctacagaatgggagaaaatttttgcaatgtactcatctgatggagggctaatatccagaatctacaatgaactcaaacaaatttacaagaaaaaaacaaccccatcaacaagtgggagaaggatatgaacagatacttctcaaaagaagacattcatgcagccgaaagacacgtaaaaaaatgctcatcatcactggccatcagagaaatgcaaatcaaaaccacaatgagctaccatctcccaccagttagaatggcgatcattaaaaagtcaggaaacaacaggtgctggagaggatgtggagaaataggaacacttttacactgttggtgggactgtaaactagttcaaccattgtggaagttggtgtggcgattcctcagggatctagaactagaaataccattcgacccagccatcccattactgggtatatacccaaaggattataaatcatgctgctataaagacacatgcacacgtatgtttattgcagcactattcacaatagcaaagacttggaaccaagccaaatgtccaacaatgatagactggattaagaaaatgtggcacatatacaccatggaatactatgcagccataaaaaatgatgagttcatgtcctttgtagggacatggttgaagctggaaaccatcattctcagcaaactatcacgaggacaaaaaaccaaacaccacatgttctcactcataagtgggaattgaacaatgagaacacgtggacacaggaaggggaacaccacacaccggggcctgttgtgggtttgggggagggggtagggatagcataaggagatatacctaaccctaactgacgagttaatgggtgcagcacaccaacacggcatgtgtatacatatgtaacaaacctgcacgttgtgcacatgtaccctaaaacttaaagtataataaaaaaaaaaca

SEQ ID NO: 884 - DNA, 2058 bp, Homo sapiens
  source 1..2058: mol_type = other DNA
aattttaaaaacagaagcagagtcaaatacttttccactaaacgtatctttattttgatagaactacaattcactttaaccactgcattgcataggacactgttgtattataatgcttgtacaggaacgtgcattatcactagtgttacacataaacacgtcaccaatctagtcagtatcaacagattgatttgagttcagatgatttttttttctatgcacggatgtaaaatcacaatgtgtttacttggatattttatgcagatagcacaagatagagtatacctatgcaaacagcacaagttacagtgatacctatgtaaatcagaatcctaaaatgagatacttaatattttcattataattattttctaggttaaaaaaatgaaaaaatatttaaattttaaacaaaggcatattactgaggcagaattcagtgcagatacagaagctggtactacaactggcatagtcaagaagactagagacagtatagtgcacatttaatgatgaatggcaattgcaatttactgcagcagagcaaaatggaaaagctgtttgttctattcaaaagtgttaaagatacatagtagataatacttaagacaatatttaagacatgtaatttttagcaaccatttagtgagtgtaagtcaaaaaagaatacacaaaattactcatatgaactgcgagtgaaatttctaacaaaacaatttaaacaacttttaaaagggtctgagtttgtaaacctggcaagctataaaatagcttcttacacatgcatctacaaagaaccttagatggagagatgaagaaattatcactttatcgtatttagaaaattatgaggaaaagaccttaaaagacattcatgaaaactgaaaacgtcaatgaaaccattaaacaattttgctcttggatatacatgaacagaatatatttttgctaatagaatatttatattttaataataaagaccaattaattcaaatcttgaaaaatttcaagtatttttctttagccttagatgaactgtttgatacaagacactgcccaaagaaaactctgggtatattctgtctcaaagaacctccaaatttacaatgtcgattcatgtaaaggcaatgaaatgtgaattcattgcctaaaggctcaaactcatggcagatatttttgacaatcttccatctgtcaaagaatttcagttagagacagaaaagttagtttctatcacaaggatggaactccagctaagttaagtcaaaagaccatccatgttggaattttaaagcaagaggataacttttccctcattgctctattctattgcatgatacatactgaaaatatttgtgttcaattttctgaagcagactccaagaaacgagtcacggatacatgtgttataattcttcagtacatatgcacaaaagctatagaatgttgacagtttatgaaacttctgaaaaaaaaagacaatgtatctaatgatcttgtttctttaccaatgttacctggatgacttacaaaagaattttataaggatttcctgtactagaaaatccaattcaagatttccttgaaacaaaagaaatgcttaccaaatattcaatcaaagacaaaaagtagcactgtgattcacattttctccctaatatcacgctgcatatgaacaagctaaatttgaagctcctaaaatgggaaaaacttgtgacctggctagacaggtaaaagaatttatttacaatagaaacatttcataatacaaataaaacagaataactcacatttttcaaatgagacaatatgcacaaaattttaaatgtaataaatggctgcaaaaaataagcaaaatctgaagaatgatatattgtattgataaactgttttgtttccatttatgcactgcttcatcaaatttgatgctaataaactgaattgatatgttactgaatttacttaaaaagttttgaaagtgatataattttgcctagatattaaatgaatttttctaataaaagttttgttaatgtggatgcaaattttaaacaaaaattg

SEQ ID NO: 885 - DNA, 159 bp, Homo sapiens
  source 1..159: mol_type = other DNA
ccaggcttggtggcacgcatctgtagtcccagatactcaggaggctcaggcgggaggatcacctgagcccaggatttcaaggatgcaatgagctatgatcatgccactgcactccagcctgggccacagagtgagagactccatctcttaaaaacaaaa

SEQ ID NO: 886 - DNA, 312 bp, Homo sapiens
  source 1..312: mol_type = other DNA
ggccagtcgtggtggctcacacctgtaatcccagcactttgggaggccaaggcaggcagatcacgaggtcaggatattgagaccatcctggctaacatggtgaaaccccatctctacaaaaaatgcaaaaaaaattagccgggcatggtggcgggcgcctggagtcccagctactcaggaggctgaggcaggagaatggcatgaacccaggaggcggagcttgcagtgagccaagatggcgccgctgcactccagcctgggcgacagagcaagactctgtctcaaaaaaaaaaaaaaaaaaaaagaaaagaa

SEQ ID NO: 887 - DNA, 5506 bp, Homo sapiens
  source 1..5506: mol_type = other DNA
gagttaaacgtccctgactgacagctttgaagagagtagtggttctcccagcacggagtttgagatctgagaatggacagactgcctcctcaagtgggtccctgacccccgagtagcctaactgggaggcatctcccagtaggggctggctgatagtgcccctctgagacgaagcttccagaggaacaatcaggcagcaacatttgccgttctgcaatatatgccgttctgcagcctccactggtgatacccaggcaaacagggtctggagtggacctccagcgaactccaacagacctgcagctcagggtcctgactgttagaaggaaaactaacaaacagaaaggatatccacaccaaaaccctatctgtacgtcaccatcatcaaagaccaaaggtagataaaaccacaaagatggggagaaaccagagcagaaaagctgaaaattctaaaaatcagagcgcctgttctcctccaaaggaatgcagctcctcaccagcaatggaacaaagatggatggagaatgactttaacgagttgaaagaagaaggcttcagaagatcggtaataacaaacttctccgagctaaaggaggatgtttgaacccatcgcaaagaaagtaaaagccttgaaaaaagatggcacgaatgtctaactagaataaacagcatagagaagaccttaaatgacctgacagagctgaaaaccgtggcacgagaactacgtgacacatgcacaagcttcagtagctgattcgatcaactggaagaaagaatatcagtgattgaagatcaagtgaatgaaatgaagccagaagagaagtttagagaaaaaagagtaaaaaaaaatgaacaaagcctctaagaaatatgggactatgtgaaaagaccaaatctacgattgaatggtgtacctgaaagtgacagggagaatggaaccaatttggaaaacactcttcaggatattatccaggagaacttccccaacctagcaaggcaggccaacattcaaattcaggaaatacagagaatgccacgaagatactcctcgagaatagcaactccaagacacgtaattgtcagattcatcaaagttgaaatgaaggaaaaaatgttaagggcaggcagagagaaaggtcgggttacccacaagggaagcccatcagactaacagccgatctcttggcagaaactctgcaagccagaagagagtaggggccaatattcaacattcttaaagaaaataattttcaacccagaatctcatatccaaccaaactaagcttcataagtgaaggagaaataaaatcctttacagacaagcaaatgctgagagattttgtcaccaccaggcctgccttacaagagctcctgaaggaagcactaaacatggaaaggaacaactggtaccagccactgcaaaaacatgccaaattgtaaagaccatcaatgcaaggaagaaactgcatcaagtaatgagcaaaataaccagctaacatcataatgaaaggaccaaattcacacataacaatattaaccttaaatgtaaatgggctaaatgcccccaattaaaagacgcagactggcaaattggataaagagtcaagacccatctgtgtgctgtattcaggagacccatctcatgtgcagagacacacataggctcaaaataaagggatggaggaagatctaccaagcaaatggaaagcaaaaaaaggcaggggttgcattcctagtctctgataaaacagactttaaaccaacaaagatcaaaagagacaaagaaggccattacataatggtaaagggatcaattcaacaggaagagctaactatcctaaatatatatgcacccaatacaggagaatccagattcataaagcaagtccttagagacctacaaagagacttagactcccacacaataataatgggagactttaacaccccccactgtcaatgttagatccacaagagagaaagttaacaaggatatccaggaattgaactcagctctgcaccaagcagacctaatacagaactctccaccccaaatcaacagaacatacattcttctcagcaccacattgcacttattccaaaattgaccacatagttggaagtaaagctctcctcagcaaatgtaaaagaacagaaattataacaaactgtctctcagaccccagtgcaatcaaactagaactcaggattaagaaactcactcaaaaccgctcaactacatggaaactgaacaacctgctcttgaatgactactgggtacttaatgaaatgaaggcagaaataaagatgttctttgaaaccaatgagaacaaagacacaacataccagaatctctaggacacgtttaaagcagtgtgtagagggaaatgtatagcactaaatgcccacaagagacagcagaaaagatctaaaatcgacatcctaacatcacaattaaaagaactagagaagcaagagcaaacacattcaaaagctagcagaaggcaagatacaactaaaatcagagccaaactgaaggagatagagccacaaaaaacccttcaaaaaaatcagtgaatccaggagctggttttttgaaagatcaacaaaataggtagacccctagcaagactaacaaagaagaaaagagagaagaatcaaatagacacaataaaaaatgataaaggagatatcaccaccaatcccacagagatacaaactatcatcagacaatactgtaaacacctctacgcaaataagctagaaaatctagaagaattggataaattcctggacacatacaccctcccaagactaaaccaggaagaagttgaatctctgaatagaccaataacaggctctgaaattgatgcaataattaagagcctgccaacccaaaaaagtccaggatcagacggagtcacagctgaattctaccagaggtacaaagaggagctggtaccattccttctgaaactcttcaatgaatagaaaaagagggaatccaccctaactcattttatgaggccagcatcatcctgacaccaaagcctggcagagacacaacaaaaaaagagaattttagaccaatatccctgatgaacatcgatgtgaaaattctcaataaaatactggcaaaccgaatccagcagcacatcaaaaagcttatccaccatgatcaagtgggcttcatccctggcatgcaaggctggttcaacatacacaaattgataaacataatccatcgtataaacagaaccaaagacaaaaccatattattatctcaatagatggagaaaaggcctttgacaaacttcaacagcccttcatgctaaaaactcaataaattaggtattgatgggatgtatctcaaaataataagagctatttatgagaaacccacagccaatatcatactgaatgggcaaaaactggaagcattccctttgaaaactggcacaagacagggatgccctctctcaccactcctattcaacatagtgttggaaattctggccagggcaatcaggcaggagaaagaaataaaggatgttcacttaggaaaagaggaagtcaaattgtccctgtttgcagatgacgtgattgtatatttagaaaaccccattgtctcagcccaaaatctccttaagctgatacgcaacttcagcaaactctcaggatacaaaatcaatgtgcaaaaatcacaagcattcctatacaccaatgatagacagacagagagcagaatcatgagtgaactcccattcacaattgcttcaaagagaataaaatacctaggaatccagcttaaaagggatgtgaaggacctcttcaaggagaattacaaaccactgctcaacgaaataaaagaggacacaaacaaatggaggaacattccatgctcgtggataggaagaatcaatatcatgaaaatggccatactgcccaaggtaatttatagattcaatgccatccccatcaagctaccaatgactttcttcacagaattcgaaaaaactactttaaagttcatatggaaccaaaaaagagcctgcattgccaagacaatcctaagcaaaaagaacaaagctggaggcatcacactacctgacttcaaactatactacaaggctacagtaaacaaaacagcatggtactggtaccaaaacagagatatagaccaatggaacagaacagagccctcagaaataacaccacacatctataaccatctgatctttgacaaacctgacaaaaacaagcaatggggaagggattccctatttaataaatggtgatgggaaaactggctagccatatgtagaaagctgaaactggatctcttccttacaccttatacaaaaattaattcaagatggattaaagacttaaatgtcagacctaaaaccataaaaaccctagaagaaaacctaggcaatactattcaggacataggcatgggcaaggacttcatgtctaaaacaccaaaagcaatggcaacaaaagccaaaattgacagatgggatctaattaaactaaagagcttctgcacagcaaaagaaactaccatcagagtgaacaggcaacctacagaatgggagaaaatttttgcaatgcacccatctgacaaagggctaatatccagaatctacaaagaacttaaatttacaagaaaaaaagcagccccatcaaaaagtgggcgaaggatatgaacagacacatctcaaaagaagacatttatgaaaaaatgctcatcatcactggccatcagagaaatgcaaatcaaaaccacaatgagataccatctcacaccagttagaatggcaatcattaaaaagccaggaaacaacaggtgctggagaggatgtggagaaataggaacacttttacactgttggtgggagtgtaaactagttcaacctttgtggaagactgtgtgtgattcctcaaggatctagaactagaaataccatttgacccagccatcccattactgggtatatacccaaaggattgtaaatcatgccactataaagacacacgcacacatatgtttattgcggcactattcacaatagcgaagacttggaaccaacctgaatgtccatcaatgatagactggattaagaaaatgtggcacatatacaccatggaatactatgcagccataaaaaaggatgagttcatgtcctttgtagggacatggttgaagctggaaaccatcattctttgcaaactgtcacaaggacagaaaaccaaacaccgcatgttctcactcataggtgggaactgaacaatgagaacacttggacacagggtgggtaacaccacacactggggcctgtcatggggtggggctagaggggagggatagcattaggagaaatacctaatgtaaatgacgagttaatgggtgcagcacaccaacatggcacgtgtatacatatgtaacctgcacgttgtgcacatgtaccctagaacttaaagtataattaaaaaaaagaaa

SEQ ID NO: 888 - DNA, 967 bp, Homo sapiens
  source 1..967: mol_type = other DNA
gtggggaaaagcaagagagatcagattgttactgtgtctgtgtagaaagaagtagacataggagactccattttgttatgtgctaagaaaaattcttctgccttgagattctgttaatctatgaccttacccccaaccccgtgctctctgaaacgtgtgctgtgtcaactcagggttgaatggattaagggcggtgcaggatgtgctttgttaaacagatgcttgaaggcagcatgctccttaagagtcatcaccactccctaatctcaagtacccagggacacaaaaactgcggaaggccgcagggacctctgcctaggaaagccaggtattgtccaaggtttctccccatgtgatagtctgaaatatggcctcgtgggaagggaaagacctgaccatcccccagcccgacacccgtaaagggtctgtgctgaggaggattagtataagaggaaggcatgcctcttgcagttgagacaagaggaaggcatctgtctcctgcctgtccctgggcaatggaatgtctcggtataaaacccgattgtatgctccatctactgagatagggaaaaaccgccttagggctggaggtgggacctgcgggcagcaatactgctttgtaaagcactgagatgtttatgtgtatgcatatccaaaagcacagcacttaatcctttacattgtctatgatgccaagacctttgttcacgtgtttgtctgctgaccctctccccacaattgtcttgtgaccctgacacatccccctctttgagaaacacccacagatgatcaataaatactaagggaactcagaggctggcgggatcctccatatgctgaacgctggttccccgggtccccttatttctttctctatactttgtctctgtgtctttttcttttccaaatctctcgtcccaccttacgagaaacacccacaggtgtgaaggggcaacccacccctaca

SEQ ID NO: 889 - DNA, 2851 bp, Homo sapiens
  source 1..2851: mol_type = other DNA
ggggtggggccaagatggccaaataggaacagctgcagtctatagctcccagcatcagcgacacagaagatggctgatttctgcatgtccaactaaggtaccaggttcatctcactggggagtgtcggaaagtgggtgcaggacagtgggtgcagcgcaccaagtgtgagccgaagcagggagaggcatcacctcacccgagaagcacaaggggtcagggaattccctttcctagtcaaagaaaggggtgacagatggcacctggaaaatcgggtcactcccaccctaatactgcacttttccaaccatcttagcaaacggcacacgaggagattatatcccacacatggctcagagggtcctatgcccacagagccccactgattgctagcacagcagtctgagatcaaactgcaagtcggcagcgaggctgggggaggtgtgcccgccattgccaaggcttgagtaggtaaacaaagcagccgggaagctcaaactgtgtggagcccactgcagctcaaggagggctgcctgcctctgtagactccacctctgggggcaggacatagccaaacaaaaggcagcagaatcttctgcagacttaaatgtccctgtctgacagctctgaatagagtagtggttctcccagcacacagcttgagatctgagaacggacagactgcctcaagtgggtccctgatccccgactagcctaactgggaggcaccccccagtaggggcagactgacacctcacacggccaggtactcctctgacacaaaacttccagaggaacgatcaggcagcaacatttgctgttcaccaatatccactgttctgcagcctctgctgctgatacccaggcaaacagggtctggagtggacctccagcaaactccaacagacctgcagctgagggtcctgactgttagaaggaaaactaacaaacagaaaggacatccacaccaaaaccccatctgtacgtcaccatcatcaaagaccaaaggtagataaaaccacaaagatggggagaaaacgagcagaaaaactggaaaatctaaaaatcagagcgcctctcctcctccaaagtaatgcagctcctcaccagcaacagaacaaagctggatggagaatgactttgacgacttgagagaagaagacttcagacaatcaaactactccaagctacaggaggaagttcgaaaccacggcaaagaagttaaaaaccttgaaaaaagattagacaaatggctaactagaataaccaatgcagagaagtccttaaaggacctgatggagctgaaaaccatggcacgagaactacgtgacgaatgcagaagcctcagtagccgatttgatcaactggaataaatggtatcagtgatggaagatcaaataaatgaaatgaagtgagaagagaagtttagagaaaaaagaataaaaagaaacgaacaaagcctccaagaaatatgggactatgtgaaaagaccaaatttacgtctgattggtgtatctgaaaatgatggggagaatggaaccaagttggaaaacactctgcaggatattatccaggagaacttccccaatctagcaaggcaggccaacattcagattcaggaaatacagagaatgccactccttgagaagagcaactccaagacacataattgtcagattcaccaaagttgaaatgaaggaaaaaatgttaagggcagccagagagacaggtcaggttacccacaaagggaagcccatcagactaacagctgatctctcggcacaaactctacaagccagaagagagtggggaccagtattcaacattcttaaagaaaagaattttcaacccagaatttcatattcagccaaactaagcttcttaagtgaaggagaaataaaatcctttacagacaagcaaatgctgagagattttgtcacccccaggcctgccctaaaagagctcctgaaggaagcactaaacatggaaaggaacaaccggtaccaaccactgcaaaaacatgccaaattgtaaagaccatcaaggctaggaagaaactgcatcaactaacaagcaaaataaccagctaacatcataatgacaagatcaaattcacacataacaatattaaccttaaatgtaaacgggctaaatgctccaattaaaagacacagactggcaaattggataaagagtcaagacccatcagtgtgctgtattcaggaaacccatctcacatgcagagacacatataggctcaaaataaagggatggaggaagatctaccaagcaaatggaaaacaaaaaaaggcaggggttgcaatcctagtcttggataaaacagactttaaaccaacaaagatcaaaagagacaaagaaggccattacataatggtaaagggattaattcaacaagaagagctaactatcctaaatatatatgcacccaatacaggagcacccggattcataaagcaagtccttagagacctacaaagagacttagactcccacacaacaataatgggagaatttaacaccccactgtcaacattagacagatcaacaagacagaaagttaacaaagatatcgaggaattgaactcagctctgcaccaagcagacctaatagacatctacagaactctccaccccaaatcaacagaatatacattcttctcagcaccacaccgcacttattcaaaaactgaccacatagttggaagtaaagcactcctcagcaaatgtaaaagaacagaaattagaacaaactgtctctcagaccacagtgcaatcaaactagaactcaggattaagaaactcagtcggaggaatgtcaactattaacatgga

SEQ ID NO: 890 - DNA, 1266 bp, Homo sapiens
  source 1..1266: mol_type = other DNA
ccccgcccggccagccgccctgtcggggatgtgaggggcgcctctgcccggccgcctatcgtctgggacgtgaggagcccctctgcctggctgcccagtctggaaagtgagaagcgtctgcccggccgccatcccatctaggaagtgaggagcgtctctgcccggccacccattgtctgagatgtggggagcgcctttgccccaccgccccgtctgggatgtgaggagcgcctctgcctggccgcgaccccgtctgggaggtgaggagcgtctctgcccagccgccccgtctgagaagggaggagaccctccgcccggcaaccgccccgtctgagaagtgaggagcccctccgcccggcagccggcccatctgagaagtgaggagcgtctccgcccggcagccaccccgtccgggagggaggtgggggggtcagccccccgcccagccagccgccccgtccgggagggaggtgggggggtcagccccccgcccggccagccgccccgtccgggaggtgaggggcgcctctgcccagccacccctactgggaagtgagaagcccctctgcccagccagccgctccgtccgggagggaggttggggggtcagcaccccgcccggccagccaccccgtccaggagggaggtgggggtgtcagccccccgcccggccagccgccctgtcggggatgtgaggggcgcctctgcccggccgcccctactgggaagtgaggagcccctctgcccggccaccaccccgtctgggaggtgtacccaacagctcattgagaacgggccatgatgacaattgcggttttgtggaatagaaagggggcaaaggtggggaaaagattgagaaatcggatggttgccgtgtctgtgtggaaagaagtagacatgggagacttttcattttgttctgtactaagaaaaattcttctgccttgggatcctgttgatctgtgaccttacccccaaccctgtgctctctgaaacatgtgctgtgtccactcagggttaaatggattaagggcggtgcaagatgtgctttgttaaacagatgcttgaaggcagcatgctcgttaagagtcatcaccactccctaatctcaagtacccagggacacaaacgctgcggaaggccgcagggtcctctgcctaggaaaaccagagacctctgttcacttgtttatctgctgaccttccctccactattgtcctatgaccctgccaaatccccctctgtgagaaacacccaagaatgatc

SEQ ID NO: 891 - DNA, 980 bp, Homo sapiens
  source 1..980: mol_type = other DNA
acctacaacatgggagaaaattttcgcaacctactcatctgacaaagggctaatatccagaatctacaatgaactcaaacaaatttacaagaaaaaaacaaacaaccccatcaaaaagtgggcgaaggacatgaacagacacttctcaaaagaagacatttatgcagccaaaaaacacatgaagaaatgctcatcatcactggccatcagagaaatgcaaatcaaaaccactatgagacatcatctcacaccagttagaatggcaatcattaaaaagtcaggaaacaacaggtgctggagaggatgcggagaaataggaacacttttacactgttggtgggactgtaaactagttcaaccattgtggaagtcagtgtggcgattcctcagggatctagaactagaaataccatttgacccagccatcccattactgggtatatacccaaatgagtataaatcatgctgctataaagacacatgcacacgtatgtttattgtggcactattcacaatagcaaagacttggaaccaacccaaatgtccaacaatgatagactggattaagaaaatgtggcacatatacaccatggaatactatgcagccataaaaaatgatgagttcatatcctttgtagggacatggatgaaattggaaaccatcattctcagtaaactatcgcaagaacaaaaaaccaaacaccgcatattctcactcataggtgggaattgaacaatgagatcacatggacacaggaaggggaatatcacactctggggactgtggtggggtcgggggaggggggagggatagcattgggagatatacctaatgctagatgacacattagtgggtgcagcgcaccagcatggcacatgtatacatatgtaactaacctgcacaatgtgcacatgtaccctaaaacttagagtataataaataaataaataaataaataaataaataaataaataaataa

SEQ ID NO: 892 - DNA, 2549 bp, Homo sapiens
  source 1..2549: mol_type = other DNA
agtaaaataatgaatcctccctaactcattttatgaggccagcatcattctgataccaaagccgggcagagacacaaccaaaaaagagaattttagaccaatatccttgatgaacattgatgcaaaaatcctcaataaaatactggcaaaccgaatccagcagcacatcaaaaagcttatccaccatgatcaagtgggcttcatccctgggatgcaaggctggttcaatatacgcaaatcaataaatgtaatccagcatataaacagagccaaagacaaaaaccacatgattatctcaatagatgcagaaaaagcctttgacaaaattcaacaacccttcatgctaaaaactctcaataaattaggtattgatgggacgtatttcaaaataataagagctatctatgacaaacccacagccaatatcatactgaatgggcaaaaactggaagcattccctttgaaaactggcacaagacagggatgccctctctcaccgctcctattcaacatagtgttggaagttctggccagggcaatcaggcaggagaaggaaataaagggtattcaattaggaaaagaggaagtcaaattgtccctgtttgcagacaacatgattgtttatctagaaaaccccatcgtctcagcccaaaatctccttaagctgataagcaacttcagcaaagtctcaggatacaaaatcaatgtacaaaaatcacaagcattcttatacaccaacaacagacaaacagagagccaaatcatgggtgaactcccattcacaattgcttcaaagagaataaaatacctaggaatccaacttacaagggatgtgaaggacctcttcaaggagaactacaaaccactgctcaaggaaataaaagaggacacaaacaaatggaagaacattccatgcttatgggtaggaagaatcaatatcgtgaaaatggccatactgcccaaggtaatttacagattcaatgccatccccatcaagctaccaatgactttcttcacagaattggaaaaaactactttaaagttcatgtggaaccaaaaaagagcccgcattgccaagtcaatcctaagacaaaagaacaaagctggaggcatcacactacctgacttcaaactatactacaaggctacagtaaccaaaaaagcatgctactggtaccaaaacagagatatagatcaatggaacagaacagagccctcagaaataatgccgcatatctacaactatctgatatttgacaaacctgagaaaaacaagcaatggggaaaggattccctatttaataaatggtgctgggaaaactggctagccatatgtagaaagctgaaactggatcccttccttacaccttatacaaaaatcaattcaagatggattaaagatttaaacgttaaacctaaaaccataaaaaccctagaagaaaacctaggcattaccattcaggacataggcgtgggcaaggacttcatgtccaaaacaccagaagcaatggcaacaaaagacaaaattgacaaatgggatctaattaaactaaagagcttctgcacagcaaaagaaactaccatcagagtgaacaggcaacctacaacatgggagaaaattttcgcaacctactcatctgacaaagggctaatatccagaatctacaatgaactcaaacaaatttacaagaaaaaaacaaacaaccccatcaaaaagtgggcgaaggacatgaacagacacttctcaaaagaagacatttatgcagccaaaaaacacatgaagaaatgctcatcatcactggccatcagagaaatgcaaatcaaaaccactatgagatatcatctcacaccagttagaatggcaatcattaaaaagtcaggaaacaacaggtgctggagaggatgcggagaaataggaacacttttacactgttggtgggactgtaaactagttcaaccattgtggaagtcagtgtggcgattcctcagggatctagaactagaaataccatttgacccagccatcccattactgggtatatacccaaatgagtataaatcatgctgctataaagacacatgcacacgtatgtttattgcggcactattcacaatagcaaagacttggaaccaacccaaatgtccaacaatgatagactggattaagaaaatgtggcacatatacaccatggaatactatgcagccataaaaaatgatgagttcatatcctttgtagggacatggatgaaattggaaaccatcattctcagtaaactatcgcaagaacaaaaaaccaaacaccgcatattctcactcataggtgggaattgaacaatgacatcacatggacacaggaaggggaatatcacactctggggactgcggtggggtcgggggaggggggagggatagcactgggagatatacctaatgctagatgacacattagtgggtgcagcgcaccagcatggcacatgtatacatatgtaactaacctgcacaatgtgcacatgtaccctaaaacttagagtataataaaaaaaaataa

SEQ ID NO: 893 - DNA, 3893 bp, Homo sapiens
  source 1..3893: mol_type = other DNA
cacgtgcagacacacataggctcataataaaaggatgaaggaagatctaccaagcaaatggaaaacaaaaaaaaaggcaggggttgcaatcctagtctctgataaaacagactttaaaccagcaaagatcaaaagagacaaagaaggccattacataatggtaaagggatcaattcaacaagaagagctaactatcctaaatatatatgcacccagtacaggagcatccagatttataaagcaagtcctgagtgacctacaaagagacttagactcccacacaataataatgggagactttaacaccccactgtcaacattagacagatcaacgagacagaaagttaacaacgatacccaggaattgaactcagctctgcaccaagcagacctaatagacatctacagaactctgcaccacaaatcaacagaatatacatttttttcagcaccacaccacacgtattccaaaattgaccacatagttggaagtaaagctctcctcagcacatataaaagaacagaaattataacaaactctcagaccacagtgcaatcaaactagaactcaggattaagaaactcactcaaaaccgctcagctacatggaaactgaacaaacctgctcctgaatgactactgggtgcataatgaaatgaaggcagaaataaagatgttctttgaaaccaacgagaacaaagacacaacataccagaatctctgggacacattcaaagcagtgtgtagagggaagtttatagcactaaatgcccacaagagaaagcaggaaagatctaaaattgacaccctaacatcacaattaaaagaactagaaaagcaagagcaaacacatccaaaagctagcagaaggcaagaaataactaaaatcagagcagaactgaaggaaatagagatacaaaaaacccttcagaaaattaatgaatccaggagctggtttgttgaaaggatcaacaaaattgatagaccgctagcaagactaataaagaaaaaaagagagaagagtgaaatagatgcaataaaaaataataaaggagatatcaccaccgatcccacagaaatacagactaccatcagagaatactacaaacacctctacgcaaataaactagaaaatctagaagaaatggatacattcctcgacacatacaccctcccatgactaaaccaggaagaagttgaatctctgaatagaccaataacaggctctgaaattgaggcaataatcagtagcttaccaaccaaaaagagtccaggaccagatggattcacagctgaattctaccagaggtacaaggaggaagtggtaccattacttctgaaactattccaatcaatagaaaaagagggaatcctccctgactcattttatgaggccagcatcatcctgataccaaagccgggcagagacacaaccaaaaaagagaattttagaccaatatccttgatgaacattgatgcaaaaatcctcaataaaatactggcaaaccaaatccagcagcacatcaaaaagcttatccaccatgatcaagtgggcttcatccctgggatgcaaggctggttcaatatacacaaatcaataaatgtaatccagcatataaacgaaccaaagacaaaaaccacatgattatctcaatagatgcagaaaaggcctttgacaaaattcaacaacccttcatgctaaaacgtctcaataaattaggtattgatgggatgtatctcaaaataataagagctatctatgacaaacccacagccaatatcatactgaatgggcaaaacctggaagcattccctttgaaaactggcacaagacagggatgccctctctcaccactcctattcaacatagtgttggaagttctggccagggcatttaggaaggagaaggaaataaagggtattcagttaggaaaagaggaagtcagattgtccctgtttgcagatgacatgattgtatatctagaaaaccccatggtctccgcccaaaatgtccttaagctgataagcaacttcagcaaagtctcaggatacaaaatcaatgtgcaaaaatcacaagcattcttatacaccaataacagacaaacagagagccaaatcatgagtgaactcccattcacagttgcttcaaagagaataaaatacctaggaatccaacttacaagggatgtgaaagacctcttcaaggagaactacaaaccactgctcagtgaaataaaagaggatacaaacaaatggaagaacattccatgctcatgggtaggaagaatcaatatcgggaaaatggccatacagtccaaggtcatttatagattcaatgccatccccatcaagctaccaatgactttcttcacagaattggaaaaaactactttaaagttcatatggaaccaaaaaagagcccacatcgccaagtcaatcctaagccaaaagaacaaagctggaggcatcatgctacctgacttcaaactatactacaaggctacagtaaccaaaacagcatggtactggtaccaaaacagagagatagaacaatggaacagaacagagccctcagaaataacgcagcatatctacaagtatctgatctttgacaaacctgagaaaaacaagcaatggggaaaggattccctatttaataaatggttttgggaaaactggccagccatatgtagaaagctgaaactggatcccttccttacaccttacacaaaaattaattcaagatggattaaagacttaaacgttagacctaaaagcataaaaaccctggaagaaaacctaggcattaccattcaggacataggcatgggcaaggacttcatgtctaaaacactgaaagcaatggcaacaaaagccagaattgacaaatgggatctaattaaactaaagagcttctgcacagcaaaagaaactaccgtcagagtgaacaggcaacctacagaatgggagaaaattttcccaacctactcatctgacatagggctaatatccagaatctacaatgaactcaaacaaatttacaagaaaaaaacaaccccatcaaaaagtgggcaatggatatgaacagacacttctcaaaagaagacatttatgcagccaaaagacacatgaaaaaaagctcatcatcactggccatcagagaaatgcaaatcaaaaccacaatgagataccatctcacaccagttagaatggcaatcattaaaaagtcaggaaacaacaggtgctggagaggatgtggagaaataggaacacttttacactgttggtgggactgtaaactagttcaaccattgtggaagtcagtgtggcgattcctcagggatctagaactaggaataccatttgacccagccatcccattagtgggtatatacccaaaggattataaatcatgctgctataaagacacatgcacacatatgtttattgtggcactattcacaacagcaaagacttgcaaccaacccaaatgtccaacaatgatagactggattaagaaaatgtggcacatatacaccatggaatactatgcagccataaaaaaggatgagttcatgtcctttgtagggacatggatgaaattggaaatcatcattctcagtaaagtatcgcaaggacaaaaggccaaacactgcatgttctcactcataggtgagaattgaacaatgagaacacgtggacacaggaaggggaacatcacactctgggtactgttgtggggtgggggtgggggagggatagcattaggagatatacctaatgctaaatgacgagttaatgtgtgcagcacaccagcatggcacatgtatacatatgtaactaacctgcattgtgcacatgtaccctaaaacttaaagtataataataataaa

SEQ ID NO: 894 - DNA, 657 bp, Homo sapiens
  source 1..657: mol_type = other DNA
gcgcctctgcccggccgcccctactgggaagtgaggagcccctctgcccggccagccgccccgtccgggagggaggtgggggtgtcagccccccgcccggccagccgccccgtccgggagggaggtggggggggtcagcacccccgcccggccagccgccccgtccgggaggtgaggggcgcctctgcccggccgcccctactgggaagtgaggagcccctctgcccggccaccacccggtctgggaggtgtgcccaacagctcattgagaacgggccaggatgacaatggcggctttgtggaatagaaaggcgggaaaggtggggaaaagattgagaaatcggatggttgccgtgtctgtgtagaaagaagtagacatgggagacttttcattttgttctgcactaagaaaaattcctctgccttgggatcctgttgatctgtgaccttacccccaaccctgtgctctctgaaacatgtgctgtgtccactcagggttaaatggattaagggcggtgcaagatgtgctttgttaaacagatgcttgaaggcagcatgctcgttaagagtcatcaccaatccctaatctcaagtaatcagggacacaaacactgcggaaggccgcagggtcctctgcctaggaaaaccagagacctt

SEQ ID NO: 895 - DNA, 5134 bp, Homo sapiens
  source 1..5134: mol_type = other DNA
ggtggctggcaagatggccaaataggaacaactcaggtctgcagctcccaatgaggcagaaggcaggtgatttttgcatttccaactgaggtacctggctcatgtcattgggactggttagacagtgagtgcagcccatggagggagagttgaagcagggtggggcgtcaccttacccgggaagtgcaaggggtcagggaactccctcccctagccaggggaagccatgagggactgtgctgtgaggaatggtgcattccagcccagatactgcgcttttcccatggtcttcacaacctgcagaccgggatgttcccttggatgcctacaccaccagggccgtgggtttcaagcacaaaactgggcggccgtttgggcggacacccagctagctgcaggagtttttttcatacctcagtggcacatggaacgctagcgagacagaatcgttcactcacctggaaagggggctgaagccagggagacaagtggtctagctcagcggatcccacccgcacagagcccagcaagccaagatccactggcttcaaattgtcactgtcagcacagcagtctgaagtcaacctgggatgctcgagcttggtcgggggagcgtcatccaccattactgaagcttgagtaggtggttttcccctcatagtgtaaacaaagccacggggaatttcaaactgggcagagcccactgcaccttggcaaagccactgtagctagactgcctctgtagattccccctctctgggtatctctaaagaaaggcagcagccccagtcaggggcttgtagataaaactcccatctccctgggacagagcacctggggaaaggggcggctgtgggcccagcttcagcagacttaaacgttcctgcctgccggctctgaagagagcagcggatctcccagcacagcgcttgagctctgctaagggacagactgcctcctccagtgggtccctgacccctgtgcctcctaatcgtgagacacctcccatcaggggttgacagagacttcatacaggagagcttcagctggcatctggcaggtgcccccctggaatgaagcttccagaggaaggatcaggcagcaatttttgctgttctgcagcctccactggtgatacccaggcaaacagggtctggagtggagctccagcaaactccagcagacctgcagcagaggggcctgactgttagaaggaaaactaacaaacagaaaggaatagcatcaacatcagcaaaaaggacgtccacacaaaaaccccacgcaaaggtcaccaacatcaaagaccaaagacagataaatccacgaagatgagggaaatccagcacaaaaaggctgaaaattccaaaacccagaacacctcttctcctccaaaggatcacaactcctcaccagcaagggaacaaaactggatggagaatgagtttgatgaattaacagaagtaggcttcagaaggtggctaataacaaactcctctggaggaagctaaaagggcagttctaacccaatgcaaggaatttaagaaccttgaaaaaaggttagaggaattgcttactagaataataagtttagagagaacataaatgacctgatggaactgaaaaacagcacaaggacttcatgaagcatacccacgtatcagtggctgaattgatcaagcggaagaaaggatgtcagagattaaagatcaacttaatgaaataaagcatgaagacaaatttacagaaaaaaagaatgaaaaggaatgaacaaagcctccaagaaatatgggactatgtaaaaagaccaaacctacatttgattggtgtacctgaaagtgacggggagaatggaaccaagctttaaaacactcctcaggatattatccaggagaacttccccaacctagcaagacaggccaacattcaaattctggaaatacagagaacaccacaaagatactccttgagaagagcaaccccaagacacataattatcagattcaccaaggttgaaatgaaggaaaaaatgttcagggcagccagagagaaaggtccggttacccacaaagggaagcccatcagactaacagcagatctctcggcacaaaccctacaagccagaagagagtgggggccaatattaaacattcttaaaggaaagaattttcaacccagaatttcatatccagccaaactaagcctcttaagtgaaggagaaataaaatcctttacagacaagcaaatgcttagagattttgtcactaccaggcctgccttacaaaagctcctgaaggaagcactaaacatggaaaggaaaaactggtaccagccactgcaaaaacataccaaattgtaaagaccatcgacactgaagaaactgcatcaactaatgggcaaaataaccagctagcatcataatgacaggattaaattcacacatgaaaatattaaccttaaatgtaagtgggctaaatgccccaattagacgcagattggcaaattgggtaaagactcaagactcattggtgtgctgtattcaggagactcatctcacatgcaaagacacacataggctcaaaataaagggatggaggaatatttaccaagcaaatggaaagcaaaaaaaaaaaaaaaagattgcaatcctagtctctaataaaacagactttaaaccaacaaagatcaaaaaagataaagaggggcattacataatggtaaagcgattaacacaacaagtagagtaaactatcctaaatatacatgcagtcaatacaggaggacccagattcataaagcaagctcttagagacctacaaagagacgtagagtccgaaataatagtagtgggagactataacagcacactgccaatattagacagatcaatgggacagaaaatgaacaaggatattcaggacttgaactcagctctggaccaagtggacctaatagacatttacagaactctccacctcaaatcaacagaataagcattcttctcagcaccacatcacatttattctaaaattgaccacatagttggaagtaaaacactcctcagcaaatgcaaaagaatggaaatcataagtctcccagaccacagtgcaatcaaattagaactcaagattaagaaactcactcaaaaccgcacaactacatagaaactgaacaacctgctcctgaatgactactgggtaaataacgaaattaaggcagaaataaataatttctttgaaaccaatgagaacaaagacacaacgtaccagaatctctgggacacagctaaagcagtgtttagagggaaatttatagcaccaaatgcccacaaaagaaggtgggaaagatttaaaattgacaccctaacatcacagttaaaagaactagagaagcaagagcaaacaaattcaaaaactagcagcagacaagaaataactaagatcagagcagaactgaaggagatagagacacagaaacacttcaaaaaattaatgaatacgggagctaggtttttgaaaagatcaacaaaactgatagactgctagcaaaactaataagaaaagagagaataatcaaatagacacaataaaaaaatgataaaggggatatcaccactgatcccacagaaatacaaagtaccatcagagaatactataaacacctctctgcaaataaagtagaaaatctagaagaaatggataaattcctggacacatacaccctctcaagactaaaccaggaagaagttgaatacctgagtaggtcaataacaaattctgaaattgaggcaataatagcctaccaaccaaaaaaagcccaggaccagatggattcacagccgaattttaccagaggtacaaagaagtgctggtaccattccttctgaaactattccaaacaatagaaaaagagggaatcctccctaactcattttatgaggccagcatcatcctgataccaaaacctggcagagatacaacaaaaaaagaaaatttcgggccaatatccctgatgaacatcaatgcaaagatcctcaataaaatactggcaaacggaatccagcagcacatcaaaaagcttatccaccacggtcaagttggcttcatccctaggatacaaggctggttcaacatatgcaaatcaataaatgtaatccatcacataaacagaacctatgacaaaaaccacatggttatctcaatagatgcacaaaaggccttcgataaaattcaacacagcttcatgctaaaaactctcaataagctaggtatcgatgaaatgtatctcaaaataataagagctatttatgacaaacccacagtcaatatcatactgaatgggcaaaagctggaagcattccctttgaaaactggcacaagacaaggatgtcctctctcaccacccttattcaacatagtattggaagttctggccagggaagtcaggcaagagaaagaaagaaagagtgttcaaataggaagagaggaagtccaattgtctctgtttgcagatgacatgattgtatatttaggaaaccccattgtctcagccccaaacctccttaagctgataagcaacttcagcaaagtctagggatacaaaatcaatgtgcagaaatcacaagcattcctatacaccaataatagacaaacagccaaatcatgagttaacttccattcacaattgctacaaagaggataaaatacctaggaatccaacttagaagggatgtgaaggatctcttcaaagagaactacaaaccactgctcaaagaaataagagaggacacaaacaaagggaaggacattccatgttcatggataggaagaatcaatatcttgaagatggccatactacccaaagtaatttacagattcaatgctatccccatcaagctattttctttacagaattagaaaaaactgctttaaatttcatatggaaccaaaaaagagcccatatagccgagacaaccctaagcaaaaaggacaaagctggagacatcatgctacctgacttcaaactatactacaagggtatagtaaccaaaacagcatggtacttgtaccaaaatagatatatagactaatggaacagaacagaggcctcagaaataatgccacagatctataaccac

SEQ ID NO: 896 - DNA, 811 bp, Homo sapiens
  source 1..811: mol_type = other DNA
ggatcattctgtgttgcagcaaggccctgcctgcctcaccagatgtggtgagcctatcctatctcactcggaggggtccaaaatcggatctgaacgggagtctggagaacacagcaggcatcttgaagctccacctccctccgtggaagtcggctcaaggaggtcctgaggacaggactcctaggggtttggccctgggacaggacaagacacccgcggccccctctcccacgccgccccaaactggaccccggatccagccgccgccgtggcggcaggaggaacctcgctgccgccgcgcggcggtggcggtatttaaaggggacgcagccatactgccaggagcggagcgcgagtcggctcagccaatgcgcatgcgcgaggcgggagcggtttctcccgtcacagtggttcccatggttgtcttagaaaccagtccccgaggcttggcaaagcaggagccctctgtggcagtgcttgggtgtcggggctctgaggatccggcctcacctctccacggggtcgacgggaacgtctccggatgccaggagtcgcaaagggccgaccacgatgaggaaaccccaggctgggacgggggaagcagcacgggatcccagcctcaggcctgcccggacggtgttggttggggtgagtctccccaaaagtcgtgccgccatccgtgatctcgaggacaggtcggcctgcgtgcccctgggctgctctctcacccgagggtcgttctcgtcgtgagcagaaccccgcagcctcaggggttgcctggtggtgtgtgtttcaatgcctctgctgtatg

SEQ ID NO: 897 - DNA, 6059 bp, Homo sapiens
  source 1..6059: mol_type = other DNA
ggggaggagccaagatggccgaataggaacagctccggtctacagctcccagcgtgagcgacgcagaagacggtgatttctgcatttccatctgaggtaccgggttcatctcactagggagtgccagacagtgggctcaggccagtgtgtgtgcgcaccgtgcgcgagccaaagcagggcgaggcattgcctcacctgggaagcgcaaggggtcagggagttccctttccgagtcaaagaaaggggtgacggacgcacctggaaaatcgggtcactcccacccgaatattgcgcttttcagaccggcttaagaaacggcgcaccacgagactatatcccacacctggctcggagggtcctatgcccacggaatctcgctgattgctagcacagcagtctgagatcaaactgcaaggcggcaacgaggctgggggaggggcgcccgccattgcccaggcttgcttaggtaaacaaagcagccgggaagctcgaactgggtggagcccaccacagctcaaggaggcctgcctgcctctgtaggctccacctctgggggcagggcacagacaaacaaaaagacagcagtaacctctgcagacttaagtgtccctgtctgacagctttgaagagagcagtggttctcccagcacgcagctggagatctgagaacgggcagactgcctcctcaagtgggtccctgactcctgacccccgagcagcctaactgggaggcaccccccagcaggggcacactgacacctcacacggcagggtattccaacagacctgcagctgagggtcctgtctgttagaaggaaaactaacaaccagaaaggacatctacaccgaaaacccatctgtacatcaccatcatcaaagaccaaaagtagataaaaccacaaagatggggaaaaaacagaacagaaaaactggaaactctaaaacgcagagcgcctctcctcctccaaaggaacgcagttcctcaccagcaacagaacaaagctggatggagaatgattttgatgagctgagagaagaaggcttcagacgatcaaattactctgagctacgggaggacattcaaaccaaaggcaaagaagttgaaaactttgaaaaaaatttagaagaatgtataactagaataaccaatacagagaagtgcttaaaggagctgatggagctgaaaaccaaggctcgagaactacgtgaagaatgcagaagcctcaggagccgatgcgatcaactggaagaaagggtatcagcaatggaagatgaaatgaatgaaatgaagcgagaagggaagtttagagaaaaaagaataaaaagaaatgagcaaagcctccaagaaatatgggactatgtgaaaagaccaaatctacgtctgattggtgtacctgaaagtgatgtggagaatggaaccaagttggaaaacactctgcaggatattatccaggagaacttccccaatctagcaaggcaggccaacgttcagattcaggaaatacagagaacgccacaaagatactcctcgagaagagcaactccaagacacataattgtcagattcaccaaagttgaaatgaaggaaaaaatgttaagggcagccagagagaaaggtcgggttaccctcaaaggaaagcccatcagactaacagcggatcactcggcagaaaccctacaagccagaagagagtgggggccaatattcaacattcttaaagaaaagaattttcaacccagaatttcatatccagccaaactaagcttcataagtgaaggagaaataaaatactttatagacaagcaaatgttgagagattttgtcaccaccaggcctgccctaaaagagctcctgaaggaagcactaaacatggaaaggaacaaccggtaccagccgctgcaaaatcatgccaaaatgtaaagaccatcgagactaggaagaaactgcatcaactaatgagcaaaatcaccagctaacatcataatgacaggatcaaattcacacataacaatattaactttaaatataaatggactaaattctgcaattaaaagacacagactggcaagttggataaagagtcaagacccatcagtgtgctgtattcaggaaacccatctcacgtgcagagacacacataggctcaaaataaaaggatggaggaagatctaccaagccaatggaaaacaaaaaaaaggcaggggttgcaatcctagtctctgataaaacagactttaaaccaacaaagatcaaaagagacaaagaaggccattacataatggtaaagggatcaattcaacaagaggagctaactatcctaaatatttatgcacccaatacaggagcacccagattcataaagcaagtcctcagtgacctacaaagagacttagactcccacacattaataatgggagactttaacaccccactgtcaacattagacagatcaacgagacagaaagtcaacaaggatacccaggaattgaactcagctctgcaccaagcagacctaatagacatctacagaactctccaccccaaatcaacagaatatacatttttttcagcaccacaccacacctattccaaaattgaccacatagttggaagtaaagctctcctcagcaaatgtaaaagaacagaaattacaacaaactatctctcagaccacagtgcaatcaaactagaactcaggattaagaatctcactcaaagccgctcaactacatggaaactgaacaacctgctcctgaatgactactgggtacataacgaaatgaaggcagaaataaagatgttctttgaaaccaacgagaacaaagacaccacataccagaatctctgggacgcattcaaagcagtgtgtagagggaaatttatagcactaaatgcctacaagagaaagcaggaaagatccaaaattgacaccctaacatcacaattaaaagaactagaaaagcaagagcaaacacattcaaaagctagcagaaggcaagaaataactaaaatcagagcagaactgaaggaaatagagacacaaaaaacccttcaaaaaatcaatgaatccaggagctggttttttgaaaggatcaacaaaattgatagacctctagcaagactaataaagaaaaaaagagagaagaatcaaatagacacaataaaaaatgataaaggggatatcaccaccgatcccacagaaatacaaactaccatcagagaatactacaaacacctctacgcaaataaactagaaaatctagaagaaatggatacattcctcgacacatacactctcccaagactaaaccaggaagaagttgaatctctgaatcgaccaataacaggctctgaaattgtggcaataatcaatagtttaccaaccaaaaagagtccaggaccagatggattcacagccgaattctaccagaggtacaaggaggaactggtaccattccttctgaaactattccaatcaatagaaaaagagggaatcctccctaactcattttatgaggccagcatcattctgataccaaagccgggcagagacacaaccaaaaaagagaattttagaccaatatccttgatgaacattgatgcaaaaatcctcaataaaatactggcaaaccgaatccagcagcacatcaaaaagcttatccaccatgatcaagtgggcttcatccctgggatgcaaggctggttcaatatacgcaaatcaataaatgtaatccagcatataaacagagccaaagacaaaaaccacatgattatctcaatagatgcagaaaaagcctttgacaaaattcaacaacccttcatgctaaaaactctcaataaattaggtattgatgggacgtatttcaaaataataagagctatctatgacaaacccacagccaatatcatactgaatgggcaaaaactggaagcattccctttgaaaaccggcacaagacagggatgccctctctcaccgctcctattcaacatagtgttggaagttctggccagggcaatcaggcaggagaaggaaataaagggtattcaattaggaaaagaggaagtcaaattgtccctgtttgcagatgacatgattgtttatctagaaaaccccatcgtctcagcccaaaatctccttaagctgataagcaacttcagcaaagtctcaggatacaaaatcaatgtacaaaaatcacaagcattcttatacaccaacaacagacaaacagagagccaaatcatgggtgaactcccattcacaattgcttcaaagagaataaaatacctaggaatccaactaacaaaggatgtgaaggacctcttcaaggagaactacaaaccactgctcaaggaaataaaagaggagacaaacaaatggaagaacattccatgctcatgggtaggaagaatcaatatcgtgaaaatggccatactgcccaaggtaatttacagattcaatgccatccccatcaagctaccaatgactttcttcacagaattggaaaaaactactttaaagttcatatggaaccaaaaaagagcccgcattgccaagtcaatcctaagccaaaagaacaaagctggaggcatcacactacctgacttcaaactatactacaaggctacagtaaccaaaacagcatggtactggtaccaaaacagagatatagatcaatggaacagaacagagccctcagaaataatgccgcttatctacaactatctgatctttgacaaacctgagaaaaacaagcaatggggaaaggattccctatttaataaatggtgctgggaaaactggctagccatatgtagaaagctgaaactggatcccttccttacaccttatacaaaaatcaattcaagatggattaaagatttaaacgttaaacctaaaaccataaaaaccctagaagaaaacctaggcattaccattcaggacataggcgtgggcaaggacttcatgtccaaaacaccaaaagcaatggcaacaaaagacaaaattgacaaatgggatctaattaaactaaagagcttctgcacagcaaaagaaactaccatcagagtgaacaggcaacctacaacatgggagaaaatttttgcaacctactcatctgacaaagggctaatatccagaatctacaatgaactcaaacaaatttacaagaaaaaaacaaacaaccccatcaaaaagtgggcgaaggacatgaacagacacttctcaaaagaagacatttatgcagccaaaaaacacatgaagaaatgctcatcatcactggccatcagagaaatgcaaatcaaaaccactatgagatatcatctcacaccagttagaatggcaatcattaaaaagtcaggaaacaacaggtgctggagaggatgcagagaaataggaacacttttacactgttggtgggactgtaaactagttcaaccattgtggaagtcagtgtggcgattcctcagggatctagaactagaaataccatttgacccagccatcccattactgggtatatacccaaatgagtataaatcatgctgctataaagacacatgcacacgtatgtttattgcggcactattcacaatagcaaagacttggaaccaacccaaatgtccagcaatgatagactggattaagaaaacgtggcacatatacaccatggaatactatgcagccataaaaaatgatgagttcatatcctttgtagggacatggatgaaattggaaaccatcattctcagtaaactatcgcaagaacaaaaaaccaaacaccgcatattctcactcataggtgggaattgaacaatgagatcacatggacacaggaaggggaatatcacactctggggactgtggtggggtcgggggaggggggagggatagcattgggagatatacctaatgctagatgacacattagtgggtgcagcgcaccagcatggcacatgtatacatatgtaactaacctgcacaatgtgcacatgtaccctaaaacttagagtataataaaaaaaaaaaaaaaaaaaaaaagaaaaaaaaaaaaaaaga

SEQ ID NO: 898 - DNA, 657 bp, Homo sapiens
  source 1..657: mol_type = other DNA
agcgcctctgcccggccgcccctactgggaagtgaggagcccctctgcccggccagccgccccgtccgggagggaggtgggggtgtcagccccccgcccggccagccgccccgtccgggagggaggtggggggggtcagcacccccgcccggccagccgccccgtccgggaggtgaggggcgcctctgcccggccgcccctactgggaagtgaggagcccctctgcccggccaccacccggtctgggaggtgtgcccaacagctcattgagaacgggccaggatgacaatggcggctttgtggaatagaaaggcgggaaaggtggggaaaagattgagaaatcggatggttgccgtgtctgtgtagaaagaagtagacatgggagacttttcattttgttctgcactaagaaaaattcctctgccttgggatcctgttgatctgtgaccttacccccaaccctgtgctctctgaaacatgtgctgtgtccactcagggttaaatggattaagggcggtgcaagatgtgctttgttaaacagatgcttgaaggcagcatgctcgttaagagtcatcaccaatccctaatctcaagtaatcagggacacaaacactgcggaaggccgcagggtcctctgcctaggaaaaccagagacct

SEQ ID NO: 899 - DNA, 2351 bp, Homo sapiens
  source 1..2351: mol_type = other DNA
ttgttttattgtgcttcacaggtactgtatctttttttacaaatctaagttttgtggcaactctgtgtcaagcaaggctattggccccattttcccaacaagtacgcacttcccatttctattttacatttttagtaacttttgcaatatttaaaatattttcattattattatatctgttaaagtgatctgtgatcagtgatctttgatgttactattataattgttttggggtgccatgaactatacccatataagatggcaaacttaattgataaatgttatgtgtgttctgactgttccactaaccagccattcccttgtctctctctcctcgagcttccctattccctgagacacaacaatattgaaattaggccaactaataaccctacagtggcctctaagtgttcaagttaaaggaagagagtggcacatctctcactttaaatcaaaagctagaaatgattaagcttagtgaggaaggcatgctgaaaaccaagacaggctgaaaccaggcttcttgcaccagttagccaagttgtaagtgcaaaggaagaccttgaaggaaattaaaagtgctgctccagtaaacactggagcacaagaaagcaaaacaaccttgttgttgatatggagaaagcttgagtggtctagaaagaagatcagaccagccacatcatccattaagccaaagcccagtccagagcaaggccctaattctcttcatttcagtgaaggctgagagatgtgttgaagctgcagaataaaaatttgaagctagcagaggttggttcatgaggtttaaggaaagaagccgtctctataacaggaaagtgcaagtgctgatgtagaagctgcagcaaggtatccagaaaatctagctaagatcattgatgaaggtgtctacactaacagattttcaatgtaaacgaaacagccttctattggaaaaagatgccatctaggacttccattgctggagaagagaagtcaatgcttgacttcaaagcttcaaaggacaggctgactctcttgctagggactaatgcagctggtgactttaagttgaagccaatgctcatttaccattccaaaaatccgagggtcttgagaattatctaaatctaccctgcctgtgctctgtaaatggaatgacaaagcctggatgacagcacatcggtttatagcatggtttactgactatttgaagcccactgttgagaactattgttgagagaaaaagattcgtttgaaagtattactgctcattgacaatgcacctggtcacccaaaagctctgctggagatgtacacggaaattcatgttgttttcatgcctgctgacacaacatccattctgtagcccacgcatcaaggagtaatttcaactctcaagttttgttatttaaaaaacacatttcataaggttcagctgctatatagatagtgattcctctgatggatttgggcaaagtaaatagaaaaacttagggaaaggatgcgccattctagatgccaggaagaacactcatgattcaggaagaaggtcaaagtgtcaacattaacaggagtttggaagaagttgattccaaccctcatggatgactttaaggggttcaagccttcagtgtaggaagtaactacacatatggtggaaatagcaagagaactagaattagaagtgcagcctgaagatgtaactggattgctgcaatctcataaaacttgaatggatgaggagttgcttttaatgaatgagcaaagaacgtggtttcttgaggtagaatctagtcctggtgaagatgctgtgagcattattcaactggcaacgagggatttagaatatgacttaaacttagttgaaaaaggagcagcgggtctgagaggatagactacagttttgaaagaagttctactgtggataaaatactatcacacaacactgcatgctacagagaagtttttggtgaaaagaagagtcagttgatgagacagactttactgttgtcttattttatgcaattgcacagccacctcatcatttagcaacctccatcctgatcagtcagcagccatcagccatggaggcaagaccctccatcagcaaaaagattaagactctctgaaggctcagatgatcattaacattttttagcaataaaactattttaaattaaggtaggtacattgttattttagacataatgctattgcacttaatagactacaatgtaatgtaaatatataacttttatatgcaccgagaaaccaaaaaatttgtgtgactcacatattcactttattgtggtagtctggaaccaaacccacaatatctccagggtaggcct

SEQ ID NO: 900 - DNA, 6021 bp, Homo sapiens
  source 1..6021: mol_type = other DNA
ttccaatatagccaaataggaagagctctggtctgcagctcccagtgtgatcaatgcaagatgggtgatttctgcgtttccaactgagctacctgattcatctcattgggactgattggacagtgagttcatcccatggagggtgagctgaagcagggcagggcatcaactcacccaggaagtgcaaggggtttggggattttcctttcctagccaagggaaggcatgacagactgtacctggaaaaacaggacactcttgcccaaatactgcactttttgcacagtcttagcaactggcagaccaggagattctctcctgtgcctgattcattgggtcccacacccatagggccttgcttactgccagtgcagcagtctgagattaaccttcatgctgcagctgagcaggtggaggtgaatccacaatttttgaggtttcagtaggtaaacaaagtggccaggaagcttgaacagggtagagccactcacagctcagcaaggcctactgcctttataaactccacctctgcgggcagggcacagctgaataaaaggcagcagaaacttctgcagacttaaacctcccatctgacagctctgaagagagcagtggttctcctggcatggtgtttgtgctctgagaatggacatactgcctcctcaaatgggtccctgaaccccgtgtagcctaactgggagacatctcatagtacgggccaacagacacctcatacaggtaggagaccctcttcaacgaagcttccagggaaggatcaagcagcaatatttgctgttctgcagccttctctgttgatacccaggcaaacagggtctggagtggacctccagcaaactccaacagacctgcagctgagggacctgactgttagaaggaaaactaacaaacagaaaggaatagcatcaacataaacaaaaaggacatccacaccaaaaccccatctgtaggttaccaacatcaaataccaaagatagataaaaccacaaagatgggaagaaaccagaacagaaaagctgaaaatcctacaaaccagagcatctcttttcttccaaaggattgcagctcctcaccagcaatggaacaaagctggagggagagtgactttgatgagttgacagaaggaggcttcagaaggctggtaataacaaacttctccaagctaaaagagcatgtttgaacacatcgcaaggaagctaaaaaccttgaaaaaaggtcagacaatggctaactagaataaacagtgtagagaataccttaaatgaccttatggagctgataaccatggcacaagaactctgtgacacatgcacaagcttcaatagctgattcaatccagtggaagaaaggatatcagtgatcgaagatcaaattaataaaataaagtgagaagacaagtttagagtaaaaagagtgaaaagaaatgaacaaagcctccaggaaaaatgggactatgtgaaaagaccaaatctatgtttgcttggtgtacctaaatgtgacagagagaatggaaccaagttggaaaacactccttaggatgttattcaggagaattttcccaatgtagcaaggcaggccagcattcaaattcaggaaatacagacaacaccacaaagttacttctggataagagcaaccccaagatactaattgtcagattcaccagggttgaaatgaaggaaaaaatgttaagggcagccagagagaaaggtcgggttacccacaaggggaaacccatcagactaatagcagatctctcagcagaaaccctagaagccagaagagagtgggggtcaatattcaacattcttaaagataagaattttcagcccagaatttcatatccagctaaactaagcttcataagtgagggagaagtaaaatcctttacagacaagcaaatgctgagagattttgagacctcctggcctgccttaaaagagctcctgaaggaagcactaagcgtggaaaggaactaccagtaccagccactgcaaaaaatatgccaaattgtaaagaccatcgatactatgaagaagctgcatcaattaacaggaaaaacagtgagctaacataacaatgacaggatcaaattcacacataacagtattgaccttaaatgtaaatgggctaaatgactcaataaaaagacatagactgtcaaattggataaagagtcaagacccatcagtgtgctgtattcaggagacccatctcacatgcagagacacacataggctcaaaataaagggatggaggaagatctaccaagaaaatggaaagcaaaaaaattaaaaattaaaaaaaagcaggggttgcaatcctagtctctgataaaacagaatttaaaccaacaaagatcaaaagacacaaagaaggccattacataatggtaaaaggatcaattcagcaagaagcgctaactaccctaaatatatatgcactcaatacaggagcacccagattcgtaaagtaagtccttagatacctacaaacagacttagactcccacacaataataatgggagactttaacactccactgtcaatattagacagatcaacaagacagaaggttaacaaggatatccagaacttgaactcagctctgcaccaagtggacctaatagaaatttacagaattctccaccccgtatcaccagaataaacattcttctcagcaccacatcgcagttattctaaaattgatcacataattggaagtaagcactcctcatcaaatgtaaaagaacagacatcacaacaaactgtctctcagatcacagtgcaatcaaattagaacttagaattaagaaactcactcaaaatggcccaaacacatggaaacagaacaacctgcttctgaatggctactgggcaaataacgaaatgaaggcaaaaataaagatgttctttgaaaccagtgagaacaaagacaaaaaacaccagaatctctgggacacatctaaagcagtgtgcagagggaaatttatagcactaaatgcccacaagagaaagcaggaaagatctaaaattgacagccccacatcacaattaaaagaactagagaaacaggagcaaacaaattcaaaaacaagcaaaaggcaagaaagatcagagcagaactaaaggagatagagacacaacaaacccttaaaaaatcaatgaatttaggagctgattttttgaaagatcaacaaaattgatagaccactagcaagactaataaagaagaaaaaagacaagaatcaaatagacacaataaaaaaagataaatggtatatcatcactgatcccacagaaatacaaactaccatcagagaatactataaactcctctacacaaataaactagaaaatctagaagaaatggataaattcctggacacatacaccctcccaagattaaaccaggaagaagttgaatctctgaatagaccaataacaggatctgaaaattgaggcaataattaatagcataccaacaaaaaaatatccaggaccagatggattcacagctgaatcctaccagaggtacaaaaaggagctggtaccattccttctgaaactattccaatcaatagaaaaagaggaaatcctccctaattcattttatgggaccagtatcatcctgataccaaaccctggcagagacaaaacaaaaaaaaagagaattttagaccaatatccttgatgaacatcgatgtgaaaatcctcaataaaatactggcaaatggaatccagcagcatatcaaaaagcttatccaccacgatcaagtagtcttcatccctggaatgcaaggctggtacaacatacacaaattaataaatgtaatccatcatataaacagaatcaatgacaaaaaccacatgactgtctccatagatatagaaaaggcctttgacaaaattcaacagtctttcctgctaaaaactctcaataaactacatattgatgaaatgtatctcaaaataataacagctatttatgacaaacccacagccagggcaatcaggcaagagaaagaaacaaaggtattcaattaggaagtcaaattatctctgtttgcagatgacatgattgtatatttagaaaaccccatcgtctcagcccaaaatctccttaagctgataagaactttagcaaagtctcaggataagaaatcaatatgcaaaaatcacaagaatttctatacaccaataacagacaaacagagagccaaatcatgagtgagctcccattgacaattgctacaaagagaataaaataccttggaatacatcttacaagggatgtgaacgacctcttcaaggaaaactacaaatcactgctcaacaaaataaaagaggacacaaacaaatggaagaacattccatgctcatggataggaataaccaatattgtgaaaatggtcatactgccctaggtaatttacagatacaatgccatccccatcaagctacgaatgactttcttcacagaattagaaaatactactttaaagttcatatggaaccaaaaaagagcccatatcgccaagacaatctaagcaaaaagaacaaagctggaggcatcacactatttgacttcaatctatactacaaggctacagtaaccaaacagcatggtaccgatatcaaaacagatctatagaccaatggaacagaacagaggcctcagaaataacaccacacatctacaaccatctgatctttgaaaaacctgacaaaaacaagcaatggagaaaggattccctatttaataaatggtgctgggaaaactagctagtcataggtagaaagctgaaactggatcccttccttacaccttatacacaaattaattcaacagggattaaaggcttaaatgttaggcctaaaaccataaaaaccctagaagaaatcctaggctacatcattcaggtcataggcatgggcaaagatttcatgactaaaataccaaaaacaatggcaacaaaagccagaatagacaaatcagatctaattaaactaaagcgcttctgcacagtaagagaaactaccaacagcatgaacagacaacctacagaatgggagaaaattgttggcaatctatccatctgacaaagggctagtatccagaatctacaaaaaacttaaacaaatttacaagaaaaaaacaccatcaaaaattgggcaaaggatatggacagacacttctcaaaagaagacatctatgcagccaacagacacatgagaaaatgctcatcatcaatggtcatcagagaaatgcaaatcaaaaccacagtgagatacaatctcacgccagttagaatggtgattatttgaaagtcaggaaacaacagatgctggaaagcatgtggaaaaataggaaggcttttacactgttggagggattgcaaattagttccaccactgtggaagacagtgtggccattcctccaggatctagaactagaaataccatctgacccagcaatcccattactgggcatatacccaaaggattataaatcatgccactataaagacacaagcacatgtatgtttattgcagcactattcacaatagcaaagacttggaaccaacccaaatgtccatcaatgatagaactgattaagaaaatgcagcacatatacaccatggaatagtacacagccataaaaacagatgagtttttgtcctttgcggggacttggatgaagccagaaaccatcattttcagcaaactatcacaaggacagataaccaaacaccacatgttctcactcataggtgggaatttaccaatgagaacacttggacacaaggcaggtaacatcacacaatggggcctgtcaggggctggagggctagaggagagatagcagtaggagaaatatctaatgtaaatgatgagttgataggtgcagcaaaacaacatggcacatgtaaacctatgtaacaaacctgcatgttgtccacatgtaccctagaacttaaagtataataaaaaaataaaa

SEQ ID NO: 901 - DNA, 58745 bp, Homo sapiens
  source 1..58745: mol_type = other DNA
ggaaaaggaaatatcttcacataaagacaagaaagaagcattctgagaaacttctttgtgatgtgtgcattcacctcacagagttgaacttttcttttgatttagcacttttgaaatactctttttgtagtgtctgcaagtggatatttggagcgatttacagcctatggtggaaaagtaaatatcttcacataaaaaccagacagaagaattctgagaaacttctttgtgatgtgtccatttatttcacagggttgaacctttcttttgattgagcagtttagaaacactctttttggagaatctgcaagtggacattggtgcgctttgaggcctatggtggaaaaggaaatatcttcacataaaatctagacagaagcaatctgagaaacttctttctgatgtttgcgttcatctcacatgtttaaccctttcttttgattgagcagttttgaaactctctttttgtagaatctgtaagtggacatttgcagcgctttgaggcctatggtggaaaatgaaatatcttcacataaaaactagacagaagatttctgagaaactccttgtgatgcgtgctttcatctcacagagttgaacctttcttttgattgagcagtttgcaaaacaagctttttgtacaatctgcaagtggacatatggagcgcttcgtggcctatggtagaaaaggaaataacttcacataaaatctagacagaagaaatctgagaaacttctttgtgatgtgtacattcatctcacagagttaaacctttctactgattgaggaattttgaaactctcttcttgtagaatctgcaagtggacatttggaggaatttgacgcctatgttggaaaaggaaatatcttcacaaaaaaaaaacgagatagaagcattctcagaaacttctttgtgatgcttgcattcatgtcccagagttgaaactttctttggtggacaagttttgaaatactctttttgtagaatctgcaagtggacatttcgagtgccttgaggcctatggtggaaaatgaaatatcttcacataaaaaccagacagaagaattctgagaaacttctttgtgatgtgtgtgttcatctcacagagttgaacctttcttctaattgagcagtttggaaacactctttttgtagaatcttcaagtggacatttggagtgctttgcagcctatggtagaaaaggaaatatctttacataatatctagacagaagcaatctgagaaacatctttgtgatgtgtgcattcatctcacagagtaaaacattccttttaatggagcaattttgagtctccctttttgtacaaactgcaagtggacatttggagcgctttgaggcctgtggtggaaaaggaaatatcttcacataaaaactagacggaagaattctgagaaactcctttgtgatgtgtgcgttcatctcacagaattgaaccttacttttgattgagcggtttgggaacactctttttgtagaatctgcaagtggacatttggaacgctttgtgagctatggtagacaaggaaatatcttcacataaaatctagacagaagaaacctgacaaacttctttgtgatgtgtgcattcatctcacagagttgaatctttcttttcatagagcagttttgaaactctcttttgtaaaatctgcaagtggacatttgaagtgttttgaggcatatggtggttaacgaaatatctttatataataactggacaaaagcattctgagaaacttctttgtgatgtgtgtgttcatctctcagagttaaacatttcttttgattgagcagttttgaaactctctttttgaagaatcttcaagtggacatttggagggcttcactgcctgtggtagaaaaggaagtttcttcacataaaatctagacagcagctatctgagaaacttctttgtgatgcctgcattcatttcacagaattgaacatttcttttgactgagcagtttggaaacaccctttttttagaagctgcaattggacatttgaagagctttgcggcctatggtagaaaaggaaataccttcacataaaatctaggcagaatcagtctgagaaacatctttgttatgtctgcattcatctcagagagttaaacctttcttttgaatgagcagttttgaaactctctttttgtagaaactgcaagtggatatttgaagtgctttgaggcctatagtggaaaaggaaatatcttcacataaaaactagacagaagaattccgagaaacttcttggtgatgtgtgcattcatctcacagagttgaaactttcttttgattgagcagttaggaaacactctttttccagaatctgcaaggggacatttggagtgctttgtgtcctatggtagaaaaggaaacatctttacataatatctagacagaagcagtctgagatacttctttgtgatgtgtgcattcatctcacagagttaaacgtttcttttgatagagcagtttagaaactctctttttgtggaatctgcaagtggacatttggaggacttttgggcctgtggtggaaaaggaaatatcttcacataaaaattagacagaagcattcttagaaacatctttgtgatgtgtgcattcaactcacagagttaaacttttcttttgatagagcatgtttgaaacactctttttgcagaatctgcaagtggacatttggagagatttgaaggctatggtggaaaaacaaatatcttcccataaaaactagacagaagcattctcagaaacttctgtgtgctgtttgcattcaactcagagacttgaacatactttataatagagcagttttgaaacactcttttagtagaatctgcaagtggatatttggaccgctttgaggccttcgttggaaatgggaatatcttcacataatcactagatagaagtttctctgaaacttcttttttctgtgcgcattcaactcacagagttgatcctttcttttgacagggcagatttgaaacactttttttgtagaatctgcaagtggacatttggagcgctttgaggcctatggtggaaaaacaaatatcttcccacaaaaactagagagaagcattctcagaaacttctttgtgatgtttgccttcaactcatggagttgaacataccttatgatagagtagttttgaaacactcttttagtaggatctgcaagtggatatttggatcgctttgaagccttcgttggaaatgggaatatcttcacataaaaactgacagcagcatcctcagaaacttcttgtgatgtgtacattcaactcatagagttgaaactttctttttatggaacagttttgaaacactctttttgtagaatccgtaagtggatatttggaatgcgttgaggcattcgttggaaacgggaatatcttcacataaacattagacagaagttttctccgaaacttctttgtctatgtacattcaactcacagagttgaacctttcttttgatagaacaggtttcaaacactctttttgtagtatctgcaagtgaacattctgagcgctttgaggcctatggtggaaaaggaaatatcttcacataaaaactagacagaagcattctcagaaacttctttgtgatggtgatgtatgcatccaactcacagagttgaacctttcttttgatagagcaggtttgaaacactgtttttgcagaatctgcattggacattcggatccctttgagacctatgttggaaaaggaagtatcttcacataagaactagacagaaccattttcagaaacttctttgtgatgtttgcattcaactcactgagttgaacctttcttttgatagagcaggtttgaaacactctttttgtagaatctgcaagtggacatttggagcgcttttgggcatatagtggaaaaggaaatatcttcacataaaaactagacagaagtattctcagaatcttctttgtgatgtgtgccttcaactcaaatagttgaaagtttattttgattcagcagtttggaaacactctttttggagattctgcaagtggacatttgcagcgctatgaggactatggtagaaaaggtaatatcttcaaaaaaatctagacagaaggaatctgagaaacttctttggcatgtgtgcattcatctcacagagttcaaactttcttttgactgagcagttttgaaactctgtttttgtagaatttgcaagtggacatttggatcattttgaggcctatggtggaaaaggaaatatcttcacataaaaacttgacagaagaattctgagaatctcctttgtgatgtatgcgtttatctcacaaagttgaaccttccttttgattgagcagtttagaaacattctttttgtagaatctgcaagtggactattggagtgctttgttgcctatggtagaaaaggaaatatcttcacataaaatctagacagaagcaatctcagaaacttctttgtgatgtgtgcattcatctcagagagttaaacctttcttttggttgagtagttttgaagctctctttttgtagaatctgcaagtggacattttgagtgctttgaggcctacagtgggaaaggaaatatcttcacataaaaactagacagaagaattttgagaaacttctttgtgatgtgcacgttcttctcacagagttaaaacttccttttgattgagcagtttgcagacactctttttgtagaatctgcaagtggactattggagtgctttgttgcctctgttataaaaggaaatatcttcacataaaatctagacagaaccaatgtgagaaacctctttgtgatgtgtgcattcatctcacagagttaaagcattcttttgattgagcagttttgaaactcttttttttgtagaatctgcaagtgaacatttggagtgcttttaggcctatggtggaaaaggaaatatcttcacataaaaactagagacaagaattctgagaaacttctttgtgatgtgtgcgttcatctcacagagttgaacctttcttttgattgagaattatggaagcactctttttgtagattctgtaagtgggcatttgaagcgctttgcagcctaagttagaaaaggaaatatcctcacataaaatctagacagaagcaatgtgagaaacttccttgggatgtgtgcattcatctcacagggttaactcttacttttgattgagcagttttgaaactctctttttgttgaatgtggaagtggacatttggagcgctttgaggcttatggtggaaaaggaaatatcttcacatagaaactagacagaagcactcttagaaacttctttgtgatgtgtgcactgatctcacagagttaagcctttgttttgattgagcagttttgaatctttttgtagaatctgcaagttaacatttggagcgctttgaggcctgtggaggaaaaggaaatattttgacatcaaaactacacagaagaattcggagaagcttctttgtgatgcatgcgtttatctcacagagttgaacctttcttttgattgagcagtttggaaacactctttttgtggaatctgcaagtggacatttggagcgctttgcagcctatgttagaaaaggaaatatattaccataaaatctagataatatgaatctgagaaacttctttgtgatgtgtgcattcatctcacagagttaaaactttcttttgattgagctgtcttgaaactctcttattgtaaaatctgcaagtggacatttggagcgctttgaggcctatggtggaaaagtaaatattttcacatagaaactagacagaaaaattctgagaaacttctttgtgatgtgtgcttacatctcacagagttgaacctttctttagattgagcagtttggaagcactctttttgtagaatctgcaagcggtcatttggagcgctttgcgacctctggtagaaaaggaaatatcttcacagaaaatctagataaaagcagtctgacaaacttctttatgatgtgtgcattcatctcacagagttaaacatttattttgattaagcagttttgaaactctctttttgtagaatctgccagtgtacatttggagcgctttgaggcctatggtgtaaaaggaaacatcttcagataaaaactagacagaataattctgagaaacttctttgtgatgtgtgcattcatctcacagagttgaacctttcttttgattaagcagtttggaatcactctttttgtagaatctgcaagtggacatttggagcactttgtcgcctacgttagaaaaggatatatattaaaataaaatctagacagaagcaatctgaaaaacttctttgtgatgtgtgcatgcatctcacagagttaaaactttcttttgatggagctgtcttgaaactccctttttgtaaaatctgcaagtggacatttggagcgccatgaggcctatgatggaaaaggaaatatcttcacataaaaactagacagcagaattctgagaaactactttgtgatgtgtgtgttcatatgacagggttgaactttacttttgattgagcagtttggaaagactctttttgtagaatttgcaactggacatttggagcgctttgtggcctatggtagaaaagaaaatatcttcacataaaatctagataaaagcaatctgaaaaacttctttgtggtgtgtgcattcatctcacaaagtaaacctttcttttgactgagcactttggaaactctctttttgtagaatctgcaagtggacattttgaaggctttgaggcctatggtggaaaaggaattatcttcaaatacaaactagacagaagaattatgacaaacttctttggatgtgtgcattcagctcacgaagttgaacatttcttttgatggagcagtttggaaacactctttttgaagaatctgcaagtggacctttggagctgtttgcagcctatggtggaaaaggaaatatcttcacataagatgtagacagaagtaatctgaaaaccttctttatgatgtgtgcattcatctcacagagttaaacgtttcttttgattgagcagtcttgaaactctctttttgtggaatctgcaagtggacatttggagcgctttgaggcctacggtggaaaaggaaatatcttcacataaaaaataaatagaagcatttttagaaacatctttgtgatgtgtgcattcatctaacggattgaaacctttcttttgatagagcagttttaaaactccctttttgtataatctctaaatggacatttgaagggcgttcaggcctatggtgaaaaatgaaatatcttcacataaaaagtacatagaagcattctgagaaactactttgtgatgtgtgcattcaacccccagatttgaacattcctttgagggaccagttttgaaatactctttttgtagaatctgcaagtggacattttgagtgccttcgggtctacggtacgaaaggaaatatcttcacataaaaactagaaagaagaattctgagaaagttctttatgatgtgcgcattcatctagaaagttgaacatttctttgaatgagcagtttggaaacactcttttggtagaatctgcaagtggacatttggagcgctctgaggcctatgttacaacaggaaatatcttcacataaattgtagacagaagcaatctgtgaaacttctttgtgatgtgtgcattcatctcaaagaggtaaagctttcttttgatagagcagatttgaaactctctttttgtagaatctgcaagtggacatttggagcgatttgatgcatgtggtggaaaagttaatatcttcatataaaaactagacagaagaattctgagaaacttctttgagatgtctgcgttcatctcacagagttgaaactttccttagattgagcagtttggaaacactctttttgtagaatctgcaagtggacatttggagagctttgcggccaatggtagaaaaggaaatatcttcacataaagtctagacagaagcaatctgagaaacttctttgtgatgtgtgcattcatcccacagaattaaaagtttcttttgatttagcagttttgaaactctctttttgtagaatctgcaactggacatttggagtgctttgtgccctatggtagaaaaggaaatatcttcatataaaatcttgacagaagcaatctgagaagcatctttgtgatatgtgcattcatcccagagagttaaaactttcttttgattgaggagtattgaaactctgtttttgtaaaatctgcaagtggacttttggagccctttgagtccaatggtggaaaaggaaatatcttcccataaaaaccagacagaagaattctgagaaacttctttgtgatgcgtgcattaatctcacagatttgaacctttcttttgattaagcagtttgcaaccactctttttgtcgaatctgcaagtggacatttggagggctttgtggcctatggaagaacaggaaatatcttcacataaaatctagacagaagcaatctcagaaacttctgtgtgttgtgtacattcatctcacagagttaaaattttcttttgattgagcagtttggaaactctctttttgtaggatctgcaagtggacatttgcagtgctttgagttcaatggtggaaaaggaaatatcttcacataagaactagacagaagaattctgagaaacttctttgtgatgtgtgcgttcatctcacagagttgaacttttctttttattgagccgtttgaaaacactgtttttgtagaatctgcaagtggacatttgtagcactttggagccaatggtagaaaaggaaatatcttgacgcaaaatctacacagaagcaatctgggaaacttctttgtgatgtgcgcgctcatctcacaaagttaaacctttcttttgattgagcagttttgaaactctctttttgtagattctgcaagtgaacgtttggagcggtttgagacctacggtggaaaaggaaatatattcacataaaaactagatagaatcaatatgagaaactactttgtgatatgtgcgttcatctcccagatttgaatctttcttttgatggtccagttatttattactctttttgtggaatctgcaagtggacatttcaagccccttgaggcctactgtggaaaatgaaatacattcacataaaaactagacagaagaaaactgagaaacatctatgtgacgtgtgcgttcatcttacagagttaaactttttttgatcgagcagtttggaaacactttttgaacaatctgcaagtcgacatttgaagctctttgagaactgtggtggaaaaggaaatatcttcacataaaaactagacagaagaatactgtgaaatcactttgtgatgcgtgcgttcatcacacagagttgaaagtttcttttcattgggctgtttggaaacactctttttgcagaatctacatgtggacaattttagcgctttgcggcctatggtagaaaatgaaatatcttcacataaaatctagacagaagcaatctgacaaacttctttgtgatgtgttcattcatctcacagagttaaacctttctttttattgagcagttttgaaactctctttttgtagtatctgcaagtggacatttggagcccttttaggcctgtggtagaaaaggaaatctcttcacataaaaactagacagaagaattctgaaaaacttctttgtgatgcgtgctttcatctctcatagttgaaactttattttgatacagcaggttggaaaccctcttttgtagaatctgcaagtgcacattcggagcgctttgtggcctgtagtagaaaaggaaatatcttcacataaagtctagactgaagcaatctgataaacttctttgtgatgtgtgcattcatctcatggagttaaacttttcttttgattgagcagtcttgaagctctctttttgtagaatccgcaagtggatatttggagctctttgaggccaacagtggaaaaggaaatatctgcacataaaaactagacagaagaattctgagaaacttctttgggacgtgtgcattcatctcacagatttgaacctatcttttgattgaaccgttgggaaacactctttctgtagaatatgcaagtggacatttggagaactttgtggcatatggtagaaaaggaaatatcgtcacataaaatctagacagaagccatctgagaaacttctttgtgatgtgtgcatttatctcacagagttaaaccttttttttgattgagcagtttggaaacactctttttgtagaatctcgaagtggacatttggagcgcttagaggcctatggtggaaaaggaaatatcttcacataaaaactagacagaagaattctgataatcttctttgcgatgtgtgcgttcatctcacaaagctgaaattttcttttgattgagcagtttggaaactctttttgtagaatctgcaagtggacatttgcaatgctttgcggcctatggttgaaacagaaatatcttcacataaaacctagacagaaacaatctgagaaacttctttgtgatgtgtgcattcatctcacagagttaaacctttcttttgattgagcggttttgaaattctcttttcatagaatctgcaagtggacatttggagcgctttgaggcctgtggtggaaaaggtaatatcttcacataaaaactagacagaagaattctgacaaacttcttgggaatgtgtgcgttcatctcacagacttgaacctttcttttgattgaggagtttggaaccactcttttttgtagaatctgcatatggacatttgaagcgctttgcgacctatggtagaaaaagtaacaccttcacataaaatctagagagaagcaatcggagaaacttcttagtgatgggtgcattcatctcacagagtttaaactttcttttgattcagcagttttgaaactctctttttgtagaatctgcaagtggacatttggaacgctttgaggcctatggtggaaaaggaaatatcttcacataaaaactagaaagaagaattctgacaaacttctttgtgatgtgtgcgttcttctcacagagtggaaccgttcttttgattgagcagtttggtaccactctttcttgtagagtctgcaggtgggcatttggagagctttgcggtctatggtagaaaagtaaatatcttcacataaaatctacacagaagcaatatgagaaacttgtttgtgatatatgcattcatctcacagagataaccctttcttttgattgagcagttttgaaactctctttttgtagaatctgcaagcggacatttagagcgtcttgaggcctatgatggaacaggaaatatcttcacataaaaattagacagaagaattctgagaaacttctttgtgatgagtgtgttcatctcacagagttgaacatttcttttgattgagtagtttggaaacactctttttttgtagaatctgcaagtggacatttggaactctttgcggccaatggtagaaaaggaaatatcttcacataaaatctagacagaagcaatctgagaaacttctttgtgatgcgtgcattaatctcacagagttaaacctttcttttgattgagcagattggaaactctctttttgtagaacctgcaagtggacatttggcagcgctttgaggcctgtggtggagaaggaaatatcttcacataaaaagtagatagaagcattctgagaaagttctctgtgatgtctgcattcatctcctggagttccaactttctttaggagaaccagttttcaaattctctttttggagaatctgcaaggggacatttcaagcaccttgaggcttaagttggaaaaggaaatatgttcacaaaaaaaaaacagaagaattctgagaatcttttttatgatgtgtacgttcatctaacagagttgaacctttcttttgattgcgtagtttgggaacaccctttttgtagaatcggcaagtggacatttggagcgctttgcggcctatgatagaaaaggaaatatcttcacataaaatctagaaggaagcaatctgagaaactcctttgtgatgtgtgcattcatctcacagagttgaaactttcttttgattgagcagttttgaaacactctcttcgtgaaatctgcaattggatatttggagccctttgaggcctactgtggaaaaggaaatatcttcacataaaaactactcagaagcattctgagaaacaccattgtgatgtttgcattcaactcacagagttgaaactatgttttgattgagcagttttgaatctctctttctgcagaaactacaagtgtatgtttggaaagctttgaggcctattgtggaaaaggaaatatcttcacataaaaactacacagaagcattctgagaaactactttgtgaggtgtgcattcaactcacagagttgaaattatcttctctttgaggagtttccaatctctctttttgtagaatctgcaagtggatatttgaagatctttgcaccctatggtggaaaaggaaatatcttgaaataaaaactacacagaagcattcagagaaacttctttgtgatatgtgcattcaactcacagagttgaacctatcttttgattgagcagttttgaatctctctttatgcacaatctgaaggtggatatttcgagccctttgaggcctacagtggaaaagcaaatatcttcacataaaaactatgcagaagcattgtgagaaactactttgtgaggtgtgcattcaactcacagagttgaacttatcttctcattgagcagttttgaatttatcttttggtagaatctccaagtggatatttggagccctttgcgccctatggtggaaaaggaaatatcttcaaataaaaactacacagaatcactcagagaaactgctttgtgatgtgtgcattcatctcacagggttgaacctagcttatgattgagcagttttgaaatactctttttgtaggatcttcaagtggatatttggagcgctttgaggcctacagtggaaaactaaatatcttcaaataagaactacacagaagcattctgagaaacttctttgtgatgtgtgcattcatctcactgagttgaacctttcttttcattgcgcagttttgaaacaccgtttttgtagaatctgcaagtggatatttggagaactttgccgcctattgtggaaaaggaaacatcttcacataaaaactactcagaagcattctgagaaacttctttgtgatgtgggcattcaactcacaaagttgaacctatcttttgattgagcagtttagagtctctctttttctataatctacaagtggatatttggagccctttgcgccctatggtggaaaaggaaatatcttcaataaaaactacacagaagcattctaagaaacttcttcgtgatgtgtacagtcaactcactgagttgaacttatcttctcaatgagcagttttgaatctctgtttttgtagattctgcaagtggatatttagagccctttgtgccctatcatggaaaaggaattatcttcaaatagaactacacagaaccatccagagaaacttctttctgatgtatgcattcaactcacagagttgaacctatcttttgattgagcagttttgaatacctctttttgcagaatctgtaggtggatatttggagccttttgaggcctgctgtggaaaatcaaatatgttcacataaaaactatacagaaagattctgagaaacttctttgtgatgtgtgcattcaactcagagagttgaacctatcttttgattaagcagttttgaatctctctttttgtagaatctgcaagtggatattaggagccctttgtgccctatggtggaaaaggaaatatcttcaaataaaaactacatagaagcattcagagaaactgctttgtgatgtgtgcattcaactcacagaggtgaacttatcttttgtttgagcagttttgaatctctctttatgcagaatctgcaggtggatatttggagaccatcgaggcctactgtggaaaaggaaataacttcaaataaaaactatacagaagcattctcagaaacttcttcatgatgtatgcattcaactcacagagttgaacctatcttttgattgaacagttttgaatctctctttttgcacaatctgcaagtggatgtttggagcgtcgtgaggcctactgtggaaaatcaaatatgttcacataaaaactaaacagaagcattctgagaaacttctttgtgatgtgtgcattcaactcacagagttgaacctatctttcgattgagcagttttgaatctctcttttttcaggatctgtaagtggatgtttggagagctttgaggactattgtggaaaaggaaatatcttcacataaaaactacacagaatcattctgagaaacttctttgtgaggtgtgcattcaactcacagagttgatcttatcttatcattgagcagttttgaatctctctttttgtagaatctgcaagtggatatttggagccctttcagccctgcagtggaaaaggaaatatcttgaaataaaaactacacagaagcattcagacacacttctttgtgatgtgtgcattcaactcacagagtcgaaagtatcttttgattgagcagttttgaatctctctttttgcagaatctgcaggtggatatttggagccctttgaggtctactgtggaaaagcaaatatcctcacatgaaaattacacagaagcattctgagaaactacttcgtgacgtgtgaattcatctcacagggatgagtttatctcatgattgagcagttttgaaacactctttttgtagaatatggaagtggatatttgtaccgctttgaggccttcgttggaaatgggaacatcttcacataaacactcgacagaagcattctcagaaacttctttgtgatgtgtgcattcaactcacagagttgaacgtttattagatagagcacgtttgaaacactcattttgtagaatctgcaagtggacatttggagagctttgaggactatggtgggaaaggaaatatcttcatatcaaaactagacagaagcatactcagaaacttctttatgatgtttgcattaaactcacagagttgaactttcattttcatagaccagttttgaaacactcttttcatagtatctgcaagtggatatttggactgctttgaggacttcattggaaacgggtataacttcacataaacattagacagaagcattctcagaaacttctttgtgatgtgtgcattcaagtcacagagttgaacataccttatcatagagtagttctgaaaccctcttttagtggaatctgcaagtggatatttggactgcattgaggccttctttgaaaatgggagtatcttcacataaacactagacagaagcattctgagaaacttctttgtgatgtgtgcattcaactcacagagttgaacttttcttttgatagagcaggtttgaaacactctttttgtagaacctgcaagtggacatttggagagatttgaggcctatggtggaaaaggaaatatcttccaataaaaaatagaaggattctcagaaacttctttgtgatgtttgcgtttgccttacagagttgaacacactttatcatagagcagttttgaaacactctttgagtagaatcagcaagtggatatttggacccctttgaggccttcgttggaaacgggaatatcttcacataaaaactagacagaagcattctcaggaacttctttgtgatgtgtgcattcaactcacagagttgaacctttcttttgatagaccaggtttgaaacactctttttgtagaatttgcaagtggatatttggagagctttgtggcctaccgtggaaaaggaaatatcatcaaataaaaactagacagaagcattctcagagacttgttcgtgatctttgcattcaactcacagagttgaacataccttataatagaacagttttgaaagactcttttactagaatttgcaagaggatatttggagtgttttgagaccaacattggaaacgggaatatcttcacataaacactagacagaagcattctcagaaagttctttgtgatgtgtgcattcaactcacagagttgaacgttgcttttgatggagcagttttgacaaactctttttgtaaaatctgcaattggatatttggagagctttgaggcctatggtcaaaaaggaaatatcttcacataaaagctacagagaagcattctcagaaacttcttggtgatgtgtgctttcaactcacagaattgaaccttgcttttgatagaggaggtttgaaacactctttttgtggaatctgcaagtggatatttggaccactttgaggccttcattggaaatgggaatatcttcacataatcactagacagaagctttctcagaaacttctttgtgctgtgtgcattcagctcagagagtagaacctttcttttgatagagcaggtttgaaacacttttttcatagaatctgcatgtggatatttggaccgctttgaggccttcgttggaaacgagagtattttcacttaaacactagacagaagcattctcagaaactaatttgtgatgtgtgcattcaactcacagagttcaaccttcctttagataaagcacgtttgaaacactcattttgtagaatctggaagtggacgtttgaagaaatttgaggcctacggtgggaaaggaaatgtcatcacataaaaactagacagaagcattctcagaaacgtctttgagatgtgtgcattcaactcacagaggtgtaccttccttttcatagagcattttttaaacacacttttcgtagattctgcaagtggatatttggaccgctttgaggccttcgttagaaacgggaatatcttcacataaaaactagacagaagcatttcagaaacttctttgtgatgtgtgcattcaactcacagagttgaaactttcttttgctggagaaggtgttaaacactgtttttgtggaatataaaagtggacatttggtgcgctttgaggcctatggtggaaaaggaaatatcttcacataaaaaatagacagaatcattctcagaatcttgtttttgatggatgcattcaattcacagagttgaacatgctttattatagagcagttttgaaacactcttttgtagaatctgcaagtggatatttggaccactttaaggccttctttggaaaggggtatatcttcacataaacactagacagaagcattctcagaaacttcttcgtactgtgtgcattcaactcggtgagttgaacctttcttttgatagagcagttttgaaacactctttttgaagaatctgcatgtggatatttggacggctttgagaccttctttggaaactgtaatatcttgacataaacactagacagaagcattctcagaaacttctttcggatgtgtgcattcaactcgcaaatttgaacgtaccttatcatggagcagttttgaaactctcttttagtggaatctgcaagtggatatttggaccgctttgaggtcttcgttggaaacaggaatatcttcacataaacactagacagaagcattctcagaaatttcttattgatgtgtgcattcaactcacagagttgatcttttcttttgacagagcaggtttgaaacactctttttgtagattctgcaagtggacatttggagagatttgaggcctgtggtggaaaaggaaatatcttcatataaaaactagacagaaaaactctccaaaacatctttgtgatgtttgcattcaattcacagagttgaacatatcttttcatagagcagttttgaaacactcttttcatagaatctgcaagtggatatttggaatgctttgaggcttacgtgggaaacggaaatatcttcacatagaaactagacagaagcattctcagaaacttctttgtaatgtgtgcgttcaactcacagagttgaaactttctttatatagagcaggtttgaaacactctttttgtagaatctgcaagtggacatttgcagcactttgattcctatcgtggaaaaggtaatatcatcacataaagactagactgtagctttctcagaaacttctttgtgatgtttgcattcaactcacagagttgaaaatacctcttcatagcgcaatttagaaactctctttttgtagaatgtgcaagttgatatttggaactctgtgaggccttcgttggaaaccgggaataacttcacataaaaactagacagaagcattctcacaaacttctttctgatgtgtgcattaaactcacagatttggaccttgcttttgatagaacagatttgaaacactctttttttagaatctgcacgtgggcatttggagcactttgaggcctatggtggaaaaggaaatatcttcacataaaaactacacagaagcattctcagaaacttcttcgtgatgtgtgcattcacctcagagagttgaacgtttctttggatagagcagttttgaaacactctttttgtaaaatctgcaagtggatagatggaatgctttgcggccttcgttggaaacgggagtatcttcacataatcactagacagaagctttctcagaaacttttttgtgctgtgacattcaagtaagggagttgaacctttattttgaaagagcaggtttgaaacactctttttgtggagtctgcaagtggacatttggagagttttgaggcctatggtggaaaaggaaatatcttcacgtaaaaactacacagaagcattctcagaaacttctttgtgatatttgtattcaactcacagagttgaactttctttgatagagcagttttgaaccaatctttttgaagaaactgcaaatggatattaggacagctttgaggccttcattgaaaacgggaatgtctttacataaacactagacagaagcattcccagaaacttctctgtgatgtgtgtattcaattcacagagttgaacctttcttttgatagagcaggtttgaaacaatctttttggaggatctgaagtgaacttttggagagctttgaggcctatggtggaaaaggaagtatctttatataaaaagcaggcagaagaattctcataaaattctttgtgatcgtgcattcaactcacagattcgaacatacattttgatagagcagttttgaaacactcttttagtagaatctgcatgtggatatttttaccgctttgaggccttcgttggaaacgggaatatcttcacataaaaaatagaagcattctcggaaacttcttttgatgtttgttttcaactcacagatttcaacgtaccttatcatagagtagctttgaaacactcttttagcagaatctgcacgtgcatatttggagagctttgaggcttgtcgtggaaaaggaaatatcatcatataaaaactagacagaagaatgctcagaaacatctttgtgatgtttgcattcaactcaaagagttgaacataccttttaataaagcagttttggaacactcttcgtggaatctgcaagtggatatttggaatgctttgaggccttcattggaaacgggaatatcttcacataaaaactagacagaagtattctcagaaaattctttagggtggttgcattcaacacacagagttgaacataccttgtcctagagcagttttgaaacactctttttgtagaatctgcaagtggatatttggaccgctttgaggctttcgttggaaacgggaatatcttcacataaacagtagacagaaggattctcagactcttctttgtaatgtgtgctttcaactcacagagtttaaccattcttttgatagagcaggtttgaaacactctttttgtaggatctgcaattcgacattttgagagctttgaagcctacggttcaaaaggaaatatcatcacataaaaagtagacagaagcattctcagaaactacattgtgatgtttgcattcaacacacagagttgaacataacttttcatggagcagttttgaaacactctttatgtagaagctgcaagtggatatttggatagctttcaggacttcgttggaaacgggaatatcttcacataaaaactagagagaagcattctcagaaactagtttgtgaggtttgcattcaactcacagagttgaacatactttatcatagagcagttttgaaacactcttgtagtagaagctgcaagcggatatttggaccgctttgaggtcttcgttggaaacggcattatcttcacataatcactagacagatgctttctcaaaaacttctttgtactgggtgcattcaactcacagagttaaccttatttcatcgagcaggtatgaaacactctttttgtagaatctgcaattggacatttggagagctttgaggcctatggtggaaaaggaaatatcttcacacaaaaactagacagaagcattctcagaaacgtctttgtggtgtttgcattcaactcacaaagttgaagatacctttccatggagcagttttgagacactctttttgtagaatctgcaagtggatatttggaccgctatgaggccttcgttagaaatggaaatatcttctcataaacactagacagaagcattctcaaaaacttctttgtcatgcgtgcattcaactcaccgagttgaacatactttgtcatagagcagttttgaagcactcttttagtagaatctgcaagtggatatttggaccgctttgaggccttcattggaaacgggaatatcttcacataaaaactagacagatgcattctcagaaacttctttgtgatgtgtgtattcaacataaagatttgaacctttcttttaatagagcaggtttgaaacactctttttgtagaatctgcaagtggacatttggagagctttgaggcctatggtggaaaaggaattattttctcataaaaactagacagaagcattctcagaaacaactttgtgatgtgttcattcaacacaaagagttgaaggtttcttttgatatagcaggtttgaaatactctttttgtagaatctgcaaatggacatttggagagctttgaggcctatggtggaaaaggaaatatcttcacacaaaaactagacagaagcattctcagaaacgtctttgtggtgtttgcattcaactcacaaagttgaagatacctttccatggagcagttttgagacactctttttgtagaatctgcaagtggataattggactgctatgaggccttctttagaaatggaaatatcttctcataaacactagacagaagcattctcaaaaacttctttgtcatgcgtgcattaaactcaaagagttgaacctttcttttgatagagtagctttgaaatactcttttagtagaatctgcaagtggacatctggagagctttgaggcctatggtgtaaaaggttatatcttcatataaaaattagagagaagaattctcagaaacttctttgtgatgtttgcattcaactcagagttgaacgtaccttttcatagaacagttttgaaacactcttttcctagattctgcaagtggatatttggaacgctttgaggccttcgttggaaacgggattatgttcacacaaaaacgggcagaagcattctcagaaacatctttgtgatgtgtgcattcaactcaaagagttgaaactttcttttgatagagcatgtttgaaacactctttttgtagaatcggcaccggacatttttagagctatgaggcctatggtggaaaaggaaatatctttaaataaaaaccagacagaagaattctaaggaactacattgtgatgtttgcattcaactcatacagttgaacataccttttgatagagcagtgttgaaacactctttttgtagaatctgcaagtgaatatttggaccgctttgaggccttcattggaaacgggaatatcttcacataatcactagatagaagctttctcaaaaacttttttgtactgtgtgcattcaactcacggagttgtacctttcttttgatggagcaggtttgaaacactctttttccagaatctacaagtggacatttggagtgctttgaggcctatggtggaaaaggaaatatcttcccataaaaaccagacagaagcattctcagaaagttcttatgatgtgtgcattcaatttacagagttgaacataccttatcatagagcacttttgaaacactcttttagtagaatctgagagtggatatttgcactgctttgaggccttccttggcaacgggattatcttcacataaacactagacagaagcattctcaacaactcctttgtgatgtgtgcattcaactcacagagttgaacctttcttttcatagagcaggtttgaaaccgtctttttgcagaatcttcaagtggacatatggcaagctttgaggcctatgatggaaaaggaaatatcattatataaaaaccagacagaataattcttaggaactactttgtgatgtttgctttcaaatcacagggttgaacatacctcttcatagagcagttttgaagcactctttttgcagaatctgcaagtggatatttggaatgctttgaagccttcgttggaaacgggaatatcttcaaataaacactagatagaagcatttcagaaacttctttgtgatgtgtgcattcaactcacagagttgaagctttcttttgatagagcaggtttgaaacactctttttgtagaatctgcaagtggatatttgaacaactttgaggccttcattggaaaaggagatatcttcacataaacactagacagaatcgttctcagaaacttctttgtgatgtgtgcattccactcacagaattgaacctttcttttgatagagcaggtttgaaacactttttttgtagaatctgcaagttgactgttggagagctttgaggcctatggtggaaaaggaaatatctataaataaaaactagacagaagcattctcagaaacttctctgtgatgtttgcattcaactcacagagttaaacctcccttttcatagagcaattttgaaacactcttctcttataatctgcaagtggatatttggactgtttgaggccttcgttggaaacaggaatatcttcacataaaaactagacagaagcattctcagaaactacttttgatgtatgcattcacctcacagagttgaacctttcttttcatagagcagggttgaaacactctttttgcaggatctgcaagtggatatttggagctctttgaggcctatggtgaaaaaggatatatcttcacataaaaactagacggaagcattctcataaacttatttgtgatgtgtgcattcaactcacagagttgaacctttcttttgatagagcaggtttgaaacattcattttgtagaatctgaagtgcacatttggagagctttgaggcctatggtggaaaaggaagtatcttcacataaaaactagagagaagcgttctcagaaacttctttgtggtgtgtgcattcaactcacagagttgaacctctcttttcatagagcaggtttgaaacattcttttcttagtatctgcaagtggatatttggagagctttgagtcctatggtggaaaaggaaatatcttcacacaaaaattagacagaagcgttctcagaaacgtctttgtgatgtttgcattcaactcacagagttgaagatacctttccttggagcagtttttagacactctttttatagaatctgcaagcggatatttggaccgctatgaggccttcgttggaaacgggaatgtcttcacataaacactagacagaagcattctcaaaaacttctttttcaggtgtgcattaaactcaaagagttgaacctttcttttcatagagcagctttgaaacactctttttgtagaatctgcaagttgacatttggagagctttgaggcctatggtggaaaaggttatatcttcatataaaaataagagagaagaattctcagaaaattctttacgatgtttgcattcaactcacagatttgaagataccttttcatagagcagttttgaaacactctttttgtagaatatgcaagtggatatttgaaacgctttgaggcctttgttggaaacgggaatatgttcacacaaaaacaggcagaagcattctcagaaacttctttgtgatgtgtgcattcaaccccaagagttgaaactttcttttcatagagcatgtttgaaacactctttttgtagaatctgcaagtggacatttggagagcattgaggcctatcgtggaaaagtaaatatctcacatataaactagagagaagcattctcagaaactactttgtgatgtgtgcattctactcacagagttgtacctttcttttgatagagcagttttgaaacactctttttgtagaatctgcaagtgaacatttggaccgctttgaggcctttgttggaaacgggaatatcttcacataatcactagacagaagctttctcaaaaacttttttgaactgtgtgcattcaactgacagatttgaacttttcttttgatagagcaggtttgaaacactctttttctagaatctgcaagtggacatttggagcgctttgaggcctatggtggaaaaggaaatatcttcccattaaaaactagacagaggcattctcagaaacttcttatgatgtgtgcattcaaatcacaaggttggacataccttatcatagagtacttttgaaacactctttttgtagaatctgcaagtggatatttgcactgctttgaggccttcattggcaacgggattatcttcacataaacactagacagaagcattctcaggaacttctttgtgatgtgtgcattcaactaacagagttgagcctttcttttcatagagcaggtttgaagccctctttttgtagaatcttcaagtggacaaatggcgagctttgaggcctatggtggaaaaggaaatatcattatataaaaacaagacagaagaattctcaggaactactttgtgatgtttgctttaaaatcacagggttgaacatacctcttcatagagcagttttgaagcactctttttgcagaatctgcaagtggatatttggaacgctttgaagccttcattggaaacgggaatatcttcaaataaacactagatagaagcattctcagaaacttctttgtgatgtgtgcgttcaactcacagagttgaagctttcctttaataaagcaggtttgaaacactctttttgtagaatctgcaagtggatatttgaaccactttgaggccttcgttggaaaaggggatatcttcacataaacactagacagaatcattctcagaaacttctttgtgatgtgttcatttcactcacagaattgaacctttcttttgatagagcaggtttgaagcactttttttgtagaatctgcaagcagacatttggagagcttggaggcctatggtggaaaaggaaatatctataaataaaaactagacagaagcattgtcagaaacttctttgtgatgtttgcattcaactcacagagttgaacctcccttttcatagagtagttttgaaacactattttcgtagaatctgcaagtggatatttggaccactttgaggccttcgttggaaacgggaatatcttcacataaaaactagacagaagcattctcagaaactactttgtgatgtgtccattcaactcacagagttgaaccttccttttcgtagagcagggttgaaacactctttttgcaggatccgcaagtggacatttggagctctttttggcatatggtggaaaaggatatatcctcacataaaaactagacagaagcattctcataaacttatttgtgacgtttgcattcacctctcagagtctaacatactttatcatagagcagttttgaaacactcttttagtagtatctgcaagtggataattggagggctttgagttcattggaaacgggagtatctttacataatgatgctttctcagaaatttctttgtgctgtgtgtattcaactcacagagttgaacctttctttttatagagcaggtttgaaacactcttttgcggaatctacaagtggacattaggagcgctttgtggcctatggaggaaaaggaaatatcttcacataaaaactagacagaagcattctcataaacttatttgtgacgtttgcattcaactctcagagtttaacatactttatcatagatcagttttgaaacactcttttagtagtatctgcaagtgtataattggacggctttgaggctttcgttggaaacgggagtatcttcacacaatgaagctttctcaaaaacgtctttgtgctgtgtgcattcaactcacagatttgaaattttcttttgatggagcagatttgaaacactctttttgtagaatttgcaagtggatatttggacagctttgaggccttccctggaaacgggagtttcttcacataaaaactagacagaagcattctaggaaaattcattttgatgtgtgcattcaactcagagagttgacccttctattgatagagcaggtttaatactctttttgcagaatctgcaagtggacattatgagcgatttgatgtctatggtggaaaaggaaatatcttcacattaaaactaaacagcagcattctcagaaacttctttgtgatgtttgccttcaattctcagagttgaacatactttatcctagagcagttttgaaacactcttttagtagtatctccaagtggttatttgggccactttgaggacatcattggaaacgggagtaccttcacatgatcacgacacagaagttttctcagaaacttcctttggctgtgtgcattcacctcacatatttgaatatttctttgatagagcaggtttgaaactctctttttgtagaatctgcaagttgacatttggagcgctttgaggcctatggtggaaaaggaaatatcttcgtataaaaactagacagaagcattctcagaaacttctttttgatatgtgtactcaactcacagagttaaactttgttttgatggagcagttttgaaacactcttcttgtagaattttcaagctggatatttggacagctttgaggctttcgctggaaacgggaatatcctcacataaaagccagacagaagcattcacagaaacttctttgtgatttgcgcattcaactcaaagagttgaatctttactttgttagagcagctttgaaacactctttttgcagaatttacaagtggatatttggacagctttgaagccttcgctggaaacgcgagtagcttcacataaaaactagacagaagcattctcagaaatttctttgtgatgtttccattcaactcacagagttgaacatgccttttcatagagcagttttgaaacacaccgtttgtagaatctgcaactggatatttggagctctttgaggcctatggtgaaaaaggaaatatcttcacataaaaactagagagaagcattctcagaaacttctttgtgatgagtgtattcaactcccagagttgaaccactcatttgatagagcagttttgaaacactatttttgtagaatttgcaagtggatattagacagctttgaggctttcattggaaacgggattgtcttcatgtgaaaaatagaagcattctcagaatcttctttgtgatgtgtgcattcaacccacagtgttgaaactctattttgatatagcagattggaaacactctttttgtagaatttgcaagtggatatttgaacagctttgaggccttcactggaaacgggattatctccacataaaaaccagacagaaacattctcagaaacttctttgtaatgtgtgtactcaacttagaaaggtaaacctttcctttgatagagcagttttgaaacactattcttgtagaatttacaggtggatattaggacagctttgaggctttcattggaaacgggaatatcttcacattaaaaccagacagaagcattctcagaaacttctttgtgatgtgtgcattcaactcacagagttgaaatttcctttgataaagcagctttgaaacactctttttaaagaatttgcaagtggatatttggacagctttgaagccttcgctggaaacgggggtatcttcacataaaaactagacaaagcattctcagaaacttctttgtgatgtttgcattcaactaacagggttgaatattccttttcatagagaagtttgaaaaaatctttttgtagtatgtgcaagtagacatttggagcgcttgaggcctatggtgaaaaaggaaatattttcacataaaaactagacagaagcattctcagaaacttctttgtgatgtgtgtactccactcacagtgttaaacctttcttttgatagagcagttttgaaacactcttcttgtagaatttacaagtggatatttggacagctttgtggctttcgttggaaatgggaatatcttcaaataaaaaccagacagaagctttcacagaaacttctttgtgatttgtgcgttcaactcactgagttgaaactttcctttgatagagcaggtttgaaacactctttttgtagaattttcaaggggatatttggacagctttgaagccttcgctggaaatgggagtatcttcacataaaactagacagaagcattctaggaaacttctttttgatgtttgcattcaactcacagagttgaacgttccttttcatagagcagttttgcaacactctttttgtaatatctgcaagtggagacttggagtgctttgaggccttagaaacaggaatatcttcacataaaaactagacagaagcattctcaaaaacttctttttgatgtgtgtactcaactcacagagttgaacttttcttttgatagagaagttttgaaacactctctttgtagaatctgttaacggatatttggacagctttgaggctttcgttggaaacgggaatatcttcacataaaaactacacagaagcattcacagaaacttctttgtgatgtttgcattcaactcacagagttgacgattccttttcatagagcagttttgatgcactctttttgtagtatctgcaagtggatatttggagcactttgaggcctattttggaaaatgaaatattttcacataaaaactagacagaggcattctcagaaacttctttgtgatgtgtgtactccactcacagagtagaacctttctttgtatagagcagttttgaaacactctccttgtagaatctgcaaatggatatttggacagttttgaggcttttgttggaaactggaatatcatcacatagaaactagacagaagcattctcagaaacttttgtgatgtttgcattcaactcacagatttgaacattcctcttcatacatcagttttgaaacactctttttgtagtatctgcaagtggacatttggagcgctttgaggcctatggtgaaaaaggaaatgtcttcacataaaaactagacagaagcattctcaggaacttctttgtgatgtgtgcattcaactcacagggttgaacaatctttttcatacagcagttttgaatctctctttttgtagaatctccaatggacatttggaatgctttggggccttcattcgaaacgggaatatcttcccataaaaactagacagaagctttatcagaaactactttgggatatgtgctttcaactcccatagttgaacccttcttttgatagagcagttttgaaacactctcattggagaatctgcaagtggacatctggtgtgctttgaggcctatggagaaaaaggaattatcttaacataaaaactagacagaagcattctcagaaacttctttttgatgtgtgtactcaactgactcagttaaacctttcttttgatagagcagttttgaaacactcttcttgtagaatttataagtggatattaggacagctttgacacttttgttggaaacgggaatgtcttcacataaaaaccagacagaagaattatcaggaacatctttgttttatgcgcattcatctcacagagttgaaactttcttttgatagagcagctttgaaacaaactttttgtaaaatttgcaagtggatatttggacagctttgaagccttcgctggaaacgggagtatcttcacataaaaactagacggaaggatactcagaaacttccttgcgaggtttgcattcaactcaaagagttgaacattcctttgcatagagctgttttgaaacactctttttgtagaatctgcaagtggacatttggagtgacttgaggcctgtggtgaaaaatgaaatatcttcgcataaaaactagacagaatcattctcagacacttctttgtgatgtgtgtactcaactcacagagttgaacatttcttttgatagaacagttttgaaacactcccttgtagaatctgcaggtgtatatttggacagctttgagtctttcgttggaaacgggaatatcttctcataaaaactagacagaagcattctcagaaacttctctgtgatgtttgtcttcaactctcagagttcatcattctttttcatagagcagttttgaaacactctttttgtagaatctgcaagtggacctttggagagctttgaggcctgtggtaaaaaaggaaatatcttcacatgaaaactagacaggagcattctaagaaacttatttgtcatgtgtacactaaactcacagagttgaacttttcatttgatagagcagttttgaaacactttgtgaatcctgcaagtggatatttggagcgctttgaggcattctttggaaacgggaatatcttcacataaaaactagaaagaagcattctcagaaacttctttgtgaggtttgcattcaactcacagagttgaacttttcttttgataaagcagttttgaaacactctctttgtagaatgtgctgatggatatttggacagctttgaggttttcgttggaaatgggaatatcttcacataaaaactagacagaagcattttcagaaacttctttgcgatgtttgcattcaactcacagagttgaagattccttttcatagagcagtttttatacactctttttgtggaatctgtctgaggacatttggagcgctttgaggcctaaggtgaaaaaggaaatatcttcacataaaaactagacagaagcattctcagaaacttctttgtgaagtgtgcactcagctcacagagttaaaactttctttgatagagcagtcttgaaacacacttcttgtagaatttacaagtggatattaggacagctttcaggcttccgttggtaatcctgaagatattcgctggaatatcttcacataaattgtagacagaagcattctcagaaacatctttgtgatgtgtgctgttggaactttcctttgatagagcagcttgaaacactctttttgtagaatttgcaagtggatattgggacagctttgaagtcttcgcaggaaacgggtttatcttcacataaaaactagacagaatcattctcagaaactcctttgtgatgtttgcgttcaactcacagagttgaacattccttttcatagagcagttttgaaaaacactttttgtagaatctgcaagtggacatttgcagggttttggggcccactgtgaataaggaaatgtgttcacattaaaactagatagaagcattctcagaaacttctttgtgatgtgtgtactcaacacacagatttgaatctttgttttgacagagcagtttgaaacccttttttgtataatctgcaagtggatatttggatatctttgaggctttcgtcggaaacgggaatatcttcacataaaaactagagagaagcattctcagaaacttctttgtgaagtttgccttgaaatcacagagttgaacattccttttcatagagcagttttgaaacactctttttgtaaaatctgaagtggacatttggagcgctttgaagcctattttggaaaatgaaatattttcacataaaaactagacagaggcattctcagaaacttctttgtgatgtgtgtactccactcacagagtagaacctttctttgtatagagcagttttgaaacactctccttgtagaatctgcaaatggatatttggacagctttgaggctttggttggaaacgggaatatcttcacctaaaaaccagacagaagcattctcagaaacttctgtgtgatgtgcgcattcaactcacagaggtgaaactttctactgacagagcagcttttaaatactctttttgtagaatttgcaagtggatatttggacagctttcaagacttcactgaaaacggaagtatcttcaggtaaagctagacagaagcattctcagaaacttctttgtgatctttgcattaaactcacggagttgaacattccttttcatagaggagttttgaaaaactctttttgtagattctgcaagtggacatttggagcgctttgaggcctatgttgaaaaaggaaatatcttcccataaaaactagacagaagcattctcagaaacttctttgtgttgtgtgtattcaactcacagagttgaacctttattttgatagagcagatttgaaacactctttttgtagaatgtgcaagtggatattgggatagttttgaggctttcgttggaaacgggaatatcttcacataaaaactagacagaaacactctcagaaacttctttctgatgtgtgtcctcaactcacagagttgaacacttcttttgatctagaagttttgaaacactctctttgtagcatctgcaagtggacatttggtgtgcattgagacgtatggtgaaataggaaatatcttaacataaaaactggacagaagcattctcaaagacttctttgtgatgtttgcatttatctcacagatttgaacattccttttgattgagcagttttgaaacactctttttgtagcatctgcaagtggacattcagagcgcttggaggcctatggtgacaaaggaaatatcttcacataaaaactagacagaagcattctcagaaatttcttcatgatgtgtatactcaactcacagagatgaacctttcttttgctgtagcagttttgaaacactctttttgcagcatttacaagtggatatttggacagcttcgaggctttccttggaaaagggaatatcttcacataaaaactagaccgaagcattttcagaaacttctttgtgatgtgtatattcaactcaaagagttgatactttcttttgatagagcagatttgaaacactctttttgtagaaattgcaagtggatatttggacagctttgtcgccttcgctggaaaccggggtatcttcacataaaaactagacggaagtattctcaaaaacatctttgtgatgtttacattcaactcacatagttgaacattcctttcaatagagcagtattgaaacactctgtttgtagtatctgctagtggacatttggagcacttttaggcctctggagaaaaaggaaatatcttcacataaaaaccagacagaatcattatcagaaacatctttgtgatgtgcgcactcaacaaaaagagttgaaaattttctttgatggagcgtttttaaacagtctttttgtagaatctgcaagtggacatttggaacgctttgaagtcttcgttggaaacgggaatatcttcacataaaaactgtacagaatcattctcagaaacctctttgtgatgtgtgtactcaactcacagagttgaatctttcttttgataaagcagttttgaaacactgtctttgtggaaactgcaaatgaatatttggacaggtttgaggctttcattggaaacgggaatatcttcacataaaaactagacagaagcattctcaaaaacttgtttgtgatgtgtgcactcaactcacagagttgaacctttcttttcacagagcagttttgaaacactctttttgtggaatctgcaagtggacatttggagtgctgtgtggccttcattggaaacgggaataacttcacaaaaaactagacagaagcattctcagaaacttctttgcgatgtttgcattcaactcacagagttgaaacttttattttgatagagcagatttgaaacactgcttttgtggaatttgcaagtggatatttcgacaactttgaggctttcacttgaatcgggagtatcttctcataaaaactagacagaagatttcttggaaacatctttctgatgtttggattaaactcaaagagttgaacattcgttttcatagagtagttttgaaacattctttttatagtatctgcaagtcgacatttggagcactttgagtcctatggtgataaagaaaatatcttcaaataaaaattagacagaagcattctcagaaacttctctgtgatgtgtacattcaactcacagagttgaaaattctttttcatagagcagatttgaaacactccttttgtagaatctgcaagtggacatttggagcgctctgaggccttcgctcgaaatgggaatatcgttacataaaaactagacagaagcattatcagaaacttctttctgatgtgtcctttcaactcacagatttgaactcttcttttgatagagcagttttgaaacactctctttgtagaatctgcaagtggacatttggtgtgtttttggtttatggtgaaaaaggaaatatcttcacataaaaactagacaggatcattctcagaaacttctttgtgatgtgtgtactcaactcacagagctgaacctttcttttgatagagcagttgtcaaacactctttaagtggaatctgcaagtggacacttggagtgctttgtgaccttctttggaaacgggagtatcttcacatgaaaactatacagaagcattgtcagaaacttctttgtgatgtgtgcatttaactcacagagttgaacccttcttttgatagagcagttttgaaacactctctttgtagaatctgcaagttgatatttggacagctttgaggcattcattggaaacgggaatatcttcacataaaatctagacagaaggattctcagaaacttctttgtgatgttttcattcaattcacaaagttgaacattccttttcatagagcagttttgaaaaactcttttcatattatttgcaagtggacatttggagcgctttgaggcctacggtgaaaaaggaaatatcttcacataaaaactagatagaagcattatcagaaacttctttgtgatctgtgtactcaactcacagagttaaacatttcttttgatacatcagtttgaaacactcttcttgtagaatatacaagtggatattaggaccacgtgtgaagctttcgatggaaacgggaatatcttcacataaaaaccagactgaaggcattctcagaaacttccttgtgatgtgctcattcaactcacagagttgaaactttctattgataaagcagctttgaaacactctttttgtagaatttgcaagtggatatttcgaaagctttgaagccttcgctggacacgggagtatcttcccataaaaactagacagaagcattctcagaaacttatttgtgatgtttgcattcaactcagagagttgaacattccttttcattgagcacttttgaaacactctttttgtagtatctgcaagtggacatttggacagctttgtggcctatagagaaaatggaaatatcttcacataaaaactagacagaagcattctcagaaacatctttgtgatgtttgcattcaactcaaagagttgaacattccttttcatacagcagttttgaaaaactcttattgtagaatctgcaagtggtcatcctgagtgctttgaggccttcattcgaaacgggaatatcttcacataaaaaataacagaagcattctcagaaacttctttgtgatgtgtgcatttaactcacagatttgaacccttcttttacagagcagttttgacacactctttttgtgtaatctgcaagtggacatttgttgttctttgaggcctatgatgaaaaaggaaatatcttcacataaaaactagacaaaagcattctcagaaacatctttgtgatatctgaagtcaactcacagagttgaaactttcttttgagagatcagttttgaaacactctttttgtggtatctgcaagtggacacttggagcgcttagtggccttcgttggaaacgggaatatcttccaataaaaactagacagaagcattctcagaaacttctttgtgatatgtgcgttcaacaaccagagttgaacttttcttctgatagagcagattggaaacactcatttcgtagaatttgcaagtggatgtttggacagctttgaggccttcaatggaaacgggaatattttcacataaaaacaagacagaagcattctaagaaacttgttattgatgtgtgtcctcacctgagagaattgaacatttcttttgatagagcagttttgaaacactctttttgtaggatctgcaagtggatatttggacggctttgaggctttcgttggaaaccggaatattttcacataaaaactagagagaagcattctcggaaacttctttgtgatgtttgcattcaactcacagagttgaacattccttttcatagagaagttttgaaaccctctttttgtaggatctgcaagcagacatttggagcgatttgaggcctccggtgaaaaaggaaatatcttcatataaaaactagacagaagcattctcagaaattactttgtgatgtgtgcattcgactcacagagttgaaacttccttttgatagagcagatttgaaacactctttctgtagtattttgaagtggatatttggacagctttgaggccttcactggaaacaggtatatcttcacataaaaactacacagaagcactctcagaaactgctttgtgatgtttgcattccactcacagcgttgaatattccttttcatagagctgttttgaaacaatctttttgtagaatctgtaaatggacacttggaggactttgagggctatggtgaaaaaagaaatatcttctcataaaaactatacagaagaattctcagaaattctttgtgatgtgtgtactcaactcacagagttgaacctttcttttaatagagcagtttttaaatactgtttttgtagaaaatgcaagtggatatctggatagctttgaggctttcgttggaaacggaaatatcttcacataaaaactagacagaagcattctcagaaacttctttgtgatgtttaccttcatctcacagagttgaaaattccttttcatagagcagtttcgaaacactctttttgtagactctgcaagcgttcatttggagctctttgaggctttcgttcaaaaggagaatatcttcacataaaaactagacagaagcattatcagaaacatcttcgtgatgtgtgcattgaactcacagagttgaacccttcttttgatagagcagttttgaaacactctctttgtagaatctgcaagtggatatttggtgtgctttgaggcctatggtgaaaaaggaaatatcttaacataaaaactaggcagatgcattctcagaaacttatttgtgaagtgttaactcaactcacagagttgaacctttattttgatagagcagttttgaaacactctttttgtggaatctgcacgaggacatttggagcgctttgtggccttcgttggaaacgggaatatcctcacataaaaactacacagaggcattctcagaaactcctttgtgatgtttgaattcaactcacagagttgaacattccctttcatagagcagttttgaaacacagtttttctaatatctggaagtggacattttgagcgctttgaggtctatggggaaaaaggaaatatcttcacataaaaactagacagaagcattctcaaaaacttctttgtgatgtgtgccctcaactcacagggttagaccttttttttgatagagcagttttgaaatactctacttgtagaatttaaagtggatatttcgacagctttgaggctttcgttggaaacgggaatatcttcatataataaccagacagaagcattctcagaaacttctttctcatgtttgcaatcaaatcacagagttgaacattccttttcatagagtagttttgaaaaaccctttttgtacaatttgcaaatggacatttggagcgcttggaggcctacagtgaaaaaggaaatatcttcacataaaaattagacaaaagcattctcagaaatttctttgtgatgtgtgtactcaactcacagagatgaatctctcttttgctagagcagttttgattcactctttttgaagcaattacaagtggatatttggacagctttgtggcattcattgggaacgcgaatatgttcacataaaaactagacagaagcattctcagaaacttctttgtgatgtttgcattcagctcacagagttcagcatttcttttcatacagcagttttaaaacactctttttgtagtatctgctagtggacatttcgagcgctttgaggcctatgttgaaaaaggaaatatcttcacataaaaactagacagaagtattctcaggaactcctttgtgttgtgtgtactcaactcacagagttaaaccgtcttttgatagagcagtttcgaaacattcttcttgtagaatttacaattaaatattctgacaggtttgaggatttcattggaatggggagtatcttcacataaaaactggacagaagcattttcagaaactgctttctgacatgtgcattcaactcaccgagttgaaactttcttttgatagagcagattggaaacactctttttgtagaatttgcaagtggatatttgcacagctttgaggccttctttggaaacgggtgtatcttcacataaaaactagttagaagcgttctagtaaactgctttttgatttttgcgttcaactcacagagttgagcatttcttttcatagagcagttttgaaacattctttttgtagaatctgcacttggacatttggagtgctttgaggcctatggtggaaaagggaatatcttcacataaaaaccagacagaagcattctcagaaactactttgcgatgtgtgctgccaactcacagagttgaacattccttttcatagagcagtttcgaaacactctttttgtagaatctgcaagtggtcatttggagtgctttgatgccttccttcaaaacgggaatatcttcacataaaaactagatcgaagcattttcagaaacaactttgtgatgtgtgcattaaactcacagagttgaacccttcttttgatagagcagtttgaaacactctctttgtagtatgtgcaagtggacatttgttgtgcatgaggcctatcatgcaaaaggaaatatcttaacataaaaagttgacagaagcattctcagaaacttatttgtgatgtgtgcactccactcacagagttgaacctatcttttgatagagcagttttgaaacattatttttgtgcaatctgcacctggacattaggagcactttgtggccttcgttggaaacgagaatatcttcacataaaaactagaaagaagcattctcagaaacttcattgtgatatttgcattcaactcacagagttgaacattccttgtcatagagcagttttgaaacactctttttgcagaatctacagtggtcctttggagcactttgaggccttcgttcgaaacaggaatatcttcatttaaaaactagacagaattattatcagcaacatctttgtgatttctgcattcaactcagagaattgaactcttcttttgatagagcagttttgaaacactctctttgtagaatctgcaagtggacttttggtgtgctttgaggcttgtggtgaaaacggaaatatgttaacatgaaaactagacagacgcattctccgaaacttatttgtgatgtgtgcactcagctcacatagttgaacctttcttttgagagagaaattttgaaaccctctttttgtggaatctgcaagcgcacatttggaacgctttgtggcctacgttggaaacgggaatatcttcacataaaaactagacagaagcattctcagaaacttctttgtgatgttgacattcaactcacagagttgaacattccctttcatagagcagttttgaaacactctttttgtagaatctggaagtggacgtttggagcgctttgaggccaatggtgaaaagaaatatcttcacataaaaactagacagaagcattctcagaaacttctttgtgatatgtgtactcaactcacagatttaaatctttcctttgatagagcagttttgaaacactcttcttgtagaatttgcaagtggatattaggatagctttgaggctttccttggaaatgggaatatcttcatataaaaaccagacagaaacattctcagaaacttctttgtgatgtttgcattcaactcacagagttgaacattcctttttatagagcagttttgaaacactctttctggaatctgcaagtggacatttggagcgcttggtggcctatggtgaaaaaggaaatatcttcacataaaaacgagacaaaagcattctcagaaacttctttgtgaagtgtgtactcaactcacagagttgaacctttcttttgctgcagcagttttgaatcactccttttgaagcatttccaagtggatacttggacagctttgaggctttcattggaaacgggagtatcttcacataaaaactagacagaagaattctcagaaacttctttgtaaagtgtgcattcaactcacggtgttgacactttcttttaatagagcagattggaaacactctttttgtagtatttgcaattggatatttggacagctttgacgctttctttggaaacgggactatcttcacataaaaactagacagaagcattctcagaaacttctttgtgatgtgtgcactcaactcacagacttgaacctttcttttgatagagcagttttgaaacactctttttgtagtatctggaaggggacatttggagcgctttgaggcctaaggtgaaaaaggaaatatcgtcacataaacattagacagaatcattatcagaaacatctttctgatgtgtgcatccaactcacagagttgaacccttcttttgatagagcagttttgaaacactctctttgtagatctgcaagtggacatttggtgtgctttgaggtctacggtgaaaaagaaatatcttaacaaaaaaactagacagaagcattctcagtaactttttgtgatgcttacattcaactcacagaattgaacattcctcttcatagagcagttttgaaacactcttttgtagtatctggaagtggatatttggggggctttgaggcctatggcgaaaaaggaaataccttcacatgaaaactagacagaagcatcctcggaaacttctttgtgatgtgtgtagtgaagtcagagagatgaacctttctttttatagagcagttttgaaacactctctttgtagaatctgcaagtggacatttgttgtgctatgagacctacagtgaaaaaggaaatgtcttcatatgaaaactagacagaagcattctcagaaacttctttgagatgtgtgcagtcaactcacagagttaaacctttcttttgatagagcagattggaaacactctttttgtagtatttacaagtgggtatttggacaaatttgaggccttcacaggaaacgggaatatcttcacataaaaacaagacagaagcattctaagaaacttcttcgtgatgtgtgtcctcaactcacagagtggaacatttcttttgatagggaaattttgaaacactctttgtacgatctgcaagttgatatttggagagatttgaggctctcattggtaacgggaatattttcacataaaaacaagtcagaagctgtctcagaaacttctttgtgatgtttgcattcaactcacagagttgaacattccttttcatagagcagttttgaaacactctttttgtagaatgtgcaagtggtcatttggagcgctttgaggccttcgttcaaaaagggaatatcttcacagaaaagctagacagaatcattatcagaatcatctttgtgatgtgtgccttcaactcacagagttgagccgctcctttgatacagcagttttgaaacactgtctttgtagaatctgcaagtggacatttggtgtgctttgaggcctatggtgaaaaaggaaatatcttaaaataaaaactagtcagaagcattctcataagcttgtttgtgatgtgtgcactcaactcacagagttgaacctttcttttgacagagcagttttgaaactccctttttgtggaatctgaaagtggacatttggagagctttgaggagtatggtgggaaagaaatatcttcacacaaaaaaatagacagaagaattctcagaaacttctttgtgatgtttgcattcatttcaccgagttgaacattccttttcacagagcaggtttgaaacactctttttgtaacatctggaagtggacatttggagcgctttgaggcctatggtgaaaaatgaaatatcttctcataaaaaccagatggaaacattctcagaaacttctttgaaacgtgtgcattaaactcacagagttgaacttttcttttcatagagcagattggaaaaactctttttgtagaatttgcaagttgatatttggacagcttcgaggccttcactggaaacaggaatatcttcacataaaaacaagacagaagcattctaagaaacttctttgtgatgtgtgtcctctactcacagagtttaacgtttctttttcatagatcagttttgaaacactctctttgtaggatctacaagggaatacttggacagctttgaggctttcattggaaacggaatattttcacataaaaactaggcagaagcattctcagaaacatctttgtgatgtttgcattcaactcacagagttgaccattccttttcatagaggagttttgaaacactctttttgtagaatctgcaagtggacatttggaacgatttgaggcctatggtgaaaaaagaaatgtctacacataaaaagtagccagaagcattctcagaaactactttgctatgtgtgtactcaactcacagagtaaaagctttcttttgatagagcagtgctgaaacacactttttgtagaatttacaagtggatattaggtcagctttgaggctttcgttggaaacgggaatatcttcacataaaaagcagagagaagcattctcagaaacttctttgtgatgtgcgcattcaactcacagagttgaaactttcctttgatagagcagatttgaaacactctttttatagaatttgcaagtggatatttggacagctttgaggccttcgctggaaatgggaatattttcacataaaaactagacagaagcattctcagaaactactttgtgatgtttgcattcaacccacagagttgaacattacttttcatagagcagttttgaaactctctttttgtagaatctgtaagtggacacttggagccctttgaggtctatggtgaaaaaggaaatatcgtcatataaaaactaaacagaagaattctcagaaaatttttgtgatgtttgcattcaactcacagaattgaacattgcttttcatagagcagatttgaaacactctttttgtagaatctggaagtggtcaattgtagcgctttgaggcctttgttcgaatcgggaatatcttcacataaaaactaggcagaagcattgtcagaaacacctttgtgaagtgtgcattcaactcacagagttgaaaccttcttttgatagagaagctttgaaacactctctttgtagaatcggcaggtggacatttgttgtgctttgaggcctatgttgaaaaaggaaatatcttcacataaaaactagacagaagcattctcagaaacttctttgtgatgtctgcattcaactctcagagttgaacattttttttcatagagcagttttgaaacactctttttgtaatatctggaagtggacatttggagcgctttgaggattatggtgaaaaaggaaatatcttcacataaaaactagacagaagcattctcagaaactggtttgtaatgtgtgtactgaactcacagagataaagctttcttttgatagagcagttttgaaacactctttttgtaaaatttaaaagtggatattaggacacctttcaagctttccttaaaaacgggaatatcttcacataaaaactagacagaagcattctccgaaacttctttgtgatgtttgcattcaactcacagatttgatcatttcttttcatagaggagttttgaaacactttttgtagaatctccaagtggtcatttggagcattttgaggccttcttttgaaacaggaatatcttcacatagaaactagacagaatcattaccagacacatctttgtgatgtgcgcattgaactgacagaattaaacctttcttttgttagaggagttttgaaacactctctttatagtatctgcaagtggacattgggtgtgctttgaggcctatggtgaaaaaggaaatatcttaatataaaaactcgacagaattattgtcagaaacttatttgtgatgtgtgcagacaactcacagagtggaacctttcttttgatacagcagttttgaaacaccctttttgtttaatctgcacgtggacatttggagtgctttgtggccttcattggaaacgggaatatcttcacataaaaactagacagaagcattctcagaaatttcttggtgatgtttgcattcaacccacagaggtgaacattccctttcatagagcagttttgaaacactcttattgtagtatctggaattggatatatggagcgctttgagtcctatggtgaaaaaggtaatatcttcacataaaaagtagacagaagcattctcagaaacctctttgtgatgtgtgcattcaactcacacagtggaacctttcttttcatagagcagattggaaacactctttttgtagaattttcaagtggatatttggacagcttagaggccttcacaggaaacgggaataccttcacataaaaacaagacagaaacattctgggaaacatctttgtgatgcgtgtcctcaactcacagagttgaacatttctttttcatagagcagctttgaaaccctctctttataggatctgcaagggaatatttggacaactttgaggctttcgttggaaacgagaatattttcacataaaaactagtcaaaagcattctcaaaaacttatttgtgatgtgtgcacacaactcacagggttgaacattccttttcatagagcattttttaaacactctttttgcagaatctgtaagttgtcatttggagcactttgaggccttcgttcgaaacgggaatatcttcacatagaaactagacagaagcattctcagaaacatctttataatgtgtgtactcaactcccggagttaaacccttcttttgatagagcagcttggaaacactcttcttgtagaatttacaagtggctcttaggacacctttaaggctttccttggacatgggaatatcttcacataaaaaccagacagaagcatactcagaaacttctttgtgatgctttcattcaactcacagagatgaacattccttttcatagagcagttttgaaacagtctttttgtagaatctgcaagtggagatttggagcacttggtggcctatggtgaaaaaggaaatatcttcacataaaaactagacaaaagcattctcagaaacttctttgtgatgtgtgcactcaactcacagagatgaatctttcctttgctagagcagttttgaatcactatttttgaagcatttacaagtggatatttggacagctttgaagctttggttggtaacgggaatatcttcatataaaaactagatagaagcattctcagaaacttctttgggatatgttcattcaacttacagtgttgaaactttctttaaatagagcagattggaaacactctttttgtagaatttgcaaatgaatatttggacagctttgacgctttcatgggaaacgggagtatcttcacataaaaactggacagaagcattctcagaaacatctttgtgatgtgtgcattcaactcacagagttgaaacttacttttgatagagcggatttgaaacactctttttgtagaatttgcaagtggatatttggacagctttgacgctttcattggaaacgggtgtatcttcccataaaaactagacagaagaattccaagatacttctttgtgatgtgtgtactcaactcacagagttgaaactttcttttgatagagagttttgaaacactctttttgtagaatctgcaagtggatatttggataactttgagtttttcatgggaaacgcgaatatcttcacataaaaagtagacatgagaattctcagaaacttctttgtgatgtttgcattcgactcacagagttgaacattacttttcatagggcagttttgaaacactccttttgtagtatctgcaagcggacttttggagtgctttgaggcctatggtgaaaaatgaaatatcttcacatgaaaactagacagaagcattctcagaaacttctttgtgatgtgtgcattcaactcacagagttgaacattccctttcatagagcagttttgaaacaatatttttgtagtatctgcaaggggacttttggagcactttgaggccattgttgaaaaaggaaatatcttcacataaatactagacagaagcattctcagaaacttctttgtgatgtgtacattcaactcacagagttgaacattactttccatggagcagttttgaaacactctttttgtagtatctggaagtggatattttgaacgctttgaggcctatgatgaagaaggaaatatcttcacataaaaattagatcgaagcattctcagaaactactttgtgatgagtgcattcaactcacagtgttgaacatttcttttgatagagcagattggaaaccctctttatgtagaatttgcaagtggatatttggacagctttgaggccttcactggaaaccggaagatctacaaataaaaacaagacagaagcatgctaagaaacttctttgcgatatgtgtactcaactcacagagttgaacatttctttttttagagtagttttgaaacactctctttgtaggatctgcaagggaatatttggacacctttgaggctttcgttggaaacgggaatatcttcacataaaaactagtcagaggcattctcagaaacttcttcgtgatgtttgcattcaactcacacagttgaatattccctttcatagagcagttttgaaacactctttttgtagtacctggaaaaggacatttggagcgctttgaggcctatgctgaaaaaggaaatatcttcacataaaaactagacagaagcattctcagaaacttctctgtgatgtgcgtactcaactcacagagttgaacctttctgttgatactgcagttttgaaacattctttttgtataatctgcaagtggatatttggataaatttgaggctttcgttggaaacgggaatgtcttcacataaaaactagacagaagcattctcagaaacttttttttgatgcttgtattcaactcacagagttgaacattccttttcatagggcagttttgaaacactctttttgaagtatctgtaagtggaaacatggagctctttgaggcatatgctgaaaaaggaaatatcttccaataaaaactagacagaagaactctcagaaacttctttgtgatgtgtgtactcaattcacagagttaaacttttcttttgatagagcagttttgaaacactctttttgtagggtgtgcaagtggatatttggatagctttgagaatttcattggaaacgggaatatcttcacataaaaactagacagaagcattctcagagacttatttgtgatgcttgcattcatctcacagagttgaacattcctttccatagagcagttttgaaacactctttttgaggaatatgcaattggatatttggagcgatttgagacctatggtgaaaaataaaatatcttcacataaaaagtagacagaagcattctcagaaactactttgtgatgtgtgtactcaactcacagagttaaacctttcctttgatacagcagttttgaaacactcttcttgtagaatttacaagtagatattaagacagcattgaggatttctttggaaaagggaatatcttcacaaaaaactagacagaagcattctcagaaacttttttgtgatgtgtgcattcaactcacagagttgaaattttcttttgatagaggagattggaaacaatctttttgtagaatttggaagtggatatttggacagattggaggccttcgctggaaatgggtatatcttcacataaaaactacacagaagcattgtcagaaacttctttgtgatgcttgcattcaactcacagaattgaacattccttttcatagagcagttttgaaacactttttttgtagaatacataagtggaagcttggagggctttgaggtctatgataaaaaaggaaatatcttcccataaaaaatagacataagaattctccgaaacttctttgtgaggtgtgtactcaactcagagaggtgaactattcttttgattgagcagttttgaaacactctttttgtagaatctgcaagtggatatttggatagctttgaggatttcgtaggaaacgggaatggcttcacataaaaactagacagaagcattctcagaaacttctttgtgatgtttgcattcaactcacagatttgaaaattcgcttacatagagcagttttgaaacacactttttgtagtatctggaagtggacatttggagcgatttgaggcctatggtgaaaatggaaatatcttctaataaaaactagtcagaagaattatcagagacttctttgtgatgtgtgtactcaattcacagagttgaactttattttgatagaccaattttgaaacaatctttttgtagtatctgcaagtggatatttggatagctttgaggatttccatggaaacgggaatatcctcacataaaaactagacagaagcattctcagaaacttctttttgatgtttgcattcgactcacggagttgaaaattccctttcatagagcagttttgaaacactctttttgtaggatcttcaagtgttcatttggagcgccttgaggccttcgttcaaaatgggactatcttcacataaaaactagacagaagcattatcagaaaaacctttctgatgtgtgcattcaactcacagagttgaaccattcttttctagagcagttttgaaacactctgtagaatctgcaagtggacatttggtgtgctttgaggcctttggtgaaaaaggaaatatcttaacataaaaactagacagaagccttctcagaaacatatttgtgatgtgtgcactcaactcacagagttgaacctttcttttgatagagcagttttgaaacactctttttgtagtatctgtaagtggagatttagagcgctttgaggactatggtgaaaaaggaaatatcttcacatgaaaactagacagaagcattctcagaaacttctttgtgatgcttgcattcaactcgcagagttgaaaattccttttcatagagcagttttgaaacactctttttgtagaatctgctaaaggtcatttggagcactctgaggccttcgttcgaaacgggaatacttcacataaaaattagacagaatcattatcagaaacacctttgttatgtgtgcaatcaactcacagagttgaaccctttttttgatagagcatttttgaaacactctttttataggatctgcaagtggacattttgtgtgctttgaggcccatggtgtaaaaggaaacatcttaacataaaaactaggcagaagcattctcagaaactcctttgtgatgtgtgcattcaactcacagtgttgaaactttcttttgatagagccgatttgaaacactctttttgtagaatttgcaagtggatatttggacagctttgagaccttcgctggaaacgggaatatcttcacataaaaactagacagaagcatactcagaaacatccttgtgatgtttgcattcaattcatggagttgaacattccttttcatagggtagttttgaaacacactttttgtagtatctgcaagtggacttttggtacgctttgaggcctatagtgaaaaaggaaatatcttcacataaaaactagacagaagaactctcagaaacttcttggtgatgtgtgtactcaactcacagtgttgtacctttcttttgatagaggagatttgaaacactcttcttgtggaatctgcaagtggacatttggagtgctttgtggccttcgttggaaacgggtatatcttcatataaaaacgagacagaagcattctcagaaacatcttagtgaagtttgcattcacctcacagagttggaaattccctttcatagagcagttttgaaacactctttttgtagtatctggaattggacatttggagcgctttcaggaccatggtgaaaaaggaaatatattcacataaaaactagacagaagtattctcagaaacttctttgtgatgtgtgtacttaaatcacagtgttgaattttcttttgatagagcagttttgaaacactctttttgtagaatctgcaagtggatatttggataggatttaggctttcgttggaaacgggaatatcttcacataataactagacagaagcattctcagaaacttctttgtgatgtttgcattcaacacacagatttgagcattccttttcacagagtagtttttaaacactctttttgtagaatctgcaagtggtcatttggagcactttgaggccttcgttcgaaaagggaataccttcacataaaaactagacagaatcattatcagaaatatctttgcaatatgtgcattgaactcacagagttgaatccgtctttttatagagcagttatgaaacactctctttgtaggatctgcaagtggacattttggtgtgttttgaggcctatggtgaaaaatgaagtatcttaacataaaaactagacagaagcattgtcagaatcttatttgtgatgtgagcactcaactcacgtatttggacctgtcttttgatagagcagatttgaaacactttttttgtgtaatctgcaagtgcacatttagagcgctttgtggccttcattggaaacgggaatatcttcacataaaaactagacggaagcattctcagaaacttctttgtgatgtgtgtactcaactcactgagtttaacctttcttttgatagagaagttttgaaacaatctttttgtagtgtctgcaagtggatatttggatagctttgaggctttcgttggaaacgagaatatcttcacattaaaactagacagaagcattctcagaaacttgtttgtgatgtgtgtactcaactaacagagtttaacctttcttttgatagagcatttttgaaacactctttttgtaggatcagcaagtggacattttgtgtgctttgaggcctatggtgaaaaaggaaatatcttcccataaaaactagacagaagcattctcagaaacttccttgtgatgtgtgtactcaactcacagagatgattctttcttttgatagcgcagttttgaatcactctttttgaaacatttacaagtgcatatttggacaactttgagtctttcgttggaaacgggaatatcttctcataataactaaacaaaagcattctaagaaaattctttgtgatgtgtgcattcaactcacggagttgaacctttgttttgatgcagcagatttgaaaaactcttcttgtagaatttgcaagtggatattgcacagctttgagaccatcgctggaaacgggaatatcttcacatagaaactagacagaagcatactcagaaagttgtttttgatgttagcattcaactcgcggagttgaatattccttttcatagggcagttttgaaacacactttttgtagtatctgcaagtggacttttggagctctttgaggcctatcgtgaaaaaggaaatatcttcccataaaaattacacagaagaattcacagaaacttctttgtgatgtgtgtactcaactgacagagtttaagcatttttttgatagaggagatttgaaacactctttttctggaatctgcaggtggacatttggagtgctttgtcgtcttcgttcgaaacgggaatatcttcacataaaaactagacagaagcgttcacagaaacttctttgtgatgtttgcattcaactcacagagttgaatattctctttcatagagcagttttgtaacactctttttgcagtatctggaagtggacattcggagtgctttgaggcctatggtgaaaaaggaaatatcttcatataaaaactagacagaagcattctaagaaactgctttgtgatgtgtgtactcaactcacagtgttaaacctttcctttgatagagcacttttgaaacactcttcttgtagaattcacaggtggatattaggacagctttgaggctttcgttggaaatggtaatatcttcacataaaaaccagacagaagcattctcagaaacttctttgtgaggtttgcattcaactcacagagttgaacatttcttttcatagagcagttttgaagcactcttttcgcagaatctgcaagttgtcatttgtagcactttgaggccttcgttcgaaacgggaatatctccacataaaaactagacagaatcattatcagaaacatctttgtgatgtgtgcattcaactcacagagttgaacctttcttttgatacagcagttttgaaacactctgtagaatgtgcaagtggacatttggtgtgctttgtggcctattgtgaaacaggaaataatataaaaactaggacagaagcattctcagaaacttatttgtgaagtctgcactcaactcacatatttgaacctttcttttcttagagaagttttgaaacactctttttgtggaatctgcaagtgcacatttgacgcgctttgtggcttttgttggaaacggaaatatcttcacacaaaaactcgacagaaccattctcagaaacttctttgtgatgtttgcattcaactcacagagttaaactttccccttcatagagcagttttgaaacactctttttgtagtacctggaaacggacatttggagcgctttgaggcctatgctgaaaaaggaaatatcttcatataaaaactacacagaagcattctcagaaacttctttgtgatgtgtgtactcaaatcatggagttgaacctttcttttgatacagcagtttggaaacagtctatttgtagaatctgaaagtggatatttgggtagctttgaggctttcgttggaaacgggaatgtcttcacataaaaactagacagaagcattctcagaaacttttttgtgattcttttattcaactcacagagttgaacattccttttcatagagcagatttgaaacactctttttgaagcatctgtaagtggaaaattggagctctttgaggcatatgctgaaaaaggaaatatcttccaataaaaattagacagaagaattctcagaaacttccttgtgatgtgtgtactcaactcacagagttgaacctttcttttgatagagcagttttgaagcactctttttgtagaatctgcaagtggatatttggatagctttgaggctttcgttggaaacgggaatgtcttcacataaaaaccagacagaagcattctcagaaactttttttgatgcttgtattcaactcacagagttgaacattccttttcatagagcagttttgaaacactctttttgaagaatctgtaagtggaaacatggagttctttgaggcatatgctgaaaaaggaaatatcttctaataaaaactagacagaagaattctcagaaacttctttgtgatgagtgtactcaactcacagatttgaacttttcttttgatagagcagttttgaaacactctttttgtagggtgtgcaagtggatatttggatagctttgaggatttcgttggaaaagggaatatcttcacataaaaaccagagagaagcattctcagaaacttatttgtgatgcttgcattcatctcacagagttcaaaattcctattcatagagcagttttgaaacactctttttatggaatctacaagtggacatttggagcgatttgagacctatggtgaaaaaggaagtatcttcacataaaaagtagacagaagtattctcagaaactattttgtgatgtgcgtactcaactcacagagttaaacctttcctttgatacagcagttttgaaacactcttcttgtggaatttacaagtgcatataaggacagcataaaggatttcgttggaaacggggatatctgcacataaaactagagagaagaattctcagaaacttctttgtgatgtgtgcattcaactcacacagatgaaattttcctttggtagagcaggttggaaacactctttttgtagaatttgcaagtggatatttggacagctttggggcctttgctggaattgggtatatcttcacataaaaactagacagaagcattttcagaaactactttttgatgcatgcattcaactcgcagaattgatcattccttttcatagagcggttttgaaacactctttttgtagaatctgtaagtggaaacttggagcactttgaggcctatggtgaaaaaggaaatatcttcccataacaactagacagaagaattctcagaaacttccttgtgatgtgtgtactcaactcacagatttgaacatttcttttaatggagctgttttgaaacactctttttgtagaatctgcaagtggatatttggacagctttgaggctttcgttggaaacggaaatatcttcatataaaaactagacagaagcattctcagaaaattctttgtcatgtgagtcctcaactcacagagttcaacttttcttttgatagagcagatttgaaacactctttttgtagcatctgcaagtggatatttggatagctttgaggatttcgttgataaagtgaatatcttcacataaaaactagagagaagcgttctcagaaatgtctttgtgatgtttgcattcatctcacagagttgaacattccctttcatagagcatttttgaaacactcttttcgtagtatctgcaagtggacatttggagcgctttgggtcctacagtgaaaaaggaattatcttcacataaaaaggagacagaagcattctcagaaacttcttggtcatgtgtgtactcaactcacagagttgaacctttcttttcatacagcagttttgaaaaactctttctgtaggatctgcaagtagatatttggatagctttaagggtttcgttggaaacgggaatatcttctcataaaaactaatcagaagcattctcagaaacttctttgtgatgcttgcattcagctcacagagtttaacgttccttttcatagagcagttttgaaacactctttttgaagaacctgtcagtggaaacttggagcgctttgagggctatgttgaaaatatcttaccataaaaactagacagaagaattctcagaaacttctttgtgatgtgtgtactcaactttatagggttgaacttttcttttgaaagagcagttttgaaacactctttttgtagggtttgcaagtgggtatatggatcgctttgagtatttccttggaagtgggaatatcttcacataaaaacgagacagaaacattctaagaaactaatttgtgatatttgcattcaactcacagagatgaacattccctttcatagagcagttttgaaacactctttttgtagtatctgaaagtagagatttgcagcgctttgaggcctttggttaaaaaggaaatatcttcacagaaaactagacagaagtattctcagaaactgcttcgtgatgtgtgtactcaacttacatagttgaacattttttttgatacagcagttttgaaacactctttttgtagaatctgcaagtggatattcggatagctatgaggcttttgttggcaacgggaatatcttcacagaaaaactagacagaagcattgtcagaaacttctttgtgacgctcgcaatcaactcacagtgttgaacattccttttcatagaacagttttgaaacactctttttgtagtatctggaagtgtacattttgagcgctttgaggtctatggtgaaaaaggaaatatcttcacataaaaactagacagaagcattctcagaaatttctttatgatgtgtgtactcaacaaagagagttgaacctttccttaatacagcagttttgaaacactctttttggagaaactcaaaatggataattggatagctttgggtatttcattggaagcgggaatatcttcacataaaaactagagagaagcattctcagaaacttctttgtgatgtttgcattcaactcacagagatgaacattccttttcatggagcagttttgaaacactctttttgtcgtatctggaagtggacaattggagcgatttgtgccttatggtgaaaaaggaaacatcttcatataaaaattagacagaagcattcccagaaacttctttgtgatgtgtgcactcaactcacagagttgaacatttcttttgagacaggagttttgaaacactctttttgtagaatctgaaagtggatatttggatagctttgaggatttcactggaaacaggaatatcttcaattaaaaactatacagaagcattctcagaaaattctttgtgatgtgtgcattcaactcacagagttgaatctttcttttgatagagcagattggaaacacttttgttgtagtatttgcaagtggatatttggacagctttgaggccttcgttggaaacaggtatctcttcacataaaaactagacagaagcattgtcagaaactactttgtgatgcttgcattcaactcacagagttgaacattcgttttcctagagcagttttgaaacactctttttgtagaatctgtaagtggaaacttggagccctttgaggcctatggtgaaaaaggaaatatcttcccataaaaactagacagaagaattctcagaaacttctttgtgatatgtgtactcaactctcagagttgaacttttcttttgatagagctgttttgaaacaccctttttgtagaatctgcaagtggatatttagaatgctatgaggatttcgttggaaacgagaataccttcacttaaaaactagacagaagcagtcccagaaacttctttgtgatgtttgcattcaaatcacagagttgaacattccgtttcatagagcagttttgaaacactctttttgtagaatctgtaagtgaacatttggagcgcttagaggcctatggtgtaaaaggaaatatcttcgcataaaaactagacagaagaattctcagaaacttccttgggatgtgtgtactcaactcacagagttgtactcttctattgatagagcagttttgaaacactcttttcgtagaatctggaagtggatatttggatagctttgaggatttcattggaaactggattatcttcacataaaaaccagacagaagcattctcagaaactattttgtgatgtttgcattcaactcacagagttgaacattccttttcatagagaagctttgaaacactctttttgttgtatctggtagtggacacttgcagcacttggaggcctatggtgaaaaaggaaatatcctcacatagaaactagacagaagcattctcagaaacttctttgtgatgtgtg

SEQ ID NO: 902 - DNA, 13930 bp, Homo sapiens
  source 1..13930: mol_type = other DNA
aaaaatagacaaaagcattctgacaaacttcttcatgatgcatgcattcatctcacagaattgaacctttcttttgattgagcagctttgaaacacactttttgtagaatctgcaagtgtacatttcgagtgctttgaggcctatagtagaaaaggacttatcttcacataaaaactggacagaagcattctgaaaaactactttgtgatgtctgcattcatctcaaagagttgaaccttacttttgattggtcagttttgaaacaccatttttgtagaatctgcaagtgtgcatttggagcgctttgaggcatatggtggaaaaggaaatatcttcccaacaaaactagacagaagcattatgagaaacttctttgtgatgtttgcattcatctcacacagagttgaactgttcttttaattgagcagctttgaaaccctctttttgtagaatcagcaagaggacatgtggagccctttgaggcctatggtggaaaaggaaatatgttcacataaaaactagacagaagcattcttacaaacttctttgagatgtggtcattcagctcacagtgttgaacctttctttacattgagcagctttgaaacactctttttgttgaatctgcaagtggacatttggagcactttctggcctattgtggaaaaggacatatcaacatataaaaactagacagaagcattctgacaaacttcttcgtgatgtgtgtattcatctcacagagttgaatctttcttttcatttagcagtttttaaacactctgtttgtagaatctacaagtggacatttggagcactttgaggcctatggtggaaaaggaaatattttcacaaaaaaactagacagaagcattctgataaatttcattgtgatgtgtgcattcatgtcacagagatgaacgtttcttttgattgagcagctttgaaacattctttttgtagaatctacaactggacctgtggagtgctttggggcctatcatggaaaaggaaatatcttcacataaaacctagacagaagcattctgacaaacttctttgtgatgtgtgcattcatctcacagagttgaaccttacttttcattgagcagctttgaaacactctttctgtagaatctggaagtggacatttgcagcactttgaggcctatggtggaaaagaaaatatcttcacatcaaaacaagacagaagctttttgaaaaacttctttgtgacatgtgcattcatctcagagagttgaacctttcctttgtttgagcagctttgaaacaatctttttgtagaatctgcaagtgaaccattcgagcgtcttggggtctatggtggaaaatgaaacatcttcacataaaaactagacagaaaaattctgagaatcttctttgtgatgtgtgcattcacctcacagaattgaacgttacttttcattgagcagtcttgcatctctctttttgtagaatctgcaagtggacatttggagcgccttgaggtctctggtggaaaaggaaagatcttcacatgaaaactagacagaagcattctcacaaacttccttgtgatgtgtgcattcatctcccagacttgaaactttcttttgattgagcagctttgaaacacgctttttgtagaatctgcaagtggacatttggagcactttgaggcctatggtggaaaagggaatattttcacataaaaattagacagatgcatcctgacaagcttctttgtgatgtgtgcattcatctcacagagttgtaactttcttttgattgagcagctttgaaacactctttttgtagaatctgcaagtggacattggagcactttgaggcctattatggaaaattaaatatcttcacataaaatctagacagaagcattatgacaaacttatttgtgatgtgtgtgttcatctcatagagttgaacctttcttttgattgagcagtttggaaacactctttttgtagaatctgcaagtggacattttgagcactttgaggccaatgtggaaaaggtaatatcttcatataaaaactagatagaagcattctgagaaacttctttgtgatgtgtgcattcacctcccagagttgaatctttcctttgaaggaccagttttgaaatactctttttgaagaatctgcaagtggacatttaaagcgctttgtgtgctatggtagaataggaaatatcctcacataaaatctagacagaaggaatctgagaaacttctttgtgatgtgtgcatttatctcaccatgttaaacctttctttggattgagcagttttgaaactctcatttgtagaagctgcaagtagacctttggagcggtttgaggcctatcctggaaaagagaatatcttaacataataactagacagaagaattctgagaaacttctttgtgatttatgcggtcatctcacagagtcgaaactttcttttatttagcattttggaaacaatctttttgatgattctgctagcggacctttggagcgctttgcagcctatggcagtaaagaaaatatcttcacataaaatctagacagaaggaatttgagaaactttttgtgatgtgtctattcatctcacagagttaaacctttcttctgattgtgcagttttgaaactctgtttttgtagaaaacgcaagttgacatttttagcactttgaggcctatggtgtaaaaggaaatatcttcacataaaaactagacagaagatttctgagaaacatcattgtgatgtgtgcgttcatctcacagtgttgaacctttcttttgattgaacagttttgaaacactgtttttgtataatctgcaattggacatttggagcgctttgctgtctaaggtagaaaaggaaatatcttcatatagcatctagactgaagcagtctgaaaaacttctttgtgatgtgtgcattcatctcacagagttaactttttcttttcactgagcaattctgaaaatctctttttgtagaatctgcaagtggacttttggggcgctttgaggcctatggtggaaatagaaatatcttcacataagaactagacagaagcattccgagatgtttctttgtgaagtgtgaattcatctcacagagttgaattttactttcaattgagcagttttgaaacactctttttgcagaatctgcaagtggacatctggagtgctttgaggtctatggtggataacgaaatatcttcacataataactagacagaagcattctcagaaacttctttgtgatgtgtgcattcaactcacagagttgaacctttctgttgttggagtagctttgaaacactcctttcataaaatctgcaagtggacattgggagcgctttgaggcctctggtggaaaagaaaacatcttcacataaaaactaaacagaagcattctgtcaaatttctttgtgatctgtgcattcatctcacagagctgagcctttcttttcattgagcagtttggaaatgctctttttgtacaatgtgcttgtggacatttggagcacttttaggactatggtggaaaaggagatatcttcagataaaaactagaccaaagcattctgacaaccttctttgtgatatgtgtattcatctcacacagttgaaacttacttttgattgggcagttttgaaacatcctttttgtggaatctgcaggaggatatttggagggctttgatgcctattgtggggcctattgtggaataggaaatatcttcacattaaaactagatagaaacattctgagaatcttctttgttatgtgtgcattaatctcagagagttgaacctttctttgattgagcagttttggaacactctttttgtacaatctgcaagtggatgtttggagcgctttcaggactattgtggaaaaggaaatatcttcaaataaaaactaaacagaagcattctgagaaacttgcttgagatgtgttcattcatctcacagaggtgaacatttcttttgattgagctgttggaaacactctttttgtagaatctgcaagtggacatttggagtgctttgtagcctatggtagaaaaggtaacatcttcacataaaatatagacagaagcaatctgagaaattttttgcgatgtgtgcactcagctcagagagataaacctttcttttgattaagcagttttgaaactgtctttttgtagaatctgcaagtgcacatttggagcgctttcaggcctattttggaaaaggaaatatcttcgcataaaaactagacagaagaattctaagaaacttctttgtgatgtgtgcgttcatctcagagagttgaacctttcttttgattgagcagtttggaaacactctttttgtacaacctgcaagtggacatttggagggctttgcagcctatggtaggaaaggaaatatcttcacataaaatctagacagaagcaatctgagaaacttctttgtggtgtgtgcatatatctcagagttaaaccattctttttattgagcagttttgaaactctctttttgtagaatctgcaagtggacatttggagcgatttgaggcctatggtggaaaaggtaatatcttcacataaaaactacacagaagaattctgagaaacttctttgtgatgtgtgtgttcctcccacagagttgaacctttcttttgattgagcaacttggaaatactctttttgtagaatctgcaagtggacatttagagcattttgcggcctatggtggaagaataagtatcttcacataagaactagacagaagaattttgagaaacgtctttctcatgtgctcattcatctcacagagttgaacctttcttcttattgagcagtttggaaacactctttttgtagaatctgcaagtggacatttggagcgatttgctgcctatggtagaaaaggaaatatcttcatataaaatctcgatagaactaatctgagaaacttctttacgatgtgggcattcatctcacagagtaaaacctttcttttgatttaggagttttgaaactctctttttgtagcatctgcaagtggacatttggagcgctttgagacctgtgatggaaaaggaaatatcttcacataaaaactacactgaagaattctgtgaaacttctttgtgatgtgagcgttcgtctctcagagttgaaactttcttttcattgagaagtttggaaacactctttttggagtatctgaaagtggacattttgtgtgctttgcggcctatggtagaaaagtaaatatcttcatataaaatctagacagaagcaatctgagaaacatttctgttatgtgtgcattcatctcacagagttaaacctttttttgattgagcagttttgaaactctctttttcaagaatctgcaagtggacatttggagtgcatagaggcctatggtggaaaaggaaataacttcacataaaaactagacagaagaatgctcagaaactttgtgatgtgtgtgttcatctcacagagttgaatcattcttttaattgagcagtttggaaacactcgttttgtagaatctgcaagtggacatttggaacgctttgcagcctatggtagaaaaagaaatatcttcacataaaatctagaaagaagcaatctgagaaactacttttgtgatgtgcgcattcatctcacagagttaaacctctcttctgattcaacagttttgaaactctctttttctagaatctgaaagtggacatttggggcactttgagacctgtagtggaagaggaaatatcttcacataaaaactagacagaagaattctgagaaacctctttgtgatgtgtgcattcatctcacagagttgaacctttcttttgattgagcagttggaagcactctttttgtggagtctgcaggtggatatttggagggcttcgaggcctgttgtggggcctattggggaatagaaaatatcttcacattaaagctagacagaagaattctgagaaatttctttgtgatgtgtgcattaatctcacagagttgaacctttcttttgatgagcagttttgaaacactctttttgtagaatctgcaattggatgtttggagcgctttcaggattattgtggaaaaggaaatatgttcaaataaaaactagacagaagcattctgagaaattgtttgtgatgtgttcattcatctcacagagttgaacttttcttttgattgagctgttggaaacactctttttcaagaatctgcaagtggacatttggagcgctttgtggcttatggtagaaaaggaaacatcttcacataaaatctagacagaagcaatctgataaattttttgttatatgtgcattcatctcaaagaggaaacctttcttttcattgatcagttttgaaactctctttttatagaatctacaaatgcacatttttagtgctttgaggcctacggtggaaaaggaaatattttcacataaaaactagacagaagaactctgagaaacttctttggaatgtgcaggttcatctcacagagttgaatctttcttttgattgagcagtttggaaacactcttagtagaatctgcagttggacatttggagcactttgcggtcaatggtagaaaaggaaataacttcacataaaagctcaagagaagcaacctgagaacttctttgtgatatgtgcattcgtctcacagagtgaaatctttcttttgagtagttttgaaattctctttgtagaatctgcaagtggacatttggagcactttgaggccaatggtgggaaaggtaatttcttcccataaaaactagacagaagaattctgtgaaactttttgtgatgtgtgcattcatctcacagaattgaacctttcttttgatttagcagtttggaaacactctttttgtaaaatctgcaagtggacatttggagcattttggggcctatggtagaaaaggaaatagctctacataaaaaatagacagaagcaatctgagaaacttctttgtgatgtatgcattcatctcacagagttaaaagtttcttttgattggcagttttgaaacgcttcctttgtagattctgcaagtttacatttggagcgctttgaggcctatggtggaaaaggaaatatcttcacatagaaactagaaagaagaattctgagaaacttctttgtgatgtgtgcattcatctcacagagttgaacctttcttttgattgagcagtttggaaacactctttttgtagaatctgcaagtggacatttggagcgctttgcggcctaaggtagaaaaggaaatatcttcacataaaatctagacaaaagcaatctgagaaacttctatcttatatgtgcattcatctcacagcgttaaatctttcttttgattgagcagttttgaaactctttttttgtaggatctggaagtggacatttggagcagtttgaggcctgtggtggaaaaggcaatatcttcacataaaaactagacagaagaattctgaacaacatctttgtgatgtgtgcattcatctcatagttgaaactttctttgagcagtttggaaatactccttttgtagaatctgtcagtggacatttggagcgctttgaagcctatggtagagaacaaaatatcttcacataatatctagacagaagcaatctcagaaacttctttatgatatgtgcattcacctcactgtattaaacctttcttttgatagaggagttttgaaactctcttgttgtagaatctgcaagtggacatttggatcaatttgtggcctatggtgaaaaagttaatatcttcacatgaaaactagacagaagaattctgacaaacttctttgtgatgtgtgcattcatctcacacagttgaacctttcttttgattaagcagtttggaaacactctttttgtagaatctgcaagaggacatttggagtactgtacattcatctcacagaggtaaaactttctttggattgaacagttttgaaacactccttttggagtatccgcaagtggacatttggagcgttctgaggtctatgttggacaacgaaatatcttcacttaaaaactagacagaagatttctgagaaacttctttgtgatgcatgtgctcatctcacagagttgaatctttctttggattgagcagtttggaaacacactttttgtacaatctacaagtggaaattggagctctttgtggcctacagtagaaaaggaaatatcttcaaataatatctagacagaagcagtctgagaaatttctttgtgatgtgtgcattcatctcacagagttaaacgtttcttttgatagagcagtgttgaagctctctttttgtataatctacaagtggacatttgtagcgctttgagacctatggtaaaaaaggaaatatcttcatataaaaactagacagaagaattctgagaaacgtccttgtgatgtgtgcattcatctcacagagttgaacctttctttcgattcagcagtctggaaacactctttttgtagaatatgcaagtggagatttgcagcgctttgcaaccaatggaagaaaagcaaatatcttcacataaaatctagacagaagcaatctgagaaacttctttgtgatgtgtgcattcatctcacagtgttaactctttctcttgattgagcagttttgagactctctttttgtagagtctacaagtggacatttgtagtgctttgaggcctatggtggaaatggaattatcttcaaataaaaactagatggaagcattctgagaaacttctttgtgatgtgtgcattcatctcccagagttgaatatttcttttgatggagcagccttgaaatactccttttgtagtatctgcaagtggacattttgagtactttgaggcctatggtggaaaatgaaatatcttcacataaaaattagacagaagaattctgagaaacttctttgtgatgggtgccttctttgcacagagttgaacgtctcttttgattgaccgggatggaaacactgtttttgcagaatctgcaagtggaaatttggtgtgctttgcttcctatggtagaaaaggaaatatcttcacataaaaactagacagaagaattctgagaaacttctttgtcatgtgtgcatttgtctctcagagtttaacgtttctgttcattgagcagttttgaaactctctttttgtaggatctgcaagtggacatttggggcgctttgacacctatggtggaaaaggaaatatcttcccataaaaaacagacagaagaattctgagaaattactttgtgatgtgtgcactcaactgacagagttaaacctttcttttgattgagcagtttggaaacactcttttttgtagaatctgcaagtggacatttggagtgcttagtggcctatgttagaaaaggaaatatcttcacataaaatctagacagaagcaatctgagaaacttctttgtgatgcgtgcattcatctcacagagttcaacatttcttttgattgagcagtttggaaacactctttttgtagaatctgcaagtagacatttggagaactttgcagcctctggtagaaaaggaaatatcttcacataaaatctggacagaagcaatctgagaagcttctttgtgatgtgtgcattcatctcatagagttaaaactttatcttgattgagcaattttgaaactctctttttgtagaatctgctagtggacatttggagtgctttgagtcttatgattaaaaaggaaatatcatcacacaaaaactagactgaagaatttggagaaacttctttgtaatgtgtgcattcatcgctcagagttgaacctttcttttgattgagcagtttggaaacacttttttttttaatctgcaagtggacatttagagcgctttgcagcctatggtagaaaaggaaatatcttcacataacatctagacagaagcaatctgagaaacttctttgtgatgtgtgcattcttcccatagagttaaaccttcattttgattgaggagttttgaaactctctttttgtagaatctgcaagtagacatttggagcgctttgacgcctacggtggaaaggaaatatcttcacataaaaactagacagaagaattctgacaaacttctttgtgatgtgtgctgtcatctcacagatttgaaaatttcttttgattcatcagtttggaaacactctttttgttgaatctacaaatggacatctggagcactttttgtcctatggaagaaaatgaagtatcttcacataaaatctagacagaaacaatctgagaaacttctctgtgatgtgtgcattcacctcacagagataaacatttctttttattgaggagttttgaaactctctttttgtagaatctgcaagtggacatttttaatgctttgatgcctaaggtggaaaaggaaatatcttcatataaaaagtagacagaagaattctgagaaacttctttgtgatatgtgctttcatctcacagagttcaacttttcttttcattgagcagtttggaaacactctttttgtggaaactgcaagtggacattttgtgtgctttgaggcctacagtagaaaaggaaataccttcacatacaatctagacagaagcaatctgagaaacttctttgtgatgtgtgtattcatctcacacagttaagcctttcttctgatagagaagttttgaaactctctttttgtagaatctgcaagtggacatttttagcgctttgacgtctatggtcgaaaaggaaatatcgtcacataaaaagtagacaaaagaattctgagaaatttctttgtgatgtgtgcagtcatctcacagagttaaacctttcttctgattgagcagttttgaaactctttttgtagaatctgcaagcggacatttttagcactttgaggcctatggtggaaaggaaataacttcacataaaaactagacggaagcattctgagaaacgtctttggatgtgtgccttcatctcccagagttaaacgtttcttttgattgagcagttttgaacctctctttttctagaaactgcaaatggacatttggagtgcttagaggtctaatgtggaaaaggaaatatcttcacataaaaactagacagaagaattctgagaaacttctttgtgatgtatgtgttcatctcacagatttgaaactttcttttgattgagcagtttggagacactctttttgtagaatctgcaagtggacatttcgagtgctttgtggcctgtggtagaaaacgaaatatcttcacataaaatctagacagaagcaatctgagaaacttctttgtgatgtgtgcattcatctcccagagttgaacctttcttttgttggaccagctttaaaatactctttttgtagaatctgcaagtggacatttcgagcgtcttgagtctatggtggaaaatgaaatatcttcacataaaaactagacagaagcattctgagaaacttgtttgtgatgtgtttgttcatctcacagatttgaacctttcctttgattgagcagtttagaaacactctatttgtagaatctgcaagtggatatttggagcacgttgtggcctacggtagaaagggaaatatcttcacataaaatctacacagaagcaatctgagaaacttctttgggatgtgtgcattcatctcacagagttaaaccttccttttgattgaggagttttgaaactctccttttttagaatctgcaagtggacatttggagcactttgaggcctaaggtggaaaggaaatatctgcacataaaaactagacagaagaattttgacaaaattctttgtgatgtgtgctttcatctcacagatttgaaaatttcttttgattcaacagtttggaaacactctttttgtagaatctgcaagttgacatttggagcactttgcagcctatggaagaaaagtaaatatcttcacataaaatctagacagaaacaatctgagaaacttctctgtgacgtgtgcattcatctcacagagttaaacatttcttttgattgaggagttttgaaactctctttttgcagaatctgcaagtggacatttggagccctttgaggcctatggtggaaaaggaaatatcttcacataaaaactagacagaagaattctgagaaacttctttgtgatatgtgtgttcatctcacagagttgaacttttcttttgattgagcagtttggaaacactctttttgtacaaactgcaagtgtacatttggggcgctctgtggcctacagtagaaaaggaaataccttcacataaaatctagacagaagcaatctgagaaaattctttgtgatgtgtgcattcaactcacagagttaaaccttactttttattgagcagttctgaaactctttctgtagaatcttcaagcggacatttggagtggtttgaggcctatggtggaaaagtaaatatcttcacactaaaactggacagaagaattctgagaaacttctttgtgatgtgtgtgttcgtctcacagagttaagcctttcttttgactgagctgtttggaaacactctttttgtagaatctgcaagtagacatttggagcactttggggcctatggtagaaagggaaatatcttcccatcaaatctagagagaagcaatctgagaaacttctttatgatgtgtgcattcatctcatagagttaaacctttcttttgattgagcagttttgaacctctctttttgtagaatctgcaagtggacatttggagcgctttgaggcttatggtggaaagggaaatatcttcacataaaaattggacagaagaattctgagaaacttctttgtgatgtgtgcattcatctcacagagttaaacttttctttttattgagcagtttggaaagcctctgtttgtagaatctgcaagtgggtatttggaacgctttgcagcctatggtagaaaaggaaatatcttcacataaaatctagaaagaagcaatctgtgaaacttccttgtgatgtgtacattcatctcacagagttaagcctttcttttgactgagcagttttgaaactctctttttgtagtatctgcaagtggacaatttgagcactttgaggcctcagctggaaaaggaaatatcttcatgtaaaactagacagaagaattctgagaaacttcactgtgatatgtgcattcatctcacagagttgaacctttctttttattaagcagtttggaaacactctttttgtagaatctgcaaatggacatttggagcgccttcaggcctatggtggaaaggaaatatctttacttaaaaactagacaggagaattctgagaaaattctttgtgatgtgtgcattcatctcacagacttgagcctttcttttgattgagcagtttgaaaacactctttttgtaaaatctgcaagtggacatttggagtgctttgcagcctttggtagaaaaggaaatatcttcacataaaatctagacagaagcaatctgagaaacttctttgtgatgcgtgcattcatctcacagagttcaacatttcttttgattgagcagtttggaaacactctttttgtagaatctgcaagtagacatttggagcactttgtggcctgtggtagaaaaggaaatatcttcacataaaatctgcacagaagcaacctgagaaacttctttgtgatgtgtgcattcatctaatagagttaaaactttctcttgattgagcagttttgaaactctctttttgtagagtctgctaatggacatttggagtgctttgagtcttatgattaaaaaggaaatatcatcacataaaaactaga

SEQ ID NO: 903 - DNA, 21624 bp, Homo sapiens
  source 1..21624: mol_type = other DNA
attgagcagttttgaaaagctctttttgtaatatctgcaagtggacatttggagcgctttttggcctatggtggaaaaggaaatatcttcatttaagaactagatggaagcattctgtgaaactgctttgtgatgtgtgcattcctctcacagagctgaaactttattttaatttagcagttttgagaactctcattttgtagaatctgcaagtggacatttggagcactttgcggcctatggtggagaaggaaatatcttcacattaaaactaggcagaagcattctgacaagcttatttgtcatttatctcatggagttgccatttatctcatggagttgaacttaactttcgatagagcagttttgaaacactccttttgtagaatctgcaagtggacatttggagagctttgaggcctgtggtggaaaaggaaatatcttcacacaaaactagccagaagcaatctgacaaagtttttgtgatgtgtgcattcatctcgcagagtggaaccttaatttcgattgagcagttttgaaacactccttttgtagaatatgtaagtggacatttggagcgctttgatgcctatggtggaaaacgaaatatcttcacataataactagacagaagcattctgagaaacttctatgtgatgtgtgcattcatctcatagagttgaaactttcttttgattgagccactttgaaacactctttctgtagtatctgcaagtggacatttttggcgctttgaggcaatggtggaaaatgtaatatcttcacataaaaactagacagaagaattctgagaaacttctttgagatgtgtgtcttcatgttacagagttgaacctttcttttgattgagcagtttggaaacacactttttgaagaatcttcaggtggacaattggagcacttagtggcctatggtagaaaaggaactatgttcacatacaatctagacagaagcaatcggacaagagcaactctgaaacactctttctgtagtatctacaagtggacatttttggcgctttgaggcaatggtggaaaaagaaatatcttcacacaagaactatacagaaacattctgaaaaacttcactgagatgtgtggattcatctcacagagtagaacctttcttttgattgagtagttttgaaagactctatttgtagaatctgaatttggacatttggtgcgctttgtggcccatggtggaaaaggaaatatcttcacataaaaactagacagaagcattctgacaaacttcttcatgattgcgcattcatgtcacagagttgaacctttcttttgaatgagcagctttgaaacactctttttgtagaatctgcatgtggacatttggagctctttgaggcctatggtggaaaagtaaataccttaatataaaaactatacagaaatattctgacaaacttctttgttatgtgtacattcttcacacagattagaacctttcttttcattgagcagttttgaaaaactctttttgtggaatctgcaagtgtacatttgaagcgctttgaggcctatggtttaaaaggaaatatgtgcacataaaaactagacagaatcattcatagaaaatcctttgtgttgtgggcattcatctcaccggactgaacatttcttctgattgagcaggtttaaacactctttttgtagaatctgcaagtggacattgggagccctttgagtcctatggtggaataggaaacatcttcatttaagaactagacagaagcattctgagaaacatctttgtgatgtgtgcattcatctcacagagttaaacatttcttttgattgagctgtcttgaaactctattttgtagaatctgcaagtggacatttggagcgctttgaggcttatggtagaaaaggaaatatcttcacataaaatctagacaaaagcaatctgagaaacttctttgtgatgtgtgcattcatctcacagagttaaaatttcttatgattgagcagttttgaaactctctttttgtagaatctggaagtggacatttggagcccttttaggcctatggtggaaaaagaaatatcttcccataaaaactagacagaagaattctgagaaacttcttggtgatgtgtgcgttcatctcacagagttgaaactttcttttgattgagcagtttggaaactctctttttgtagaatctgcaagtggacatttggagcgctatgcggcctatggtagaaaaggaaatatcttcacataaaacctacacagaagcaatctgagaaacttctttgtgatgtgtgctttcatctcacagagttaaacctttcttttgattgaggggttttgaaactctctttttgtagaatctgcaagtggacaattggagcacttcgaggccttcggtggaaaagaaaatatctccacataaaaatagacagaagatttctgagaaacttctttgtgatgtgtgcattcatttcacagatttgaacatttctgttgattgagtagtttggaaactctcttttttagaatctgcaagtggacatttggagcgctttgcggcctatggtagaaaaggaattatcttcacataatatctagacagaagcaatctgagaaacttctttgtgatatgtgcattcatctcacagagttaagccattcttttgattgagcagttttgaacctctctttttgtagactctgcaagtggacatttcgagcactttgaggcttatggtgaaaaaggaaatatcttcccataaaaagtagacagaagaattctgaaaaactttgtgatgggcacgttcatctcacagagttgaaactttcttttgattgagcagtttggaaaccctctttttatagactctgcaagtggacatttggagcacgttgcggcctatggtagactaggaaatatgttctcataaaatctagacagaagtaatctgagaaacaactttgtgatgtgtgcattcatctcacagagataaacatttctttagattgagcagttttgaaactgtctttttgtagaatctgcaagtggacatttggagcgctttgaggcctatggtggaaaaggaaatatcttcacataaaaactacatagaagcattctgagaagattttgtgatgtgcgcattaatcacccagagttgaatctttcttttgaaggaccagttttgaaatactctgtttgtagaatcttcaagtggacatttcgagtgccttgaggcctatggtttaaaaggaaatatcttcacataaaaacaagacagaagaattctgagaaagttctttgtgatatgtgcgttcatctcgcagaattgagcctttcttttgattgagcagtgttgaaaccctctttttgtagaatctgcaaatggtcatttgcagcactttgaagcctacggtggaaaaggaatttatcttcacataaaaactagagagaagaattctgacaaacttctttctgatgtgtgcgttcatctcacagagttgaaactttcttttgattgagctgtttggaaacactctttttgtagagtctgcaagtggacatttggagcactttgtggcctatgatagaaaaataaatatcttcacataaaattcagagagagccaatctgagaaactactttgtgatgtgtgcattcatttcacaagtgaaaactttagttgggttgagcagttttgaaactctctttttgtagaatctgcaagtggacatttggagcgctgttaggcctctggtggaaaaggtaatatcttcacataaatactagacagaagaattctgagaaacttctttgtgatgtgtgcattaatctcactgagttgaaccttcattttgattgagcattttggaagcactccttttgcagaatctgcaagtgcagatttggagcgctttgtggccagtggtagaaaaggaaatacctgcaaataaaatctagacagaagcaatatgagaaaataatttgtgatgtgtgcattcttctcagagacttaaacatttcttttgatggagcattttttaaactctgtttttgtagaatctggaagtgtacatttggagcggtttgaggacaatgtggaaaagaaaatatcttcacatcaaaaccagattgaagaatactgggaaacttctttgtgatgtgtgcgttcatctcacagagtggaacctttcttttgattgagctgtttggaaacactctttttgtagaatctgcaagtggacatttggagcactttgtggcctatggtagaaaaggaaatatcttcacatagaattcagacagaagcaatctgagaaactgctttgtgatgtgcacattcatttcacagagttaaacttttcttttgattgagctgtcttgaaactctattttgtagaatctgcaagtggacatttggagcactttgtggcctatggtagaaaaggaaatatcttcacatagaattcagacagaagcaatctgagaaactactttgtgatgtgcacattcatttcacagagttaaacttttcttttgattgagctgtcttgaaactctattttgtagaatctgcaagtggacatttggagcactttgtggcctatggtagaaaaggaaatatcttcacatagaattcagacagaagcaatctgagaaactattttgtgatgtgcacattcatttcacagagttaaacttttcttttgattgagctgtcttgaaactctattttgtagaacctgcaagtggacatttggagcgctttgaggcctatggtagtaaaagaaacatcttcacataaaatctagacaaaagcaatctgagaaacttctttgtgatgtgtgctttcacctcacagagttaaaacttttttttgattgagcagttttgaaactctctttttgtagaatctgcaagtgaaaatttggagcgcttttaggcctatggtggaaaaggaaatatcttcccataaaaactagacagaagaattctgagaaacttctttgtgatgtgtgcgttcatctcacagagttgaaacttccttttgattgagcagtttggaaacactctttttgtagaatctgcaagggaccatttggagtactgtgaagcctatggtagacaaggaaatatcttcacataaattctagacagaagcaatctgagaaacttctttgtgttgtctgcattcatctcatagagttaaacatttcttttgattgagcagttttgaaactttttgtagaatctgcaagtagacattcggagcactttgaggcctatgctggaaaaggaaatatcttcacataaaaactagacagaagaattctgagaaacttctttgtgatgtgtgcactcatatcacagagttggacctttctttttattgagcagtttggaaacactgtttttgtagaatctgcaactggacatttggagagctttaaggcctatctttgaaaaggaaatatcttcacataaaaactagacagaagaattctgagaaatatctttgtgaggtgtgcattcatctcacagagtaaaacattttattgattgagcagttttggaactctcttttcattgaatctgcaagtggacatttggagcgctttgcggcctctggtggaaaaagaaataccttcacataaaaactagacagaagaattctgagaaacttcttcgtgatgtgtgctttcatgttacagagttgaagctttcttttgattgagcagtttggaaacattcttttgtagaatgtgtaagtggatatttggagcactttgcggcctatgatagaaaaggaaatatcttcacataaaatctagacagaagaaatctgagaaacttgtttgtgatgtgtgcattcatctaacagagttaaaactttctctttattgagcagttttgaaactctctttttttagaatctgcatgtggacatttggagcgctttgaggcctatggtggtaaaggaaatatcttcacataaaaactagatagaagcattctgagaaacctctttgtgatgtgtgggttcatatcacagagttgaaactttcttttgattgaccagttcagaaacactccttttgtataatctgcacgtggatatttggagtgctttgcgtcctatggtagaaaaggaaatttcttcacataaaatgtagacagaagcaatctgagaaacgtctttgtgatgagcgcattcgtctcacagatttaaacctttcttttgattgagcagtttttaaactacctttttgtagaatctgcaagtggacatttggagtgctttgaggccaatgttggaaaaggatatatcttcacataaaagctacacagaagaattctgagaaacatctttgtgatgggtgcattcacctcagagttgaaccttccttttgattgagcagtttggaaaccctctttttgtggaaactgcaagtggatatttggaggaatttgtggcctatgctagaaaaggaaatatcttcatataaaatctagacagaagcaatctgagaaacttctttgtgatgtgtgcatgcatctcactgagttaaaccattctttcaattgagcagttttgaaactctctttttttagaatctgcaagtagatatttggagctgtttcaggacgatggtggaaaaggaagtatcgtcatataaaaactagccagaagatttctgagaaacttctttgtgatgtgtgcattcatcccacagagttgaactttttttttgattaagcagtttggaaacactctttttgtagaatctgcatgtggacacttggagcactttgaagcctatggtggaaaaggaaatatcttcacataaaacctagacagaagcaatctgagaaacttctttgtgatgtgtgcattcatctcacagagttgaaccttccttttgattgagcagtttggaatccctctttttgtagaatgtgcaagtggacatttggagcgctttgcggactatggtagaaaaggaaatatcttcacattaaatctagacagaagcaatctgagaaatttctttgggatgtgtgcattcgtctcacagagttaaaccttccttttgatagagcagtattgaaactctctttttgtagaatctgcaagtggacatttggagtgctttcaggcctatggtggaaaaggaaatatcttcacataaaaactagacagaagaatttggacaaacttctttgtgatgtgtgcattcatctcacagaattgagcctttcttttgattgagcagtgttgaaaccctcttcttgtagaatctgcaaattgtcctttggagtgctttgaggcctatggtggaaaaggaatttatcttcacataaaaactagagagaattctgacaaacttctttatgatgtatgcgttcatctcacagagttcaaactttcttttgattgagcagcttggaaagagtctttttgtagaatctgcaagtggacatttggagtgctttttggcctatggacgaaaacgaaatatcttcatataaaatctagacagtagcaatctgagaaacttctttgtaatgtgtgcattcaactcagagagttaaaacttcagtttgattgagcagttttgaaactctctttttgtagaatctgcaagtggacatttggagcgctttgaggtctatggtagaaaaggaaatatcttcacataaaaactagacagaagaattctgacaaacttccttgtgatgtgtgtgttcatctcactgagttgaatctttattttgattgagtagtttggaaacactctttttgtagaatctgcaagtggacatttggagcacttttcggcctatggtagaaaaggaaataccttcacataaaatctagacagaagcaatctgagaaacttctttctgatgtatgcatttatctcacagagttaaacctttcttttgattgagcagttttgagactctctttttgtagaatctgccagtggacatttggagtgctttgaggtgtacggtggaaaaggaaatatcttcacataaaaactagacagaagaattctgacagacttctttgtgatgtttgtgttcatctcacagagtagaacctttcttttgatagagcagttttgaaactctctttttatagaatgtgcaagtggacatttggagcactttcaggcctatggtggaaaaggaaatatcttcacataaaaaaatgacagaaaaattctgagaaacttctttttgatgaatgcgttcatctgagagagttgaacctttcctttgattgagcagtttggaaacactctttttgtagaatctgcaagtggacatttggagtgctttgaggcctatggtggaaaaggaaatatcttcacataaaatctaacagaagcaatcagagaaacttcattgtgatatgtgcattaatttcagagagttgaacttttcttttcatggagtagttttgaaactctctttttgtaaaatctgcaagtggacttttggagcgctttgaagcctatggtggaaatggaaatatcttcatataaaatctagactgaagaattctgagaaacttctttttgaagtgtgttttcatctcatttgaactttccttacgattgagcagtctggaaacactctttttgcagaatctgcaagtgaacatttggtgtgttttgcagcctatggttgaaaaggaaatatctccatataaaatctagacagaagtaatctgagaaactcctttctgatgcgtgcattgatctcatagagtttaacctttcttttgattcagcagttttgaaactctctttttgtaatatctgcaagtggacatgtggtgcgctttgaggcctatggtggaataggaaatatcttcacataaaaaatagatagaagcattctgtgaaacttctttgtgatgtgtgcattcatctcccaagtctgaacctttcttttgatggactagttttgaaatactcttttcgtggaatctgcaagtggacatttcgagcgcattaaggtctatggtggaaaatgaaatatcttcacataaaaactagacagaagaattttgagaaacttctttgttttttgtgctttattctcacagagttgaatctttcttttatttgagcagtttggaaacactctttttgaagggtctgcaagtggacatttggagtgctttgcggcctatggtaggaaaggaaatatcttcacataaaatatagacagaagcaatctgtgaagcttctttgtgaagtgtgcattcgtctcagagttaaacctttcttttgattgagcagttttgaaactcactttttgaggaatttgcaaggggacatatggagcattttgtggcctatggtggaaaaggaaataccttcgcaaaaaactagacagaagaattctgagaaactattttgtgatgtgtgcgttcatctcacagagttaaactttttttgatcgagcagtttggaaccacactttttgaacaatctgcaagtggacatttgaagctctttgagaactgtggtggaaaaggaaatatcttcacataaaaactagacagaagaatactgtgaaatcactttgtgatgcgtgcgttcatcacacagagttgaaagtttcctttcattgggctgtttggaaacactctttttgtagaatctacaagtggacaattttagcgctttgcggcctatggtagaaaaggaaatatcttcacataaaatctagacagaagcaatctgacaaacttctttgtgatgtgtgcattcatctcacagagttaaacctttctttttattgagcagttttgaaactctctttttgtagtatctgcaagtggacatttggagcccttttaggcctgtggtagaaaaggaaatctcttcacataaaaactagacagaagaattttgaaaaacttctttgtgatgcgagctttcatctcccatagttgaaactttcttttgatacagcaggttggaaacactcttttgtagaatctgcaagtgcacatttggagtgctttgcggcctgtagtagaaaaggaaatatcttcacataaagtctagacagaagaaatctgagaaacttctttgtgatgtgtgcattcatctcatggagttaaacttttcttttgattgagcagtcttgaagctctctttttgtagaatccgcaaatggatatttggaactctttgaggccaacagtggaaaaggaaatatctgcacataaaaactagacagaagaattctgagaaacttctttgggacgtgtgcattcatctcacagatttgaacctatcttttgattgaacagttcggagacactctttctgtagaatatgcaagtggacatttggagaactttgtggcgtatggtagaaaaggaaatatcttcacataaaatctagacagaagccatctgagaaacttctttgtgatgtgtgcattcatctcatagagttaaacctttcttttgattgagcagtttggaaacactctttttgtagaatctcaaagtggacatttggagcacttagaggcctatggtggaaaaggaaatatcttcacataaaaactagatggaagaattctgataatcttctttgtgatgtgtgtgttcatctcacaaagctgaaattttcttttgattgagcagtttggaaacactctttttgtagaatctgcaagtggacatttgcaacgctttgcggcctgtggttgaaacagaaatatcttcacataaaatctagaaagaaacaatctgagaaacttctttgtgatgtgtgcattcatctcacagagttaaacctttctttggattgagcggttttgaaactctctttttgtagaatctgcaagtggacatttggagagctttgaggcctatggtggaaaaggtaatatcttcacataaaaactagacagaagaattgtgacaaacttcttgggaatgtgtgcgttcatctcacagacttgaacctttgttttgattgagcagtttggaaacactcttttttgtagaatctgcaaatggacatttgaagcactttgcgacctatggtagaaaaagtaataccttcacataaaatctagagagaagaaatcggagaaacttcttagtgatgggtgcattcatctcacagagtttaaactttcttttgattcagcagttttgaaactctctttttgtagaatctgcaagtggacatttggaacgcttgaggcctatggtggaaaaggaaatatcttcacataaaaactagaaagaagaattctgacaaacttctttgtgatgtgtgcgttcttctcacagagtgtaaccgttctttcgattgagcagtttggtaccactctttcttgtagagtctgcaagtggacatttggagcgctttgcagtctatggtagaaaagtaaatatcttcacatataatctagacagaagcaatatgagaaacttgtttgtgatatatgcattcatctcacagagataaccctttcttttgattgagcagttttgaaactctctttttgtagaatctgcaagtgaacatttagagcgtcttgaggcctatggtggaacaggaaatatcttcacgtaaaaattagacagaagaattctgagaaacttctttgtgatgagtgtgttcatctcacagagttgaacgtttcttttgattgagtagtttggaaacactctttttgtagaatctgcaagtggacatttggaactctttgcggccaatggtagaaaaggaaatatcttcacataaaatctagacagaagcaatctgagaaacttttgtgatgcgtgcattaatctcacagagttaaacctttcttttgattgagcagattggaaactctctttttgtagaatctgcaagtggacatttggcagcgcttcgaggcctgtggtggagaaggaaatatcttcacataaaaagtagatagaagcattctgagaaagttctctgtgatgtctgcactcatctcctggagttccaactttctttaggagaaccagttttcaaatactctttttggagaatctgcaaggggacatttcaagcaccttgaggcttaagttggaaaaggaaatatcttcacacaaaaaaagaagaattctgagaatcttttttatgatgtgtacgttcatctaacagagttgaacctttcttttgattgtgtagtttggaaacaccctttttgtagaatcagcaagtggacatttggagcgctttgtggcctatgatagaaaaggaaatatcttcacataaaatctagaaggaagcaatctgagaaactcctttgtgatgtgttcattcatctcacagagttgaaactttcttttgattgagcagttttgaaacactctcttcgtggaatctgcaagtggatatttggagccctttgaggcctattgtggaaaaggaaatttcttcacataaaaactactcagaagcattctgagaaacaccattgtcatgtttgcattcaactcacagagttgaaactacattttgattgagcagttttgaatctctctttttgcagaaactacaagtgtatgtttggaaagctttgaggcctattgtggaaaaggaaatatcttcacataaaaactacacagaagcattctgagaaactactttatgaggtgtgcattcaactcacagagttgaaattatcttttctttgaggagttttcaatctcactttttgtagaatctgcaagtggatatttgacgacctttgtgccctatggtggaaaaggaaatatcttgaaataaaaactacacagaagcattcagagaaacttcttcgtgatatgtgcattcaactcacagagttgaacctatcttttgattgagcagttttgaatctctctgtttgcacaatctgaaggtggatattttgagccctttgaggcctacagtggaaaagcaaatatcttcacataaaaactatgcagaagcattgtgagaaactactttgtgaggtgtgcattcaactcacagagttgaacttatcttctcattgagcagttttgaatttatcttttggtagaatctccaagtggatatttggagccctttgcgccctatggtggaaaaggaaatatcttcaaataaaaactacacagaatcactcagagaaactgctttgtgatgtgtgcattcatctcacagggttgaacctagcttatgattgagcagttttgaaacactctttttgtaggatcttcaagtggatatttggagcgctttgaggcctacagtggaaaaccaaatatcttcaaataagaactacacagaagcattctgagaaacttctttgtgatgtgtgcattcatctcacagagttgaaactttcttttgattgagcagttttgaaacactctttctgttgaatctgcaagtggatatttggagccctctgcagcctatggtggaaaaggaaatatcttcaaataaaaactacaaagaagcattcccagaaacttcttaatgatgtatgcgttcaactcacagagttgaacctatcttttgattgaacagttttgaatctctctttttgtagaatctgcaagtggatatttggagcgctgtgaggcctattgtggaaaatcaaatatgttcacataaaaactacagagaagcattctgagaaacttctttgtgctgtgtgcattcaactcacagagttcaacctgtctttcaattagcacttttgaatctctctttttgcagaatctgcaagtggatgttgggagagctttgaggcctatggtggaaaaggaaatagcttcacataaaaactacacagaagcattctgagaaacttctttgtgatgtgtgcattcatctcacagagttgaacctttcttttgattgagcagttttgaaacactctttttgtagaatctgcaagtggatatttggagaactttgaggcctattgtggaaaaggaaatatcttcacataaaatctactcagaagcactctgagaaacttctttctgatatgggcattcaactcacagagttgaacctttcttttgattgagcagttttgaaacactctttttgtagaatctgcaagtggatatttggagccctttgcaccctatggttgaaaaggaaatatcttcaataaaaactacacagaagaattctaagaaacttcttcgtgatgtgtgcattcaactgactgagttgaacttatcttctcattgagtagttttcaatctctgttttgtagaatctggaagtggatgtttggagccctttcaccctattgtggaaaaggaaatatctgcaaataaaactacacagaatcattcagagaaacttctttgtgatgtacacattcaactcacagagttgatcctatcttttgattgagcagttttgaatccctctttttgcagaatctgcaggtggatatctggagccttttgaggcttactgtggaaaatcaaatatgttcacataaaaactacacagaaagattctgagaagcttctttgcgatgtgtgcattcaagtcacagagttgaacctatcttttgattgagcagttttgaatctctctttttgcagaacctgtatgtggatgtttggagagcttggaggcctattgtggaaaaggaaatatcttcacataaaaactacagagaagcattctgagaaacttctttgtgaggtatgcattcaactcacagagttgatcttatcttctcattgagcagttttgaatctctccttttgtagaatctgcaagtggatatttggagccctttgagccctgtggtgcaaaaggaaatatcttgaaataaaaactacaaagaagcattcagacaaacttctttgtgatgtatgcattcaactcacagagttgaacgtatcttttgattgagcagttttgaatctctctttttgcaaaatctgcaggtggatatttggagccctttgaggcctactgtggaaaagcaaatatcttcacataaaaattacacagaagtattctgagaaactacttcgtgacgtgtgcattcatctcacagggttgaatctatctcatgattgagcagttttgaaacactctttttgtagaatatggaagtggatatttggagcccattgaggcctatagtggaaaggaaatatcttcacataaaaacaacacagaaggattctgagaaacttctttgtgatgtgtgcattcatctcactgagttgaatctttcttttcattgcgcagttttgaaacaccatttttgtacaatctgcaagtggatatttggagaactttgccgcctattgtggaaaaggaaacatcttcacataaaaactactcagaagcattctgagaaacttctttgtgatgtgggcattcaactcacagagttgaacctatcttttgattgagcagtttagagtctctctttttctataatctgcaagtggatatttggagccctttgcaccctatggtggaaaagaaaatatcttcaataaaaactacacagaagcattctaagaaacttcttcatgatgtgtacagtcaactcattgagttgaacttatcttctcaatgagcagttttgaatctctggttttgtagattctgcaagtagatatttagagccctttgtgccctatcgtggaaaaggaattatcttcaaatagaactacacagaaccattcagagaaacttctttctgatgtatgcattccactcacaaagttgaacctatcttttgattgagcagttttgaatacctctttttgctgaatctgcaagtggatatttggagcattttgaggcctgctgtggaaaatcaaatatgttcacataaaaactacacagaatcactcagagaaactgctttgtgatgtgtgcattcaactcacagagttgaacctatcttttgattgagcagttttgaatctctctttttgtagaatctgcaagtggatattaggagccctttgcgtcctatggtggaaaaggaaatatcttcaaataaaaactacatagaagcattcagagaaactgctttgtgatgcgtgcattcaactcacagaggtgaacttatgttttgtttgagcagttttgaaactctctttatgcagaatctgcaggtggatatttggagaccttcgaggcctactgtggaaaaggaaataacttcaaataaaaactatacagaagcattctcagaaacttcttcatgatgtatgcattcaactcacagagttgaacctatcttttgattgaacagttttgaatctctctttttgcacaatctgcaagtggatatttggagcgttgtgaggcctactgtggaaaatcaaatatgttcacataaaaactaaacagaagcattctgagaaacttctttgtgatgtgtgcattcaactcacagagttgaacctatcttttgattgagcagttttgaatctctctttttgcagaatctgttagtggatgtttggagagctttgaggactattgtggaaaaggaaatatcttcacataaaaactacagagaagtattctgagaaacttctttgtgaggtgtgcattcaactcacagagttgatcttatcttctcattgagcagttttgaatctctttttttgtagaatctgcaagtggatatttggagccctttgagccctatggtgcaaaaggaaatatcttgaaataaaaactacaaagaagcattcagacaaacttatttgcgatgtgtgcattcaactcacagagttgaaaatatcttttgattcagcagttttgaatctctctttttgcagaatctgcaggtggatatttggagccctttgaggactactgtggaaaagcaaatatcctcacataaaaattacacagaagcattctgtgaaactacttcatgacgtgtgaattcatctcacagggatgaatttatctcatgattgagcagttttgaaacactctttttgtagaatatggaagtggatatttggagcccactgaggcccacagtggtaaggaaatatcttcacataaaaacaacacagaaggattctgagaaacttctttgtgatgtgtgcattcatctcacagggttgaaactttcttttcattgagcagttttgaaacaccgtttttgtagaatcttcaagtggatatttggagaactttgctgcttattgtggaaaaggaaacatcttcacataaaaactactcagaagcattctgagaaacttctttgtgatgtgggcattcaactcacagagttgaacctatctgttgattgagcagtttagagtttctctttttctagcatctgcaagaggatatttggagcccaatgcgccctatggtggaaaaggaaatatcttcaataaaaactgcacagaagcattctaagaaacttcttcgtgatgtgtacattcaaatcactgagtcgaacttatcttctcaatgagcagttttgaatctctggttttgtagaatctacaagtggatatttggagccatttgtgccctatggtggaaaaggaattatctttaaataaaactacacagaaccattcagagaaacttctttgtgatgtatgcattcaactcacaaagatgaacctatcttttgattgggcagtttagaatctctcttttgaagaaactgcaagtggatatttggagccctttgcgctctgtgttggaaaaggaaatatctttaaataaaaacaacacagaagtagtcagataaacttctttgtgctgtctgcattaaactcagagagttgaaacttccttttggtagagcagttttgaaacactctttttgtagaatctgcaggtggatatttggagtgctttgagacctatggtagaaaaggaaatatgttcatacagaaactagatagaagcattcacagaaactactttgtgatgtgtgcattcaactcaaagagttgaacattcctttagtcagagcagttttgcagcactctttttgtagaatctgcaagtggatacttggactgctctgaggcctatgttggaaaaggaaatatcatcacacaaaaactagacagaagcattctcagaaacttctttgtgatttgtgcattcaactcatggagttcaccattgctcttgacagaacagttttgaaacacactttttgtagaatctgcaagtggatatttggagtgctttgaggtcttcggtggaaacaggaataccttcacataaacactagacagaagcattctcagaaacttctttgtgatgtgtgcattcaattcacagagttgaaccttcttttcgatagagcagttttgagacactgtttttgtataatctgcaagtggacatttggatcgctcttaggcctacggtggaaatggaaatatttttagataaaaaccagaaagaagaattctcagaaacttctttgtgatgtgtgcattcaactcagagagttgaacctttcttttgatagagcaggtttgaaatacttttttgtagaatctgcaagtggacatttgcagcactttgaggccaatggtggaaaaggaaataacttcaaataaaaactagacagaagcattctcagaaacttctttgtgatgtttgcattcaacccacagatttgaacataccttatcatagagcagttttgaaacactcttttagtagacttcgtaaggggatatttggaccgctctgaggccttcgctggaaacgggaataccttcacataaagactagacagaagcattctctgaaacctcttagtgatgtgtgcattcaactcacagagttgaatttttcttttgatagagcaggtttgaaacactctttttgtagaatctgcaagtggatatttggatagctttgaggatttcgttggaaacgggaatatcttcaattaaaaactatacagaagcattctcagaaacttctttgtgatgtgtgcattcaagtcacagagttgaatctttcttttgatagagcagattggaaccacttttgttgtagtatttgcaagtggatgtttggacagctttgaggccttcgttggaaacgggtatcccttcacataaaaactacacagaagcattctcagaaacttccttgtggtgcttgcaatcaactcactgagtggaacattccttttcatagagtagttttgaaacactttttttgtagaatctgtaagtggaaacttgaagcgctttgaggcctatggtgaaaaacaaaatatcttcccataaaaactagacagaagaactctcagaaacttctttgtgatgtgtgtactcaattaacagagttgaacttttcttttgatagagctgttttgaaacacactttttgtaaaatctgcaagtgcatatttggatatctttgaggatttcattcgaaacgggattatcttcacataaaaaccagacagaagcattctcagaaaccactttgtgatgtttgcattcaactctcagagttgaacattccttttcatacagaagttctgaaacactcttttttttgtatctggtagtggacatttggagcgctttgaggcctatggtaaaaaacgaaatatcctcacataaaaacgagacagaagcattctcagaaacttctttgtcatgtgtgtactcaactcacagagtttaacctttcttttgatacagcacgtttgaaacactcctttttagaatctgcaagtggatatttagatagctttgaggctttcgttgtaaagggggaatatcttcatgtaaaaactagacagaagcattctcagaaacttctttgttatctttgcattccactcacagagttgaacattccctttcatagagcagttttgaaactctctttttgtgaaatctgcaagtggacatttggagcgatttgagacctatggtgaaaaacgaaatatcttcacctaaaaagtggacggaaggattctcagaaactactttgtgacgtgtttactcaacttacagagttaaacctttcctttgataaggcagttttgaaaaactgtttttgtagactttacaagtggatattaggacagctttgagtatttcattggaaacgggaataacttcacatagaaactagagagaagcattctcagaaacttctttgtgatgcttgcattcaactcactgagttgaacattccttttcatagagcagtttggaaacacaatttttgtagtatatggaagtggaaacttggagcgctttgaggcctatggtgagaaaggaaatatcttccataaaaactagacagaagaattctcagaaacttctttgtgatgtgtgtactcaactcacagagttgaacttttcttttgatagagcagttttgaaacacactttttgtagaatctgcaagtggatatatggatagctttgaggattttgttggaaacaggaatatcttcacataaaaacaagacagaagcattctcagaaacctctttgtgatgtgtgtactcaactcacagagtttaacatttcttttgatacaccagtttgaaacagtctttttgtagtatctacaagtggatatttggatagcttggcagctttcattggaaacgggaatatcttcacataaaaactagacagaagcattctcagaaacttctttttggtgcttgcaatcaactcagtgagttgaatattccttttcacagagcagttttaagacactctttttgtcgaatctgcaaatggaaactcggagggcgttgaggactattgtgaaaaaggaaatatcttcccataaaaactagacagaagaattctcagaatcttccttgtgatgtgtgtactgaactcacagagttgaacctttcctttgatacagcagttttgaaacactctttttgtagaatctgcaagtggatatttggatagctttgaggttttcgttagaaacgggaatatcttcagataaaatctagacagaagcattatcagaaacatctttgtgatgtttgcattcaagtcacaaagttgaacattcgctttcatagagcaggtttgaaacactctttttgtagtatctgcaactggacatttggagcgctttgtggcctatggtgaaaaaggaaatatcttcccataaaaactagacagaagcattctcagaaacttgtttgtgatgtgtgtactcaactgacagagttgaacctttcttttgatagagcagttttgaaacactctttttgtagaatctgcaagtggatatttggatagctttgaggatttcgttggaaacgggaatatcttcatataaaatctagacagaagcattctcagaaacatctctgtgatgtttgcattcaagtcacagagttgaacattccctttcatagagcaggtttgaaacactctttttgtagtatctggaagtgcacatttggagcgcattgaggcctaaggtgaaaaaggaaatatcttcccataaaaactagacagaagcattctcagaaacttgtttaggatgtgtgtactcaactaacagagttgaaactttcttttgatagagc

SEQ ID NO: 904 - DNA, 811 bp, Homo sapiens
  source 1..811: mol_type = other DNA
gggatcattctgtgttgcagcaaggccctgcctgcctcaccagatgtggtgagcctatcctatctcactcggaggggtccaaaatcggatctgaacgggagtctggagaacacagcaggcatcttgaagctccacctccctccgtggaagtcggctcaaggaggtcctgaggacaggactcctaggggtttggccctgggacaggacaagacacccgcggccccctctcccacgccgccccaaactggaccccggatccagccgccgccgtggcggcaggaggaacctcgctgccgccgcgcggcggtggcggtatttaaaggggacgcagccatactgccaggagcggagcgcgagtcggctcagccaatgcgcatgcgcgaggcgcgagcggtttctcccgtcacagtggttcccatggttgtcttagaaaccagtccccgaggcttggcaaagcaggagccctctgtggcagtgcttgggtgtcggggctctgaggatccggcctcacctctccacggggtcgacgggaacgtctccggatgccaggagtcgcaaagggccgaccacgatgaggaaaccccaggcggggacgggggaagcagcacgggatcccagcctcaggcctgcccggacggtgttggttggggtgagtctccccaaaagtcgtgccgccatccgtgatctcgaggacaggtcggcctgcgtgcccctgggctgctctctcacccgagagtcgttctcgtcgtgagcagaaccccgcagcctcaggggttgcctggtggtgtgtgtttcaatgcctctgctgtat

SEQ ID NO: 905 - DNA, 3767 bp, Homo sapiens
  source 1..3767: mol_type = other DNA
caacaaagatcaaaagacacaaagaaggccattacataatggtaaaaggatcaattcagtaagaagcgctaactaccctaaatatatatgcactcaatacaggagcacccagattcgtaaagtaagtccttagatacctacaaacagacttagactcccacacaataataatgggagactttaacactccactgtcaatattagacagatcaacaagacagaaggttaacaaggatatccaggacttgaactcagctctgtgccaagtggacctaatagaaatttacagaattctccaccccatatcaccagaataaacattcttctcagcaccacatcacacttattctaaaattgatcacataattggaagtaagcactcctcatcaaaagtaaaagaacagacatcacaacaaactgtctctcagatcacagtgcaatcaaattagaacttagaattaagaaactcactcaaaatggcacaaacacatggaaacagaacaatctgctcctgaatggctactgggcaaataacgaaatgaaggcaaaaataaagatgttctctgaaaccagtgagaacaaagacaaaaaacaccagaatctctgggacacatctaaagcagtgtgtagagggaaatttatagcactaaatgcccacaagagaaaggaggaaagatctaaaatcgacagccccacatcacaattaaaagaactagagaaacaggagcaaacaaattcaaaaacaagcaaaaggcaagaaagatcagagcagaactaaaggagatagagacacaaaaaaaacttaaaaaatcaatgaatttaggagctgattttttgaaaagatcaacaaaattgatagaccactagcaagactaataaagaagaaaaaagacaagaatcaaatagacacaataaaaaatgataaatggtatatcatcactgatcccacagaaatacaaactaccatcagagaatactataaactcctctacacaaataaactagaaaatctagaagaaatggataaattcctggacacatacaccctctcaagattaaaccaggaagaagttgaatctctgaatagaacaataacaggctctgaacattgaggcaataattaatagcataccaacaaaaaaaaatccaggaccagatggattcacagctgaatcctaccagaggtacaaaaaggagctggtaccattccttctgaaactattccaatcaatagaaaaagaggaaatcctccctaattcattttatgggaccagtatcatcctgataccaaaccctggcagagacaaaacaaaaaaagagaattttagaccaatatccttgatgaacatcgatgtgaaaatcctcaataaaatactggcaaatggaatccagcagcacatcaaaaagcttatccaccacgatcaagtagtcttcatccctggaatgcaaggctggtacaacatacacaaattaataaatgtaatccatcatataaacagaatcaatgacaaaaaccacatgactatctccatagatatagaaaaggcctttgacaaaattcaacagtctttcctgctaaaaactctcaataaactacatattgatgaaatgtatctcaaaataataacagctatttatgacaaacccacagccaatatcatactaaatcagtaaaactggaaccattccctttcaaaactgacacgagacaagaatgccgtctctcacctctcctattcaaaatagtgttggaaatcctggccagggcaatcaggcaagagaaagaaacaaaggtattcaattaggaagtcaaattatctctgtttgcagatgacatgattgtatatttacaaaaccccatcgtctcagcccaaaatctccttaagctgataagcaactttagcaaagtctcaggataagaaatcaatatgcaaaaatcacaagaatttctatacaccaataacagacaaacagagagccaaatcatgagtgagctcccattgaaaattgttacaaagataataaaataccttggaatacatcttacaagggatgtgaaggacctcttcaaggaaaactacaaatcactgctcaatgaaataaaagaggacacaaacaaatggaagaaaattccatgctcatggatagaaataaccaatattgtgaaaatggtcatactgccctaggaaatttacagattgaatgccatccccatcaagctacaaatgactttcttcacagaattagaaaatactactttaaagttcatatggaaccaaaaaagagcccataacgccaagacaacctaagcaaaaagaacaaagtcggaggcatcacactatctgaattcaatctatactacaaggctacagtaaccaaacagcatggtactgatatcaaaacagatctatagacaaatggaacagaacagaggcctcagaaataacaccacacatctacaaccatctgatctttgaaaaacctgacaaaaacaagcaatggagaaaggattccctatttaataaatggtgctgggaaaactggctagccataggtagaaagctgaaactggatcccttccttacaccttatacacaaattaattcaacagggattaaagacttaaatgttaggcctaaaaccataaaaaccctagaagaaatcctaggctacatcattcaggtcataggcatggacaaagatttcatgactaaaataccaaaagcaatggcaacaaaagccagaatagacaaatcagatctaattaaattaaagcgcttctgcacagtaagggaaactaccaacagcatgaatagacaacctacagaatgggagaaaattgttggcaatctatccatctgacaaagggctaatatccagaatctacaaaaaaccaaaaaacttaaacaaatttacaagaaaaaaacaccatcaaaaattgggcaaaggatatggacagacacttctcaaaagaagacatctatgcagccaacagacacatgagaaaagctcatcatcactggtcatcagagaaatgcaaatcaaaaccacagtgagatacaatctcacgccagttagaatggtgattatttgaaagtcaggaaacaacagatgctggagaggatgtggaaaaataggaaggcttttacactgttggtgggattgcaaattagttccaccattgtggaagacagtgtggccattcctccaggatctagaactagaaataccatctgacccagcaattccattactgggcatatacccaaaggattataaatcatgccactataaagacacatgcacacgtatgtttattgcagcactattcacaatagcaaagacttggaaccaacccaaatgtccatcaatgatagaactgattaagaaaatgcagcacgtatacaccatggaatagtacacagccataaaaacagatgagtttttgtcctttgcggggacttggatgaagccagaaaccatcattttcagcaaactatcacaaggacagataaccaaacaccacatgttctcactcataggtgggaatttaccaatgagaacacttggacacaaggcaggtaacatcacacaatggggcctgtcaggggctggagggctagaggagagatagcagtaggagaaatatctaatgtaaatgatgagttgatgggtgcagcaaaacaacatggcacatgtaaacctatgtaaaaaacctgcatgttgtccacatgtaccctagaaattaaagtataataaaaaacaaa

SEQ ID NO: 906 - DNA, 2235 bp, Homo sapiens
  source 1..2235: mol_type = other DNA
tataggagctacacagaatgtgaagaaaaataaatgaaaccaaaccgctacaagaaataaccaaactaagaagacagcaagagagggaaaaaaaaaagaactgcaaaacatatgaaaaacaattaaccaaacgcaagttactccttacctatcaacaatgactttaaatgtgaaaggattaaactatctaattaaaagacatagagtggcacaatgcataaaagatactcatcagtacatatttataagggagtcactttagatataaagatacatagaggctcaaagtgaagggatgggaaaagatactgtacgcaaatggtaaacaaaaaagagcaagggtatctatatttagatcagaaaaaatagacttgaaatcaaaaactgtcactagagactaagaatgtcattatataatgataaaagttcaatccaatgggaagattgaaaatatatatccacccaacattagaacacctaaatatataaagttaatatcaacaaagctaaggggagaaatcagtaacactaaaataatagtagccaacttcagtaccccaaattcaataatggatagaacatctaggagggaataaaaaaagcggaaacagctgacttgaacaacacagtagattaaacactgacagatacagaactttccatccaacagcagcagaatatacattcttctcaagtgcacacagaatcttctctgagatagatcaaatcttaggtcacaaggcatactacaaatttaagaagtttgatataatgccaagtatcttctcattccacaatggaataaaattagaagtcaataacaaagaaaacagaaacatttacaaaaatgcagaaactaaacaacacatgcttaaacaaccattgggtaaaagaagaaatcaaaagggaattttaaaaatatcttgagacaaacaaaaatgaacatacaactcaacaaaacttacaggattcaataaaagaagtgctaagagggaaatgttacagtgataaatacctacattaaaaaataagaaagatctaactcgaacaacctaactttacaaataaacaattagaaaaagagaaactaactaaacccaaagttagcataatgaagtaaataataaagattagaatataaataaaataactataaaatagaaaacaatagaaaaatcaacaaagttagagttgaatttttggaaatacaaacaaaaataacagacccttagctacactaagaaaaaaagagaaactcaagtaaatataatcagaaatgaaaatggagacattataggaaatgtacaggaatacaaatgattataaaggacaattaagcgattatatgccaataaattggataacctagaataaatggataaattcttagaaagatgcaatctaccaaaatggaacaaaaaagaaatagaacagaccaaaagcaagcaaagagatttaatcagtaatcaataatttcccaacaaagaaaagcccaggtgcagatgctttcatgggcaacttctaccaaacattcaaagaagaactaacaccaaaacttcttaaactcttcagaaaaaatagaagagagaatactctcaaactcatttcatgaggccgatgttaccatgacttaaaagctagacgaagacaacacaagaaaaaataattacagaccagtatccttaacgaatatagatgcaaaaattctcagtaaaatactaactagcaaactgaattcaaaagcacattgaaaaggtcatacaccatgaccaattgtaacttatctatgtgatacaaggatgtttcaatgtgtaaaaattaataatgtgatataccacattaacagaatgaaagataaaaataacattccaatggatgcagaaaacacatttgacaaaattcaatatactttcatgataaaactctcaacaaaataagtatacaagaaacttacttcaacactgtaaaggctgtatatgaaaaacctatatctaatattataatcaatggggaaaaactgaaagctttttcttaatatctggaacaagacaaggatgtctactctcatcactcctattcaacatagtactggaaatcctagccagagcaatcaggcaagagaaataaaaggcatcaaaattgaaaggaaagatgtagatacctctgttaacagaaaacatgattattatacattgaaaactgtaaagactccacagaaaatggttacaaataata

(The sequence listing continues in the following parts.)
